United States Patent Application Publication US 2017/0114356 A1 - sequence listing, part 6

SEQ ID NO: 6469 - DNA, 3491 bp, Zea Mays
ctgaggttagcctttcgagaatttcaaaagctaactttcagacttgactatagactctagctggctggatctcgcccttttgtgtaggaagtaaacaaagaacattagatcggatgattaaaacacgagggtaagaaggttaggctgctacgaaccagcttaggtctgttagttatcttacacactgcacagtagctagactctgtacttaactcgataggcctaatcatcgcatcagtgatctacggacctagatcagtagatgaatgaggcagcgggcatgatgcggccatggagggttgtcagagccaattgtagctttgcaaagcttgtcttgcaagcaccctacagcacggcaagaacacacgcccccacagaatcatatgctatgtcctttgtctatctcccctatatatatacccctgccatgcatcccagtaaagccatcgtgtaaagcacaatggcagtttttctgctgctgctgcggcttgttgttttctctctttccttcgccattaatgccgttcaaactgctccagcatcccatgcacaagttcacattgtgtacttgggccacaacaacgacctcgatccttctctaactacagattcccacctgcaacttctgtcgacagtctttacagagccgaatgaagcgagagaagctattctgtacagctacagctgtgggttctctggttttgctgccttgctcaattcaacacaagctactaccttgtctggaacagacggggttgtatcagtattcaggagccggatgctggaggtccatacaacaaggagctgggatttcatgggcctccgcctgcacatgcatacggaacaatcatcgcagaggcatttgaaattcggagatgatgtgatcgtcggcgtccttgatactggagtgtggcctgaatccaagagcttcagggacgacccacactacggccccgtcccgtcttcatggaagggcacgtgcgtggtaggcgacgagttcgacccggccgccgcgtgcaaccgcaagctcatcggcgcgcgctactacctggccggcttcgagagcgagctcggcccgctgaacaccagcgacgggtcggagtaccggtcgccgcgcgaccgcgtcgggcacggcacgcacacggcgtccacggccgtggggagcgtggcgcccaacgccagctacttcggcggcctgggcggcggcgccgcccgcgggggcgcgcccagggcgcgcctcgcggtgtacaaggtgtgctggtacagggacctgacgggccggtgcagcgacgccgacatcctggccgcgttcgacgacgcgctgtgcgacggcgtgcacgtggtgtcggcgtccctcgggtcgcccccgccgctcatgccgctgctgtccacgagcaccgagatcggggcgttccacgccatgcagcgcggcgtcgtggcggttttctcggccgggaacgacgggccggacgcttccatggtgcagaacgtctcgccctgggggctcaccgtcgccgccagcagcatcgacaggaggttcccgacggtgatcacgctcgggaacaatgcctccatcgtggtgggtttttttctgctcctacgtgctttaccatgggcaaggatgatttatcatatgacgtgcttggcgtacgtggttgcgcagggagagagcttccttgtgaaagccatgaagaatggtctggtagatagcagcagcgtcttcaccgatgggacgtgcacattcgagcagctgatcaaccgcacggcggcgtgggggaagatcgtgctgtgcttcgccacgatgggaggggtgtccagcgacggcgcggcgctggcggtgtacgccggcaacggcgccggcgtgatcttcgccgacaccataagccggaaatcgagccaggacagcttctggcccaccgtccacgtggacctgtaccagggcacccagatcctcaactacatccgcgactcgagaaagccgacggtgcgcatatctccgagcaagacggttgtcggcgaaacgccggcgccggccgtggcgtacttctcttccagagggccgagctccgtctctccaaagatcctcaagcccgacgtgaccgcccccggagtgaacatcctggcagcatggccgcccaagtcgtcgccgacggtgatccccttggacaagcgcttgacagagtggaacatggactccggcacgtccatgtcgtgcccgcacgtctccggcatcgccgcggtcatcaagtccgtgcacccgacctggtccccggcggccgtcaagtccgccctcatgaccacagcgtacatgtacgacggcacgtcggacgtgatgcaggccggcgggacggtgaaggcggcggacgcgttcgacgtgggcgcggggcacgtggacccgctgcgcgcgctggacccggggctggtgtacgacgcgggcgcgcgcgaccacgtggtgttcctctgcagcctgggctacacggaggccgcgatccggaacatggtgctcccccagccggcgctggacacgagctgcccccgcggcggcggcggcggcggcggcccggaggcggacctgaactacccggccatcgtgctcccggacctgggcggcacggtgacggtgaagcggacggtgacgaacgtgggcgcgaaccgggacgccgtgtaccgcgccgccgtggccagcccgcagggcgcgcgcgccgaggtgtggccgcgggagctggccttctccgcgcgccccggcggcgagcaggcctcgtactacttgaccgtcacccccgcgaagctgtcccgcggccgcttcgacttcggcgaggtggtctggtcggacggcttccaccgcgtccgcacgccgctcgtcgtcagggtgaccaacctgccggacgacggcgtcaaggtggtccaggccgccaacgccacgggcgacggttcccaggccgccgcgtagcctccctagctgcctccggttctaggcaggcggcgcacggtctgagtgagcctgtcactgtcagaagatttcgcgcgtaggtttgctgtgtcagactacgcttcgtaccgagacttttttgcgtccgtttcttgggattggtattgtgctgtagtactggttggtggttatgtattggtcggtcccaccactagtatttgggagtatttgtgtcttgattgcacaagatggttgtgtcttgatgatacaagatggttgcgtattggtcccaccactagtagcgagggtggcagtgatgaaaacagaaagaagtactagcacggaattccacggcgttgctgtcagtggaccgatacttgtccagcgtgtgattggtagcagcaggaggaggaagggaatttgtacaaggcacgtgccaagccgagcaactggaagagtgcaacttctacagtgtgttttcagcacggaacatgtacacactcctacttgaatactactactagtggtagcagtagtgttaggtaagatcttaaattgacta

SEQ ID NO: 6470 - DNA, 3453 bp, Zea Mays
cttgcctatacatttggttccgtggaagtctggacctttagccctggagcttagccttttagttagttaaactaaaagcctgaggttagcctttcgagaatttcaaaagctaactttcagacttgactatagactctagctggctggatctcgcccttttgtgtaggaagtaaacaaagaacattagatcggatgattaaaacacgagggtaagaaggttaggctgctacgaaccagcttaggtctgttagttatcttacacactgcacagtagctagactctgtacttaactcgataggcctaatcatcgcatcagtgatctacggacctagatcagtagatgaatgaggcagcgggcatgatgcggccatggagggttgtcagagccaattgtagctttgcaaagcttgtcttgcaagcaccctacagcacggcaagaacacacgcccccacagaatcatatgctatgtcctttgtctatctcccctatatatatacccctgccatgcatcccagtaaagccatcgtgtaaagcacaatggcagtttttctgctgctgctgcggcttgttgttttctctctttccttcgccattaatgccgttcaaactgctccagcatcccatgcacaagttcacattgtgtacttgggccacaacaacgacctcgatccttctctaactacagattcccacctgcaacttctgtcgacagtctttacagagccgaatgaagcgagagaagctattctgtacagctacagctgtgggttctctggttttgctgccttgctcaattcaacacaagctactaccttgtctggaacagacggggttgtatcagtattcaggagccggatgctggaggtccatacaacaaggagctgggatttcatgggcctccgcctgcacatgcatacggaacaatcatcgcagaggcatttgaaattcggagatgatgtgatcgtcggcgtccttgatactggagtgtggcctgaatccaagagcttcagggacgacccacactacggccccgtcccgtcttcatggaagggcacgtgcgtggtaggcgacgagttcgacccggccgccgcgtgcaaccgcaagctcatcggcgcgcgctactacctggccggcttcgagagcgagctcggcccgctgaacaccagcgacgggtcggagtaccggtcgccgcgcgaccgcgtcgggcacggcacgcacacggcgtccacggccgtggggagcgtggcgcccaacgccagctacttcggcggcctgggcggcggcgccgcccgcgggggcgcgcccagggcgcgcctcgcggtgtacaaggtgtgctggtacagggacctgacgggccggtgcagcgacgccgacatcctggccgcgttcgacgacgcgctgtgcgacggcgtgcacgtggtgtcggcgtccctcgggtcgcccccgccgctcatgccgctgctgtccacgagcaccgagatcggggcgttccacgccatgcagcgcggcgtcgtggcggttttctcggccgggaacgacgggccggacgcttccatggtgcagaacgtctcgccctgggggctcaccgtcgccgccagcagcatcgacaggaggttcccgacggtgatcacgctcgggaacaatgcctccatcgtgggagagagcttccttgtgaaagccatgaagaatggtctggtagatagcagcagcgtcttcaccgatggggcggcgtgggggaagatcgtgctgtgcttcgccacgatgggaggggtgtccagcgacggcgcggcgctggcggtgtacgccggcaacggcgccggcgtgatcttcgccgacaccataagccggaaatcgagccaggacagcttctggcccaccgtccacgtggacctgtaccagggcacccagatcctcaactacatccgcgactcgagaaagccgacggtgcgcatatctccgagcaagacggttgtcggcgaaacgccggcgccggccgtggcgtacttctcttccagagggccgagctccgtctctccaaagatcctcaagcccgacgtgaccgcccccggagtgaacatcctggcagcatggccgcccaagtcgtcgccgacggtgatccccttggacaagcgcttgacagagtggaacatggactccggcacgtccatgtcgtgcccgcacgtctccggcatcgccgcggtcatcaagtccgtgcacccgacctggtccccggcggccgtcaagtccgccctcatgaccacagcgtacatgtacgacggcacgtcggacgtgatgcaggccggcgggacggtgaaggcggcggacgcgttcgacgtgggcgcggggcacgtggacccgctgcgcgcgctggacccggggctggtgtacgacgcgggcgcgcgcgaccacgtggtgttcctctgcagcctgggctacacggaggccgcgatccggaacatggtgctcccccagccggcgctggacacgagctgcccccgcggcggcggcggcggcggcggcccggaggcggacctgaactacccggccatcgtgctcccggacctgggcggcacggtgacggtgaagcggacggtgacgaacgtgggcgcgaaccgggacgccgtgtaccgcgccgccgtggccagcccgcagggcgcgcgcgccgaggtgtggccgcgggagctggccttctccgcgcgccccggcggcgagcaggcctcgtactacttgaccgtcacccccgcgaagctgtcccgcggccgcttcgacttcggcgaggtggtctggtcggacggcttccaccgcgtccgcacgccgctcgtcgtcagggtgaccaacctgccggacgacggcgtcaaggtggtccaggccgccaacgccacgggcgacggttcccaggccgccgcgtagcctccctagctgcctccggttctaggcaggcggcgcacggtctgagtgagcctgtcactgtcagaagatttcgcgcgtaggtttgctgtgtcagactacgcttcgtaccgagacttttttgcgtccgtttcttgggattggtattgtgctgtagtactggttggtggttatgtattggtcggtcccaccactagtatttgggagtatttgtgtcttgattgcacaagatggttgtgtcttgatgatacaagatggttgcgtattggtcccaccactagtagcgagggtggcagtgatgaaaacagaaagaagtactagcacggaattccacggcgttgctgtcagtggaccgatacttgtccagcgtgtgattggtagcagcaggaggaggaagggaatttgtacaaggcacgtgccaagccgagcaactggaagagtgcaacttctacagtgtgttttcagcacggaacatgtacacactcctacttgaatactactactagtggtagcagtagtgttaggtaagatcttaaattgacta

SEQ ID NO: 6471 - DNA, 3743 bp, Zea Mays
aaaaaacaaacaacaacgacaccaatatataatctcagacctatcaatcgctctcaggaaccgaaccaagaacaggccgtcctgaagatcagccctagttgtcagcatgaaaccaaggaagaaggaaaggacgctggtgcgagagaagctccaaatttttattctcttgaaagctacagagaagacacaggcacaaaggaaagcctcaagcgaaacatccctttccctattgaatggagacaaaacgccaagattgaaaagaaacggaacggctcagcgctggtagtccgtttcctctacatgcatccttatatggatggaataaatattgcatttaagaagcgtatggaaggtttctcctttttctgcatttatttatattttcctctacgcatttctagtggtttggcttgtggaggagaagaaaaaaaaaagcaaggggatgggaaatgcagcgaccagacatcatgtaaaaggtccccggagcaccaagacgaggtgcactcgagttcgagtggggcaatggggattgcagttgtggccatctctgtccctctccgcccccctgcaatcatcctagattccactgtcttggccccgagggctgaggcccttgaccttggttgctttgccctcactcctatctgaattgctttctgggctgtggttgggactcgcaaggaatgcactcatctagcgccatctgcttgatctttgagggatgtgaaatgatggggtttcttggtggagcggcggtggtggtggtgcccatctcattcccactaaccagtaactgcagccacaggttcacattgtgtacttgggccacaacaacgacctcgatccttctctaactacagattcccacctgcaacttctgtcgacagtctttacagagccgaatgaagcgagagaagctattctgtacagctacagctgtgggttctctggttttgctgccttgctcaattcaacacaagctactaccttgtctggaacagacggggttgtatcagtattcaggagccggatgctggaggtccatacaacaaggagctgggatttcatgggcctccgcctgcacatgcatacggaacaatcatcgcagaggcatttgaaattcggagatgatgtgatcgtcggcgtccttgatactggagtgtggcctgaatccaagagcttcagggacgacccacactacggccccgtcccgtcttcatggaagggcacgtgcgtggtaggcgacgagttcgacccggccgccgcgtgcaaccgcaagctcatcggcgcgcgctactacctggccggcttcgagagcgagctcggcccgctgaacaccagcgacgggtcggagtaccggtcgccgcgcgaccgcgtcgggcacggcacgcacacggcgtccacggccgtggggagcgtggcgcccaacgccagctacttcggcggcctgggcggcggcgccgcccgcgggggcgcgcccagggcgcgcctcgcggtgtacaaggtgtgctggtacagggacctgacgggccggtgcagcgacgccgacatcctggccgcgttcgacgacgcgctgtgcgacggcgtgcacgtggtgtcggcgtccctcgggtcgcccccgccgctcatgccgctgctgtccacgagcaccgagatcggggcgttccacgccatgcagcgcggcgtcgtggcggttttctcggccgggaacgacgggccggacgcttccatggtgcagaacgtctcgccctgggggctcaccgtcgccgccagcagcatcgacaggaggttcccgacggtgatcacgctcgggaacaatgcctccatcgtggtgggtttttttctgctcctacgtgctttaccatgggcaaggatgatttatcatatgacgtgcttggcgtacgtggttgcgcagggagagagcttccttgtgaaagccatgaagaatggtctggtagatagcagcagcgtcttcaccgatgggacgtgcacattcgagcagctgatcaaccgcacggcggcgtgggggaagatcgtgctgtgcttcgccacgatgggaggggtgtccagcgacggcgcggcgctggcggtgtacgccggcaacggcgccggcgtgatcttcgccgacaccataagccggaaatcgagccaggacagcttctggcccaccgtccacgtggacctgtaccagggcacccagatcctcaactacatccgcgactcgagaaagccgacggtgcgcatatctccgagcaagacggttgtcggcgaaacgccggcgccggccgtggcgtacttctcttccagagggccgagctccgtctctccaaagatcctcaagcccgacgtgaccgcccccggagtgaacatcctggcagcatggccgcccaagtcgtcgccgacggtgatccccttggacaagcgcttgacagagtggaacatggactccggcacgtccatgtcgtgcccgcacgtctccggcatcgccgcggtcatcaagtccgtgcacccgacctggtccccggcggccgtcaagtccgccctcatgaccacagcgtacatgtacgacggcacgtcggacgtgatgcaggccggcgggacggtgaaggcggcggacgcgttcgacgtgggcgcggggcacgtggacccgctgcgcgcgctggacccggggctggtgtacgacgcgggcgcgcgcgaccacgtggtgttcctctgcagcctgggctacacggaggccgcgatccggaacatggtgctcccccagccggcgctggacacgagctgcccccgcggcggcggcggcggcggcggcccggaggcggacctgaactacccggccatcgtgctcccggacctgggcggcacggtgacggtgaagcggacggtgacgaacgtgggcgcgaaccgggacgccgtgtaccgcgccgccgtggccagcccgcagggcgcgcgcgccgaggtgtggccgcgggagctggccttctccgcgcgccccggcggcgagcaggcctcgtactacttgaccgtcacccccgcgaagctgtcccgcggccgcttcgacttcggcgaggtggtctggtcggacggcttccaccgcgtccgcacgccgctcgtcgtcagggtgaccaacctgccggacgacggcgtcaaggtggtccaggccgccaacgccacgggcgacggttcccaggccgccgcgtagcctccctagctgcctccggttctaggcaggcggcgcacggtctgagtgagcctgtcactgtcagaagatttcgcgcgtaggtttgctgtgtcagactacgcttcgtaccgagacttttttgcgtccgtttcttgggattggtattgtgctgtagtactggttggtggttatgtattggtcggtcccaccactagtatttgggagtatttgtgtcttgattgcacaagatggttgtgtcttgatgatacaagatggttgcgtattggtcccaccactagtagcgagggtggcagtgatgaaaacagaaagaagtactagcacggaattccacggcgttgctgtcagtggaccgatacttgtccagcgtgtgattggtagcagcaggaggaggaagggaatttgtacaaggcacgtgccaagccgagcaactggaagagtgcaacttctacagtgtgttttcagcacggaacatgtacacactcctacttgaatactactactagtggtagcagtagtgttaggtaagatcttaaattgacta

SEQ ID NO: 6472 - DNA, 3626 bp, Zea Mays
aaaaaacaaacaacaacgacaccaatatataatctcagacctatcaatcgctctcaggaaccgaaccaagaacaggccgtcctgaagatcagccctagttgtcagcatgaaaccaaggaagaaggaaaggacgctggtgcgagagaagctccaaatttttattctcttgaaagctacagagaagacacaggcacaaaggaaagcctcaagcgaaacatccctttccctattgaatggagacaaaacgccaagattgaaaagaaacggaacggctcagcgctggtagtccgtttcctctacatgcatccttatatggatggaataaatattgcatttaagaagcgtatggaaggtttctcctttttctgcatttatttatattttcctctacgcatttctagtggtttggcttgtggaggagaagaaaaaaaaaagcaaggggatgggaaatgcagcgaccagacatcatgtaaaaggtccccggagcaccaagacgaggtgcactcgagttcgagtggggcaatggggattgcagttgtggccatctctgtccctctccgcccccctgcaatcatcctagattccactgtcttggccccgagggctgaggcccttgaccttggttgctttgccctcactcctatctgaattgctttctgggctgtggttgggactcgcaaggaatgcactcatctagcgccatctgcttgatctttgagggatgtgaaatgatggggtttcttggtggagcggcggtggtggtggtgcccatctcattcccactaaccagtaactgcagccacaggttcacattgtgtacttgggccacaacaacgacctcgatccttctctaactacagattcccacctgcaacttctgtcgacagtctttacagagccgaatgaagcgagagaagctattctgtacagctacagctgtgggttctctggttttgctgccttgctcaattcaacacaagctactaccttgtctggaacagacggggttgtatcagtattcaggagccggatgctggaggtccatacaacaaggagctgggatttcatgggcctccgcctgcacatgcatacggaacaatcatcgcagaggcatttgaaattcggagatgatgtgatcgtcggcgtccttgatactggagtgtggcctgaatccaagagcttcagggacgacccacactacggccccgtcccgtcttcatggaagggcacgtgcgtggtaggcgacgagttcgacccggccgccgcgtgcaaccgcaagctcatcggcgcgcgctactacctggccggcttcgagagcgagctcggcccgctgaacaccagcgacgggtcggagtaccggtcgccgcgcgaccgcgtcgggcacggcacgcacacggcgtccacggccgtggggagcgtggcgcccaacgccagctacttcggcggcctgggcggcggcgccgcccgcgggggcgcgcccagggcgcgcctcgcggtgtacaaggtgtgctggtacagggacctgacgggccggtgcagcgacgccgacatcctggccgcgttcgacgacgcgctgtgcgacggcgtgcacgtggtgtcggcgtccctcgggtcgcccccgccgctcatgccgctgctgtccacgagcaccgagatcggggcgttccacgccatgcagcgcggcgtcgtggcggttttctcggccgggaacgacgggccggacgcttccatggtgcagaacgtctcgccctgggggctcaccgtcgccgccagcagcatcgacaggaggttcccgacggtgatcacgctcgggaacaatgcctccatcgtgggagagagcttccttgtgaaagccatgaagaatggtctggtagatagcagcagcgtcttcaccgatggggcggcgtgggggaagatcgtgctgtgcttcgccacgatgggaggggtgtccagcgacggcgcggcgctggcggtgtacgccggcaacggcgccggcgtgatcttcgccgacaccataagccggaaatcgagccaggacagcttctggcccaccgtccacgtggacctgtaccagggcacccagatcctcaactacatccgcgactcgagaaagccgacggtgcgcatatctccgagcaagacggttgtcggcgaaacgccggcgccggccgtggcgtacttctcttccagagggccgagctccgtctctccaaagatcctcaagcccgacgtgaccgcccccggagtgaacatcctggcagcatggccgcccaagtcgtcgccgacggtgatccccttggacaagcgcttgacagagtggaacatggactccggcacgtccatgtcgtgcccgcacgtctccggcatcgccgcggtcatcaagtccgtgcacccgacctggtccccggcggccgtcaagtccgccctcatgaccacagcgtacatgtacgacggcacgtcggacgtgatgcaggccggcgggacggtgaaggcggcggacgcgttcgacgtgggcgcggggcacgtggacccgctgcgcgcgctggacccggggctggtgtacgacgcgggcgcgcgcgaccacgtggtgttcctctgcagcctgggctacacggaggccgcgatccggaacatggtgctcccccagccggcgctggacacgagctgcccccgcggcggcggcggcggcggcggcccggaggcggacctgaactacccggccatcgtgctcccggacctgggcggcacggtgacggtgaagcggacggtgacgaacgtgggcgcgaaccgggacgccgtgtaccgcgccgccgtggccagcccgcagggcgcgcgcgccgaggtgtggccgcgggagctggccttctccgcgcgccccggcggcgagcaggcctcgtactacttgaccgtcacccccgcgaagctgtcccgcggccgcttcgacttcggcgaggtggtctggtcggacggcttccaccgcgtccgcacgccgctcgtcgtcagggtgaccaacctgccggacgacggcgtcaaggtggtccaggccgccaacgccacgggcgacggttcccaggccgccgcgtagcctccctagctgcctccggttctaggcaggcggcgcacggtctgagtgagcctgtcactgtcagaagatttcgcgcgtaggtttgctgtgtcagactacgcttcgtaccgagacttttttgcgtccgtttcttgggattggtattgtgctgtagtactggttggtggttatgtattggtcggtcccaccactagtatttgggagtatttgtgtcttgattgcacaagatggttgtgtcttgatgatacaagatggttgcgtattggtcccaccactagtagcgagggtggcagtgatgaaaacagaaagaagtactagcacggaattccacggcgttgctgtcagtggaccgatacttgtccagcgtgtgattggtagcagcaggaggaggaagggaatttgtacaaggcacgtgccaagccgagcaactggaagagtgcaacttctacagtgtgttttcagcacggaacatgtacacactcctacttgaatactactactagtggtagcagtagtgttaggtaagatcttaaattgacta

SEQ ID NO: 6473 - DNA, 964 bp, Zea Mays
aaaaaacaaacaacaacgacaccaatatataatctcagacctatcaatcgctctcaggaaccgaaccaagaacaggccgtcctgaagatcagccctagttgtcagcatgaaaccaaggaagaaggaaaggacgctggtgcgagagaagctccaaatttttattctcttgaaagctacagagaagacacaggcacaaaggaaagcctcaagcgaaacatccctttccctattgaatggagacaaaacgccaagattgaaaagaaacggaacggctcagcgctggtagtccgtttcctctacatgcatccttatatggatggaataaatattgcatttaagaagcgtatggaaggtttctcctttttctgcatttatttatattttcctctacgcatttctagtggtttggcttgtggaggagaagaaaaaaaaaagcaaggggatgggaaatgcagcgaccagacatcatgtaaaaggtccccggagcaccaagacgaggtgcactcgagttcgagtggggcaatggggattgcagttgtggccatctctgtccctctccgcccccctgcaatcatcctagattccactgtcttggccccgagggctgaggcccttgaccttggttgctttgccctcactcctatctgaattgctttctgggctgtggttgggactcgcaaggaatgcactcatctagcgccatctgcttgatctttgagggatgtgaaatgatggggtttcttggtggagcggcggtggtggtggtgcccatctcattcccactaaccagtaactgcagccacagggaccaactggggcaaggagccaatctgaacataaattatttcgttgagaccgagaaccaagggttggcaagactgtcttttcttattggacttgtaaaaacttattttttccatgttcctggtcaagtgccaaaacatgtttattctcaaagaaatat

SEQ ID NO: 6474 - DNA, 1461 bp, Zea Mays
ctgagccccatttacctgaaacgccactgccctgctcactactcacctgtcctataaaactctcgttccttgcagcgtcacatgccgactttgtcactccattcacgagccaaagctagctagctcctctcggtgcacgatcgagttacgagtacgagcacacgtcgccttccctaccgttgccaacaagcaacagagccaagaaatcagtcgcgctagagcgagcaaggacgatgctgggatgcttctcgcggctgcggcggccgacgacagcggcgccggagcccatgccggcggcgtccgacgacgcgtccacgtcgacggcctcggcggcgggctccacctcgccgtgctcgtggtcgtcctcggcgcgctgcaaggacgacgaggaccacggcggcggcgcggtgggcaaggacccgtcggcgctgtccgagcccgggctgtcctcggccatcgcgtcgcgccggttcttcctctcgtccccgggccgctccaactccatcgtcgactcgtcggcgcacggcggcggcggcggcgccgccgccgcccccgccctggacgtgggcgtgggcgcggccggggtggcggtgcccacgtactcgccggacccgcacgccgacttcctccggtccatggaggagatggccgcggcgctgcggctggacgcgcggcgccgcggcgacagggcgcgcctccacgagctgctgctctgctacctcgcgctcaacgacaggcgcgcgcacaagtacgtcgtcagcgccttcaccgacctcctcctccgcctcaccgccgccgccgcagccgccaacctcagcgacgacgaccggcacgagtaaccgccttttttttcacggtcatggccgtgcgtacggacagaatttcgggtacggcggaggctcaaaaatcctcgacagcatgagcgagcgttccaagatcacccagagctgtacatactgcctccagctccagatcgagctccgtagctagaaatctgttcgtgtgcgcagcattttggttcccttttacctctagctctgggtgtgttcagttgtgtgagtgtgactgtgtgagcagtgagcgtgctggcgaagatatgatatggtatggccagcctctaaaaacaaagcggcatttgcatcgcgctcgcttggtttgctttgtgattgcctgtttgcctttgcctttttggggggtcatctcttgctcttttactgttcgtctctttagctttctgctctctttgggggtacctacacgaagcctaaatacgctttgctgttcggcgccatagttgagcttgagctactagtagtgatccaaagtggccagagcgaggcactgtatcccgtcgttctaaaatctccaagcgccctggccaaattatgggttcgtgcttgctaacccataaacgaggtctcctcgagacgagcgacaggcaacaataataaacgagatgcc

SEQ ID NO: 6475 - DNA, 1216 bp, Zea Mays
gagctccccgcacgccgcatataatcgcaacgatccaatccacactcaccatcaagtctcaagaggcagctaaaccaaccagcggtgatctgtagtagcaacttggttcttggtaggtgagatcagatagtgatacagcaggtagctcgagcgagaatgagccaggagcagccgaggaggccgtccggccatgaggagacgagcggcggcggagagcagggcgccgtccgctacggcgacgtgttcccggcggtgagcgggggcctcgcggagaagcccgtggcgccgcaggacgcggccacgatgcagtcggcggagaacctggtgttcggccagacgctcaagggcggcccggcggcggccatgcagtccgcggccaccgccaacgagcgcatgggcgccgtcgggcacgaccaggccacggacgccaccgccgtgcagggcgtcaccgtctccgagacccgcgtcccgggcggcggccgcatcgtcaccgagttcgtcgccgggcaggctgtcggccagtacctcgcgcgggacgacgacgatggcgccgccgccacggctggcggcggcatcgccggccccggcgccggagcgggaggcggcgcctctgctggcgtggcgggcaaggatatcacgaaggtgaccatcggcgaggcgctcgaggcgacggcgctcgcggcgggtgacgcgcctgtggagcgcagcgacgcggccgccatccaggcggcggaggcgcgcgccacggggctggacgcgaacgtgcccggcggcctggccgcgcaggcgcagtcggccgcggcggccaactcgtgggcgtggggagacgaggacaaggccacgctcggcgacgtcctggcgaacgcgacggcgaggttggtggcggacaagccggtggagagcgccgatgcgttgggggtggctggcgcggagaaccgcaacaggaacgacgggacggcgaggcccggaggcgtggcggcgtccatggctgcggccgcacggctcaaccgtaacgaggcggtctgggagtgaagcagctgcctggagaggagacacgtagcctgcgaagtaccgtcgtgtcaatgtgacggctcagaacgtgtcagtgtgtgtaactcgacatcaggcgatcgagctgtgtaaatatgtagtgttgtaccttcgtgcaatataataaagtaagatacgcgcgcgtcaaaagcgtgaccggtgtaag

SEQ ID NO: 6476 - DNA, 1256 bp, Zea Mays
ctccacgtctctcgcctctgcacacatgacatatgtccctcctcgagctccccgcacgccgcatataatcgcaacgatccaatccacactcaccatcaagtctcaagaggcagctaaaccaaccagcggtgatctgtagtagcaacttggttcttggtaggtgagatcagatagtgatacagcaggtagctcgagcgagaatgagccaggagcagccgaggaggccgtccggccatgaggagacgagcggcggcggagagcagggcgccgtccgctacggcgacgtgttcccggcggtgagcgggggcctcgcggagaagcccgtggcgccgcaggacgcggccacgatgcagtcggcggagaacctggtgttcggccagacgctcaagggcggcccggcggcggccatgcagtccgcggccaccgccaacgagcgcatgggcgccgtcgggcacgaccaggccacggacgccaccgccgtgcagggcgtcaccgtctccgagacccgcgtcccgggcggcggccgcatcgtcaccgagttcgtcgccgggcaggctgtcggccagtacctcgcgcgggacgacgacgatggcgccgccgccacggctggcggcggcatcgccggccccggcgccggagcgggaggcggcgcctctgctggcgtggcgggcaaggatatcacgaaggtgaccatcggcgaggcgctcgaggcgacggcgctcgcggcgggtgacgcgcctgtggagcgcagcgacgcggccgccatccaggcggcggaggcgcgcgccacggggctggacgcgaacgtgcccggcggcctggccgcgcaggcgcagtcggccgcggcggccaactcgtgggcgtggggagacgaggacaaggccacgctcggcgacgtcctggcgaacgcgacggcgaggttggtggcggacaagccggtggagagcgccgatgcgttgggggtggctggcgcggagaaccgcaacaggaacgacgggacggcgaggcccggaggcgtggcggcgtccatggctgcggccgcacggctcaaccgtaacgaggcggtctgggagtgaagcagctgcctggagaggagacaccctgcgaagtaccgtcgtgtcaatgtgacggctcagaacgtgtcagtgtgtgtaactcgacatcaggcgatcgagctgtgtaaatatgtagtgttgtaccttcgtgcaatataataaagtaagatacgcgcgcgtcaaaagcgtgaccggtgtaag

SEQ ID NO: 6477 - DNA, 2209 bp, Zea Mays
tctgaattctgaaaccgttggaggcagccccatgtttcccttgccgtcagtcccgctcccttatcttgatgatgagagaccgccggagcccacggacggcgtggccgtgatccggccgtgccgtgccgtgcgcgccagccactaggaacaaacagcacacaggccgcacataggcacccccaccggccaccggcacaggagaagacacgcacacacaaacctctccggtcggtctggccctcttcttcctatctgtccccgtctccatctccatcctttctttttttccgatgactactcctcttcactctcctcagtcctgagcttatcttccttccccacacgtcaagaaccttgtgacacctctcagcgcctttagcgagttagcctccctcttgcgcgcgccgcagtggcacaccataataaataaatccccaccctctcccggctctttcagtcttcacctagcaacaacctgtccaagaaccagcagccaaaggacaagacaagagacacaacgaaaggaaaggaaccaagagaaagatcgagaagagaggagccttcgcttttggacttgcaccgtcgtgatctgtcccgcgaccacatgaggatccacccagcatcccccaccgccggcggcaagaaggacctccggcgcctgccgcacgtgtacagcaaggtgctggagctgccgctcccggcggacaccgacgtccaggtgttcgaaggcccagacgccttccacttcgtcgcggcgccggccgccggtgcgcgtgccgccgccaccgtgcgggtgcgcaccgtcaggatccaccccggggtcaccaaggtcgtggtgcaggccggagccgccgaacgggccgctgacgacgacgccgccagcgacagcatggagctcgacaggtggcggtcccggctgcccgagccgacctgtccggccatggcggtggccgggtacgtcgacggccagctcgtcgtcacggtgcccaagggccccggtgccgaggaaggcgccgacgcagggcaaggcgaggttacctggaggtgcggcggcggaggcaagatcactggaagactcgtggttgtacagtaggagcgtctaatctatgtactactactccatagtaatgtcttgccatctttctttctttttttggtaaattaagatgggctagctgttcatcatgttgccttccccttccctgcttcgcatcagagacagtcagacaggcgatgtttcatgagctatgttctcttcctcctgcttctcttctcaagcatgtgagaaccagctactgtggattacctttggttgccctaaaatcagatgtaaatttctagataaacaaactgtgcggtgtttgtgtgcccactcgacgcaacttggatttttatcatggcggataagatttggtggagcatgatctgtagaccagatctggtgaccggttactgttactgtttctgaacatcaggtgcaaagtggaccacttggttggtgctgcatgtcacatggattcatcaaatctctccatttttttcatggcccacagtttgcagcctagtgtctgttagtcctgcataagataagatagccgttttggttggtacaaggcaatataaatcgaaaaaatatcaatggttttataatgtatatttatgtagggctacacaaccagaggtactgcagcttgatgaaccatgttctgatgttctagagaagtataccttttttcaatctttctgtgttgcaactcttctagcaacagttcctttgtatactccatccgttccaaattaaaatccgtttacctttgtagtagattcatacaatagttaatgtatgtgttctacatttcttatgtaactagatgaactgaagtcattgatcacccctgatattctacatgtcccagtcaatacagttgccagctgctttcacccgaaattaaacatgtaaataaagttatcatgagtcaattagtcaacaataccagaaaagattggatgaatagaaactcttgcacaagggtcccacaaaaataaaaccatctgctaccattctccttggaaacagcttaacatgatacacaaacataataaggttttaaacatgattccacccgaaataggaaataaatgacaaaactaccagaactactttgataaagtggagcatcaaaatatgaatttgatatttccaaagttg

SEQ ID NO: 6478 - DNA, 3681 bp, Zea Mays
atctactcccaccttttttttcctagctacacatatgctctaatctttagagttggctatctctagcagtcttcttatgccactccttatcttacttttattttaaattttactctataaatattatctatttttttggatcagttattcgaattcgtagagacaaaacacttctaaggtaggtaagggttaaagccaaaacagactcaggaggccgtggagatagcctattgtctgccgaatcttctttctgtcttcatggcagtgccggacatagttgcagttggaacttctacggaggaacacacacagtgccggtgcgaatcaatggtggtttcatgacctcttgattcgcttcgtctacctccgtgccccggtgtagtagcctcgtcggatccttcgccaggtcttcctcgggccctgcgccggcgaggagcgcctactaggattcaagatgggggttcaccgtaggaattattcagatgatgaattttcagttgctggcgagaggccagaagtagaattcatggacttccagaacgacgacacctttcaggattattcatgtgaagatacccctgtgcttgtctcagctcctttccctttcgaggatggaaaaccaaaatctgcacttgtcggagaaacatcagctgataccatacagattgagaatacctctcctgaatctgtaaatctgtggagtgtaagaattttctcttcgaacccagaagacagctatgttctatcaatgatgagaccaccgtcagatgatgctaatgaggaggaaaagcatgcttttcttgctttgacgtccgtggaagaccgtacacttctgcctggacaaacccttacagtttggctgtcttgtacgccaaaagatattggcctgcatacatcaatcgtgcatgttgatatcggtgatgagaagattgagcgtgtggcttttcttttggcagatgacaatgtctcccaggccttattttctgataagccttattccaggagacgtgaccaagttaagaaatttgggccttctccaactgtgccaggtcgtcgtccaactaagcagcacgttcaaggattcaaacataggcttcctcagtatgcaatacctgcgcacatccgtgagctcattgaaagtaaacagaaacctgatgtcttatatgatgagttgagcatggtaaactatgcagaatatttcagcactcttctagtcatggaagagctcaatttggaggaggagatgagaacatatgacatggagggtgtcttaatgagaaggaggggtatgcattttttgtctcttgaggtccctggtttggcagaaaaaaggccatcactagtccaaggagacttcgtagttgctagatatgctgggaatcatgctcaggcttaccaaggtttcattcacagggttgaagctgatgagatatttttacaatttgaccatcagtttcacatgaatcatcatgatagaaaccggtaccatgttagcttcacatataacagagtgaacatgagaaggctttacaagtcaattgacgatgcaaaatatttgggacctggcattttgtttcctcgccaatcaccttgtagagttttgaaaaggtggccgtttaatcctctgaatccacatataaatactgagcaagctgatgctgttgcaatggtacttgcctgcagaggaggttcaccatatgtgatatatggacctccaggaactggcaagaccatgaccattgtagaagccgttttgcagctttacacgggaaagaagagggcaaatattctcatttgtgctgcttccaatactgcagctgatcatgtactggaaaagctccttcaagctagctatctgatccggccaagtgatatctttaggctaaatgctcagagtcgccaatacgaggatgtcagtactgattttatcaagttttgcttctttcaagatcgggtgttcatgtgccctcccttacaagcattggtgcggtacaggatagtcatatcgacctattcgagttcctatcagctgcaggctgagggcattcgccaagggcatttcacacacattttcctggatgaggctggccaagcctctgaaccagaggcgatggttcctttgtcggggctgtgtggaagagacactgtggttgtgttagcaggagatccaaagcaattaggtccggtggtttactgtaagcaagcagagaaggatggtctggggacatcatatctggaaaggctgctgactgacttcgagccgtacggaacaaggaatcctaactacgtgacaaaactggtgaggaattaccgctgccatcctgcaatcctggagctaccatcagagcttttctatgagggtgaactgattccctgtaaagaaggagagtcatctgcttatgattgcataggccttcctgacaagtccttccctgttcttttcatcggaattcaaggatgcgatgagagggaaggcgccaacccatcatggttcaacaggatcgaggttagcaaagtggtctctatcatcaggaacctgacaaggggcggggacgttgatgcatctgatataggagtaatcactccgtaccgccagcaagtcgccaagataaagaaagccctagaggcattcgaaatgcccggcctgaaggtcgggagcgtcgaacagttccagggccaagagagggaggtgataatcatctccacagtccggtcgaccgtaaagcacaacgagttcgacaggtttttcaacctggggttcttgagcaaccataaaaggttcaacgtttctatcacccgcgcgaaatcgttgctcgtcatcgtcggaaacccttacattatcaccaaggaccgtcactgggataggctcctgcgatactgcgctgacaatggctcttatcaaggatgcccccttccaccaccggaatctcatgcttattcagacggtaccagattcttctccgagcatgacgacgggcatcaagctggaccttctgggcaggacgactactacaaccaagaagccacctactgcagctacaacaaccaagagccttctgacttcggtttcaggcttggcagtggtgctgaacctgcttcggagaaccaagagttaccgtccgaggagctgcctgaggacgagaagcagccattattcagcaacccccaagcggatctcgaggagacgccgaagcaggacgtcgtcgaggaaggggctgcacagggaggcgtgctggccgacccgacatcgtcgacaaccgccgacgatcagctccagggtgcatatgcggagaagtacagcttccctcctggctggtgcgacgtttcgagcatcccggcgcaaggctggggcgactgatcgtcagacctgcgatcgccattggtagggggggtcattggcagaataattgaggccgatgaccttgtgaacccagcaccctcatcggtgtgtccctttcgttccgtcaagccttcgttcatttctcactgctggacagtttgttgcagcgagtgaactgtggcgtccatgtgtttaggacaggccatcgtgtgtgactgatgctggcaacacgaaacgtacgtgcaatgtggcgtggttattttgcgggtgccatatattgagcgtgtgctcatggtttaaaaagatatactccctccgttacgtttttagttcaaaaatac

SEQ ID NO: 6479 - DNA, 3394 bp, Zea Mays
caagcatcgctagtgatccatgcagtgctggaaccaaagctcatttctacaaagtgtcatctatcttctgtgaccgattcaagatgggggttcaccgtaggaattattcagatgatgaattttcagttgctggcgagaggccagaagtagaattcatggacttccagaacgacgacacctttcaggattattcatgtgaagatacccctgtgcttgtctcagctcctttccctttcgaggatggaaaaccaaaatctgcacttgtcggagaaacatcagctgataccatacagattgagaatacctctcctgaatctgtaaatctgtggagtgtaagaattttctcttcgaacccagaagacagctatgttctatcaatgatgagaccaccgtcagatgatgctaatgaggaggaaaagcatgcttttcttgctttgacgtccgtggaagaccgtacacttctgcctggacaaacccttacagtttggctgtcttgtacgccaaaagatattggcctgcatacatcaatcgtgcatgttgatatcggtgatgagaagattgagcgtgtggcttttcttttggcagatgacaatgtctcccaggccttattttctgataagccttattccaggagacgtgaccaagttaagaaatttgggccttctccaactgtgccaggtcgtcgtccaactaagcagcacgttcaaggattcaaacataggcttcctcagtatgcaatacctgcgcacatccgtgagctcattgaaagtaaacagaaacctgatgtcttatatgatgagttgagcatggtaaactatgcagaatatttcagcactcttctagtcatggaagagctcaatttggaggaggagatgagaacatatgacatggagggtgtcttaatgagaaggaggggtatgcattttttgtctcttgaggtccctggtttggcagaaaaaaggccatcactagtccaaggagacttcgtagttgctagatatgctgggaatcatgctcaggcttaccaaggtttcattcacagggttgaagctgatgagatatttttacaatttgaccatcagtttcacatgaatcatcatgatagaaaccggtaccatgttagcttcacatataacagagtgaacatgagaaggctttacaagtcaattgacgatgcaaaatatttgggacctggcattttgtttcctcgccaatcaccttgtagagttttgaaaaggtggccgtttaatcctctgaatccacatataaatactgagcaagctgatgctgttgcaatggtacttgcctgcagaggaggttcaccatatgtgatatatggacctccaggaactggcaagaccatgaccattgtagaagccgttttgcagctttacacgggaaagaagagggcaaatattctcatttgtgctgcttccaatactgcagctgatcatgtactggaaaagctccttcaagctagctatctgatccggccaagtgatatctttaggctaaatgctcagagtcgccaatacgaggatgtcagtactgattttatcaagttttgcttctttcaagatcgggtgttcatgtgccctcccttacaagcattggtgcggtacaggatagtcatatcgacctattcgagttcctatcagctgcaggctgagggcattcgccaagggcatttcacacacattttcctggatgaggctggccaagcctctgaaccagaggcgatggttcctttgtcggggctgtgtggaagagacactgtggttgtgttagcaggagatccaaagcaattaggtccggtggtttactgtaagcaagcagagaaggatggtctggggacatcatatctggaaaggctgctgactgacttcgagccgtacggaacaaggaatcctaactacgtgacaaaactggtgaggaattaccgctgccatcctgcaatcctggagctaccatcagagcttttctatgagggtgaactgattccctgtaaagaaggagagtcatctgcttatgattgcataggccttcctgacaagtccttccctgttcttttcatcggaattcaaggatgcgatgagagggaaggcgccaacccatcatggttcaacaggatcgaggttagcaaagtggtctctatcatcaggaacctgacaaggggcggggacgttgatgcatctgatataggagtaatcactccgtaccgccagcaagtcgccaagataaagaaagccctagaggcattcgaaatgcccggcctgaaggtcgggagcgtcgaacagttccagggccaagagagggaggtgataatcatctccacagtccggtcgaccgtaaagcacaacgagttcgacaggtttttcaacctggggttcttgagcaaccataaaaggttcaacgtttctatcacccgcgcgaaatcgttgctcgtcatcgtcggaaacccttacattatcaccaaggtagtctctctgtcactcactcattagttcattatagcatgcactgttatgtattcatcatcaaactaactgctgtaacttcaggaccgtcactgggataggctcctgcgatactgcgctgacaatggctcttatcaaggatgcccccttccaccaccggaatctcatgcttattcagacggtaccagattcttctccgagcatgacgacgggcatcaagctggaccttctgggcaggacgactactacaaccaagaagccacctactgcagctacaacaaccaagagccttctgacttcggtttcaggcttggcagtggtgctgaacctgcttcggagaaccaagagttaccgtccgaggagctgcctgaggacgagaagcagccattattcagcaacccccaagcggatctcgaggagacgccgaagcaggacgtcgtcgaggaaggggctgcacagggaggcgtgctggccgacccgacatcgtcgacaaccgccgacgatcagctccagggtgcatatgcggagaagtacagcttccctcctggctggtgcgacgtttcgagcatcccggcgcaaggctggggcgactgatcgtcagacctgcgatcgccattggtagggggggtcattggcagaataattgaggccgatgaccttgtgaacccagcaccctcatcggtgtgtccctttcgttccgtcaagccttcgttcatttctcactgctggacagtttgttgcagcgagtgaactgtggcgtccatgtgtttaggacaggccatcgtgtgtgactgatgctggcaacacgaaacgtacgtgcaatgtggcgtggttattttgcgggtgccatatattgagcgtgtgctcatggtttaaaaagatatactccctccgttacgtttttagttcaaaaatac

SEQ ID NO: 6480 - DNA, 1697 bp, Zea Mays
ccaagatccaccaaccaaacttccttggctcgtagcaagcaagaggcgtcccaagctgttctggatctccgcggcggcgccgttgacgtccgtcgtgctcgggagcgttctggtgtacctcacgcacgctgaaaaccacggcatcgaagtgatcggttacctgaagaaaggcctgaatccaccgtcggtgacaagcctgcaattctcaccgccctacatgatgctcgcgctcaagactgggatcatcaccggcgtcattgccctcgccgaaggcatcgccgtggggaggagcttcgccatgttcaagaactaccacatcgacggcaacaaggagatgatcgcgatcgggacgatgaacgtcctgggctcgctcacgtcgtgctacctgaccacggggcccttctcgcgctccgccgtgaactacaacgccgggtgcaggacggccatgtcgaacgtggtcatgtcgctggcggtgatggtcacgctgctgttcctgacgccgctgttccactacacgccgctggtggtgctgtcggcgatcatcgtctccgcgatgctgggcctggtcgacttcggggccgcgctgcacctgtggcgcgtcgacaaggtcgacttctgcgtctgcgccggcgcgtacctgggcgtcgtcttcggcagcgtcgaggtcggcctggtcgtcgccgtcgccgtctccctgctccgcgtcctgctgttcgtcgcccggcccaggaccacggtgctcggcaacatccccggcaccatggtgtaccggaggatggaccagtacgccgccgcgcagacggtgcccggcgtgctcgtgctgcgcgtcgacgcgcccgtctacttcgccaacgccagctacctgcgagagaggatctcgcggtggatcgacgacgaggaggagcgcaccaagagccagggcgagatgggcgtgcggtacgttgtcctcgacatgggtgccatcggtagcatcgacacgagcgggacgagcatgctggacgagctcaacaagtccttggacaggaggggaatgcagatcgtgctggcgaacccgggcagcgagatcatgaagaagctggacagctccaaggtgctggagcagatcggccacgagtgggtgttcccgacggtgggcgaggcggtggcgtcgtgcgactacgtgctgcactcgcacaagccgggaatggccaaggacagcgccgccgcccacgagagcatggtgtgacgagcaccgccacgccaaccgtatgtgtagtgtgctccggttccggtctgacgtaaccagtcgtcacgcggaccgagatgaattatgtatacacgtgtctcgagtattgtacacctgcaccgtcgcgggaaaaacgaattcagagaagaaaggatcccacccggttttttttggtgaagaaaaaccccatctcgacatggtctcttgaacgcgcgcagacatgcggtgcgctcgcaacttcgttaaggccagatgtgagagggacagagggttccatgggagatgagagttttatagggattaaattctatatatattgttttctagataaatattggcatgataaaatcctctatccagaatcgcctaacctgaacactgatggcctgtatgaaaacactgaactatgctgtgttttctttttttttctccctaaaacgcatgaaagttaatttttcctcttttgtgtgta

SEQ ID NO: 6481 - DNA, 1750 bp, Zea Mays
catcgatctgcctgcccacagctttggcttttctctatgcacgtcgatcggactcacacatctccctaacatatattcgcgtcggatatgagcaagaggcgtcccaagctgttctggatctccgcggcggcgccgttgacgtccgtcgtgctcgggagcgttctggtgtacctcacgcacgctgaaaaccacggcatcgaagtgatcggttacctgaagaaaggcctgaatccaccgtcggtgacaagcctgcaattctcaccgccctacatgatgctcgcgctcaagactgggatcatcaccggcgtcattgccctcgccgaaggcatcgccgtggggaggagcttcgccatgttcaagaactaccacatcgacggcaacaaggagatgatcgcgatcgggacgatgaacgtcctgggctcgctcacgtcgtgctacctgaccacggggcccttctcgcgctccgccgtgaactacaacgccgggtgcaggacggccatgtcgaacgtggtcatgtcgctggcggtgatggtcacgctgctgttcctgacgccgctgttccactacacgccgctggtggtgctgtcggcgatcatcgtctccgcgatgctgggcctggtcgacttcggggccgcgctgcacctgtggcgcgtcgacaaggtcgacttctgcgtctgcgccggcgcgtacctgggcgtcgtcttcggcagcgtcgaggtcggcctggtcgtcgccgtcgccgtctccctgctccgcgtcctgctgttcgtcgcccggcccaggaccacggtgctcggcaacatccccggcaccatggtgtaccggaggatggaccagtacgccgccgcgcagacggtgcccggcgtgctcgtgctgcgcgtcgacgcgcccgtctacttcgccaacgccagctacctgcgagagaggatctcgcggtggatcgacgacgaggaggagcgcaccaagagccagggcgagatgggcgtgcggtacgttgtcctcgacatgggtgccatcggtagcatcgacacgagcgggacgagcatgctggacgagctcaacaagtccttggacaggaggggaatgcagatcgtgctggcgaacccgggcagcgagatcatgaagaagctggacagctccaaggtgctggagcagatcggccacgagtgggtgttcccgacggtgggcgaggcggtggcgtcgtgcgactacgtgctgcactcgcacaagccgggaatggccaaggacagcgccgccgcccacgagagcatggtgtgacgagcaccgccacgccaaccgtatgtgtagtgtgctccggttccggtctgacgtaaccagtcgtcacgcggaccgagatgaattatgtatacacgtgtctcgagtattgtacacctgcaccgtcgcgggaaaaacgaattcagagaagaaaggatcccacccggttttttttggtgaagaaaaaccccatctcgacatggtctcttgaacgcgcgcagacatgcggtgcgctcgcaacttcgttaaggccagatgtgagagggacagagggttccatgggagatgagagttttatagggattaaattctatatatattgttttctagataaatattggcatgataaaatcctctatccagaatcgcctaacctgaacactgatggcctgtatgaaaacactgaactatgctgtgttttctttttttttctccctaaaacgcatgaaagttaatttttcctcttttgtgtgta

SEQ ID NO: 6482 - DNA, 2476 bp, Zea Mays
agacaccaccaccaccggtcaccgaaacgcagcaactgacaggcacctgacggagagctagtcgctctgcagccgagtcgagtcgaactagcgcgcgagcgagcgaggaagaagaagagctagctatactgctgcttcctcgcgcgcagcagcagcagcaaacgaagaaaccagccccatgggcggcagcgcggatgcgaacggcgcggggtcggtgcgggtgccggtgccgccggcgcggccgttcctggacacgttccgcgggaacctcaaggagaccttcttcccggacgacccgttccgcggggtggtgcgggagcgcggggccgggcggcggaccgtggccgcgctgcgctacttcttcccgttcctcgagtgggcgccggcctacgcgctgtccaccttcaagtccgacctgatcgccggcatcaccatcgccagcctcgccatcccgcagggcatcagctacgccaagctcgccaacctgccgcccgtgctcggactctactcgagcttcgtgccgccgctggtgtacgcgctgatggggagctccaaggacctggcggtggggacggtggcggtggcgtcgctgctcatcagctccatgctcggcagcgaggtgtcgccgacggagaaccccgtgctctacctgcacctcgccttcaccgccaccttcttcgccggcgtcttccaggcctcgctcggcctcctcaggttgggcttcatcgtggacctgctgtcgcacgcgacgatcgtggggttcatggccggcgcggcgacggtggtgtgcctgcagcagctgaagggcatgctgggcctcgtccacttcaccacctccaccgacgtcgtctccgtcatggaatccgtcttcagccagacacaccagtggcggtgggagagcgtcctgctcggctgcggcttcctcttcttcctcctcgtcacccgcttcatcagcaagaggcgtcccaagctgttctggatctccgcggcggcgccgttgacgtccgtcgtgctcgggagcgttctggtgtacctcacgcacgctgaaaaccacggcatcgaagtgatcggttacctgaagaaaggcctgaatccaccgtcggtgacaagcctgcaattctcaccgccctacatgatgctcgcgctcaagactgggatcatcaccggcgtcattgccctcgccgaaggcatcgccgtggggaggagcttcgccatgttcaagaactaccacatcgacggcaacaaggagatgatcgcgatcgggacgatgaacgtcctgggctcgctcacgtcgtgctacctgaccacggggcccttctcgcgctccgccgtgaactacaacgccgggtgcaggacggccatgtcgaacgtggtcatgtcgctggcggtgatggtcacgctgctgttcctgacgccgctgttccactacacgccgctggtggtgctgtcggcgatcatcgtctccgcgatgctgggcctggtcgacttcggggccgcgctgcacctgtggcgcgtcgacaaggtcgacttctgcgtctgcgccggcgcgtacctgggcgtcgtcttcggcagcgtcgaggtcggcctggtcgtcgccgtcgccgtctccctgctccgcgtcctgctgttcgtcgcccggcccaggaccacggtgctcggcaacatccccggcaccatggtgtaccggaggatggaccagtacgccgccgcgcagacggtgcccggcgtgctcgtgctgcgcgtcgacgcgcccgtctacttcgccaacgccagctacctgcgagagaggatctcgcggtggatcgacgacgaggaggagcgcaccaagagccagggcgagatgggcgtgcggtacgttgtcctcgacatgggtgccatcggtagcatcgacacgagcgggacgagcatgctggacgagctcaacaagtccttggacaggaggggaatgcagatcgtgctggcgaacccgggcagcgagatcatgaagaagctggacagctccaaggtgctggagcaggccaaccgtatgtgtagtgtgctccggttccggtctgacgtaaccagtcgtcacgcggaccgagatgaattatgtatacacgtgtctcgagtattgtacacctgcaccgtcgcgggaaaaacgaattcagagaagaaaggatcccacccggttttttttggtgaagaaaaaccccatctcgacatggtctcttgaacgcgcgcagacatgcggtgcgctcgcaacttcgttaaggccagatgtgagagggacagagggttccatgggagatgagagttttatagggattaaattctatatatattgttttctagataaatattggcatgataaaatcctctatccagaatcgcctaacctgaacactgatggcctgtatgaaaacactgaactatgctgtgttttctttttttttctccctaaaacgcatgaaagttaatttttcctcttttgtgtgta

SEQ ID NO: 6483 - DNA, 3645 bp, Zea Mays
ggggctcgggcgttcggcatccctccccgtcgtaactcagcagcgccgccgtcgccgtgcacgcaccagcgccacgactcggcgcttacccatcaaacattcaaaccccacgacgccgccggccacggccaccgctagggttttagcctcctccgatgccgccgcctcgccgcgcgcttgtcacatccctcctccgcctccgctccttctcctccattgcctatcctcatccctacccacccgcgcccctgcgacgccaccagttcgtcgccgaccccaccacctccacaaaccgtggtgtcgtcgggggcatcggcggcgtcggttccgggaacgggaacatcttggacccgacgcagctcctccgcgacgacccggtggcaatcaccgcttccctttgggtatcctccttccgcgccgccgcctccacctccggctcttgtacccccgcaccgccgcagccactcacccccttcctctcgcgcctggagctgtgggtgctcgcctaccagaaggcgtacgctgacgagaccggttcctatctgccgcgctcctccatcccggcctccacgctcgcctccctcctcacgctccgcaacgccgtactcgacggccgcttccgcttcggcaaccgcctcacccccatcctccagtccccgcgcgccgccaacgcgccggaccctgccaccctctccaagcgcaagctccgcgccctccttacaacccccggcccatcgcccttccaggaccgcgtcgtgcaggagctgctcctactcctgctcgagcccgtctacgaagccaggttctcgccaaagtccttcgccttccgcccaggtcgatccccgcatgccgcgattcgcaccatccgccgcagctttgctccgtacctctggtatatcaagggcgacctctccccactcctgcactcgcctgatcatgctctcgtggtcggtgcgcttatccgtgatgtgcgtgataaaaaagtggttgatttgatccgttcggccctgctcaccccggtggtgaccgcaagcgatgatgctgcagtgaagaagaagaagaccaagaggaaataccagaagaagaaggtgctgccagagggggagccgaagcctgatccttactggttgcagacgttttttgggtttgcaccagaggaagcacagacacagcctgattggggccattgtggggtgctgagcccgttgcttgccaatgtgtgcctggatgagtttgataagtggatggaagagaggattaaggagttttacaagccatccaagtccgatgttgtgggaggggatgatggtattgagcagggcaatacatcatggccagagtttgtccccacgactggccctgacaagacaaggaaggtggactacattcgatacggcgggcatttcttgattggtgtgagggggccaagagcggatgcggcggtgctccggaagcagctagttgagttttgtgatcagcgattcaggatcaaacttgataacgagagcctccctattgagcacatcacaaaaggagtcatgttccttgaccatgtgctgtgccgtcgagttgtgtacccaacactgcgttacactgctacaggaggcaagatcattagtgagaagggagttggtacactgctctcagtgacagctagtctgaagcagtgcatcaaacaattccggaagcttgagtttttgaaaggagaccgcgaacccgatccacaaccatgcttccgtatgttccacgccacacaatctcacacaaattcgcagatgaataagcttttactgacgatggcagagtggtatcgctacgctgataaccgcaagaaggttgtcaacttctgctcttacattataagggggtcactggcaaagttatatgctgccaagtacaagttgcggtcaagggcaaaggtctataagatcgcgtcaagaaatcttagtcggccattgaaggataagaaaggccagtcgccagagtatcacaatttgctgagaatgggcctagttgattcaattgatggtcttcagtatacaaggatgtcgatggttcctgatcctgattacacgccgttaccatttggatggcggccagatcatgagaagattttgctggagtacataaagctcacagatcaacagacattggaagagcagagaaactgcatcagggaggacgggcttataacaccacaggacaatatttcgatgcttgtatggggctacaagaaaaatgctgttttacttccttcaaaagtgagtgatgcccaaggatccacagaggaccttggttcagataccgatgaattggatgaaaaagagctaggaaatgagggtaaccaaagtttccaaaagcttgctgaaatgtcatgagttttggcaaactctgtagtgttcccaaggggtatttgactcgttgactggatggttggtttgtgactttgaaaacacaaaaccatctgctagttctttgctgactgctttgtgctggaacagtagttgcaaaatcaagggatgattctgagcctcctttgcttattacttgcgaaggacttgaatatgcagctataagcaggcctctaccaattatacgtgggcgagcactatttaaactgaagatatctcagttaccacgatcgtcctcctcgtcaccatcgcccctgccatccacgtcggcgccgccggaccagatgtcctcctcgtcgctaccccagccgtctgcctcgtcgtcgccgccccagccatctgcctcggctccactgcaatagccatatgccttggcgccactgccccagccgtcttcctcggcggcctgctcctcactgccttgtcgtgatcaagatgccccctagaaggatggttgggccgaggacgctcacggatcttggtggggccatgcagggtgtacctttcaactgtcaaagaatgaacacccacatgtgtactggttctggaggaacaaaaggatccaagaaagtgctagcacctaatgcagaagaccaagttggtagaataactaggtagaagacaaaggaactatccttagctgagaaagatctacatggttcaactacaaatacagaagagcacacattgatttttgccaattgtcctgcacaacatgatgacgagattcaaatctgtgatgaaggccaaacagatgccatgacagataaatggataaggggaaaaagtatgggcatgcaattggaacggataagccgaggcttaaacacagattccactggtcatcactgaaggcaagagacgtccagagttagaaaagatcaatgatctgcaaaaaggaatagatgatactaatgctctccttctctttagcctcaataagaagttggtcgattcattttagtgtggtccttgtatctcatattgctgttgtatggccctgattttgctgtccttttggtactgtccttagcactctacttgatgcttgtttgatgaaacatgatgctagttttgaaaattttgaagggcttggttcttgataaatgatatctatgatatatgttgctaagtacactgtgaaacaaattggttgggttctactgcaacctaacgctggttccagcagtagggcttcagtcaactgtttatgcgttgttggctacaaattcag

SEQ ID NO: 6484 - DNA, 1920 bp, Zea Mays
cgctacattctcacaaatggctgcgggtcgcacccggcgctcggcatccctccccgccgcaaagtcgcgccgccgtcgcctcgcacgcacgaacgccatcacttcgtcgcttacccatcagacagacaaacaaggccgaaactccacgacgtcccccgctcggcagcagcaacagccgagaccctagcgcagcatggcttggacaactgcggccacagtgtgctggcgcctgctccacctcccctccgcccgctgccctctctcgtcccgggcccggtgttccgctgcgcagagcccagacgccgtggacaaggagtacgccgacctcaacctccggcctctgtaccccaacaggggccatcacatgcgcatacggcagcacgtgaacccgctcagctcatccttctcggagcccacggggccgccagagtggaaggaggtgttcgacgaccccttgcttcccctcatggtcgacatcggctgcgggagtgggaggttcttgatttggcacgcgaagaattctggcaagagtcagaactaccttgggctagaaatccgccaaaaggttttattggttttaggttgcagcttgtttggtttctggattggatgattttttcctttttgtaatgtataaatgcccggatctctgcctttcagtttaagagagaaaagaaagatcacaacagttttagaaacaaagaactgggaagctcaagcagcacccccccccaaaaaaaaggcataccgcaccctcataacacggaacaaagaaaatgaactgcagaatcgcatgccatcattttgctttcaaagacatttgctttgctgtttggaacaattctcgaagatgattcagtttcgttctttcctgaggttccacattacatagattgccaggctgttgaaatattttggcataaaagatataagcgtatgccagtctcacacggtccattgcgcataatgcaattatcttgatgtggacaaccccttaaatccaagttgtctgctgcggaatttcgtcttgtgtaagtgtccaagcaaaccatttaaatgtgcatctgttttccatgtgggtctgccaaattaggtttgatttgtacaattgtacccaagtaggagcctttgaactgcatccggtacttatgcattgttaaatttgtagtttggtgacgttctacttgttttgtttctgtagttggtggagcgggcacagttctgggtgaatgaattggagcttatgaacgttgtcttttgagaaaatcatatcgtcataccctggtcccttgtcacttgtttcaatactggtgagtgtagctgggtgctacatcagttccttagttatatctgttggctcagtgataattaatctgatcagcactttgttatttcctgatgttatggaaatggaactgagatttcagatgtctattcgctggttttgtagtgtcctgatccacacttcaaaaagaggcatcacaaaagaagagttctgcagcaaccattggtcgattcaatcataaataatctctgtttaggcggacaggttttcatacaatctgatgtactggaagtatctgtagacatgagggaaaggatggcttctggacaacccaatgggaatccggacagagcgagaaatccatgcagagcttgaaggagcaacgatatacaggagggtgtaccaaaagttgggaaaaaaaacaaagcatccaagtacaaagcctggcgaaccaaaacaaagagaagcccaagcaattagccaatgcttttgatgaagatgacaactggcataagtgttcctttgttggtcagattgtacttatggtgtttagcatcgggtgctgtcttcgttctgtccagaattcaggtctggaattgctcaccatctatcggtatgacatgtgcaatgactaa

SEQ ID NO: 6485 - DNA, 1721 bp, Zea Mays
cgctacattctcacaaatggctgcgggtcgcacccggcgctcggcatccctccccgccgcaaagtcgcgccgccgtcgcctcgcacgcacgaacgccatcacttcgtcgcttacccatcagacagacaaacaaggccgaaactccacgacgtcccccgctcggcagcagcaacagccgagaccctagcgcagcatggcttggacaactgcggccacagtgtgctggcgcctgctccacctcccctccgcccgctgccctctctcgtcccgggcccggtgttccgctgcgcagagcccagacgccgtggacaaggagtacgccgacctcaacctccggcctctgtaccccaacaggggccatcacatgcgcatacggcagcacgtgaacccgctcagctcatccttctcggagcccacggggccgccagagtggaaggaggtgttcgacgaccccttgcttcccctcatggtcgacatcggctgcgggagtgggaggttcttgatttggcacgcgaagaattctggcaagagtcagaactaccttgggctagaaatccgccaaaaggttttattggttttaggttgcagcttgtttggtttctggattggatgattttttcctttttgtaatgtataaatgcccggatctctgcctttcagtttaagagagaaaagaaagatcacaacagttttagaaacaaagaactgggaagctcaagcagcacccccccccaaaaaaaaggcataccgcaccctcataacacggaacaaagaaaatgaactgcagaatcgcatgccatcattttgctttcaaagacatttgctttgctgtttggaacaattctcgaagatgattcagtttcgttctttcctgaggttccacattacatagattgccaggctgttgaaatattttggcataaaagatataagcgtatgccagtctcacacggtccattgcgcataatgcaattatcttgatgtggacaaccccttaaatccaagttgtctgctgcggaatttcgtcttgtgtaagtgtccaagcaaaccatttaaatgtgcatctgttttccatgtgggtctgccaaattaggtttgatttgtacaattgtacccaagtaggagcctttgaactgcatccggtacttatgcattgttaaatttgtagtttggtgacgttctacttgttttgtttctgtagttggtggagcgggcacagttctgggtgaatgaattggagcttatgaacgttgtcctgatccacacttcaaaaagaggcatcacaaaagaagagttctgcagcaaccattggtcgattcaatcataaataatctctgtttaggcggacaggttttcatacaatctgatgtactggaagtatctgtagacatgagggaaaggatggcttctggacaacccaatgggaatccggacagagcgagaaatccatgcagagcttgaaggagcaacgatatacaggagggtgtaccaaaagttgggaaaaaaaacaaagcatccaagtacaaagcctggcgaaccaaaacaaagagaagcccaagcaattagccaatgcttttgatgaagatgacaactggcataagtgttcctttgttggtcagattgtacttatggtgtttagcatcgggtgctgtcttcgttctgtccagaattcaggtctggaattgctcaccatctatcggtatgacatgtgcaatgactaa

SEQ ID NO: 6486 - DNA, 2113 bp, Zea Mays
cgctacattctcacaaatggctgcgggtcgcacccggcgctcggcatccctccccgccgcaaagtcgcgccgccgtcgcctcgcacgcacgaacgccatcacttcgtcgcttacccatcagacagacaaacaaggccgaaactccacgacgtcccccgctcggcagcagcaacagccgagaccctagcgcagcatggcttggacaactgcggccacagtgtgctggcgcctgctccacctcccctccgcccgctgccctctctcgtcccgggcccggtgttccgctgcgcagagcccagacgccgtggacaaggaaggggccatcacatgcgcatacggcagcacgtgaacccgctcagctcatccttctcggagcccacggggccgccagagtggaaggaggtgttcgacgaccccttgcttcccctcatggtcgacatcggctgcgggagtgggaggttcttgatttggcacgcgaagaattctggcaagagtcagaactaccttgggctagaaatccgccaaaagtttaagagagaaaagaaagatcacaacagttttagaaacaaagaactgggaagctcaagcagcacccccccccaaaaaaaaggcataccgcaccctcataacacggaacaaagaaaatgaactgcagaatcgcatgccatcattttgctttcaaagacatttgctttgctgtttggaacaattctcgaagatgattcagtttcgttctttcctgaggttccacattacatagattgccaggctgttgaaatattttggcataaaagatataagcgtatgccagtctcacacggtccattgcgcataatgcaattatcttgatgtggacaaccccttaaatccaagttgtctgctgcggaatttcgtcttgtgtaagtgtccaagcaaaccatttaaatgtgcatctgttttccatgtgggtctgccaaattaggtttgatttgtacaattgtacccaagtaggagcctttgaactgcatccggtacttatgcattgttaaatttgtagtttggtgacgttctacttgttttgtttctgtagttggtggagcgggcacagttctgggtgaatgaattggagcttatgaacgtctattttatgtttgcaaatgcaacagtgtcttttgagaaaatcatatcgtcataccctggtcccttgtcacttgtttcaatactggtgagtgtagctgggtgctacatcagttccttagttatatctgttggctcagtgataattaatctgatcagcactttgttatttcctgatgttatggaaatggaactgagatttcagatgtctattcgctggttttgtagtgtcctgatccacacttcaaaaagaggcatcacaaaagaagagttctgcagcaaccattggtcgattcaatcataaataatctctgtttaggcggacaggtatagcaattccatagtccaagcattgtctttctaatctcaaaggcacggacccgttacttccaaatgctgtaataatcgttgctctactcatactaatcctgcaggctctatgcgttgcacggtgatagttaattcaagataacctaatgcattaatgccatacattttaattttgagctaaggccattttttgttatgtacatcattctagtttttgatgctgtgatctcccttgtgtctatcatgtctacacatgtccttcatttcttcaagctaacttagtgtattgatactaggttttcatacaatctgatgtactggaagtatctgtagacatgagggaaaggatggcttctggacaacccaatgggaatccggacagagcgagaaatccatgcagagcttgaaggagcaacgatatacaggagggtgtaccaaaagttgggaaaaaaaacaaagcatccaagtacaaagcctggcgaaccaaaacaaagagaagcccaagcaattagccaatgcttttgatgaagatgacaactggcataagtgttcctttgttggtcagattgtacttatggtgtttagcatcgggtgctgtcttcgttctgtccagaattcaggtctggaattgctcaccatctatcggtatgacatgtgcaatgactaa

SEQ ID NO: 6487 - DNA, 1170 bp, Zea Mays
cgctacattctcacaaatggctgcgggtcgcacccggcgctcggcatccctccccgccgcaaagtcgcgccgccgtcgcctcgcacgcacgaacgccatcacttcgtcgcttacccatcagacagacaaacaaggccgaaactccacgacgtcccccgctcggcagcagcaacagccgagaccctagcgcagcatggcttggacaactgcggccacagtgtgctggcgcctgctccacctcccctccgcccgctgccctctctcgtcccgggcccggtgttccgctgcgcagagcccagacgccgtggacaaggagtacgccgacctcaacctccggcctctgtaccccaacaggggccatcacatgcgcatacggcagcacgtgaacccgctcagctcatccttctcggagcccacggggccgccagagtggaaggaggtgttcgacgaccccttgcttcccctcatggtcgacatcggctgcgggagtgggaggttcttgatttggcacgcgaagaattctggcaagagtcagaactaccttgggctagaaatccgccaaaagttggtggagcgggcacagttctgggtgaatgaattggagcttatgaacgtctattttatgtttgcaaatgcaacagtgtcttttgagaaaatcatatcgtcataccctggtcccttgtcacttgtttcaatactgtgtcctgatccacacttcaaaaagaggcatcacaaaagaagagttctgcagcaaccattggtcgattcaatcataaataatctctgtttaggcggacaggttttcatacaatctgatgtactggaagtatctgtagacatgagggaaaggatggcttctggacaacccaatgggaatccggacagagcgagaaatccatgcagagcttgaaggagcaacgatatacaggagggtgtaccaaaagttgggaaaaaaaacaaagcatccaagtacaaagcctggcgaaccaaaacaaagagaagcccaagcaattagccaatgcttttgatgaagatgacaactggcataagtgttcctttgttggtcagattgtacttatggtgtttagcatcgggtgctgtcttcgttctgtccagaattcaggtctggaattgctcaccatctatcggtatgacatgtgcaatgactaa

SEQ ID NO: 6488 - DNA, 1636 bp, Zea Mays
cgctacattctcacaaatggctgcgggtcgcacccggcgctcggcatccctccccgccgcaaagtcgcgccgccgtcgcctcgcacgcacgaacgccatcacttcgtcgcttacccatcagacagacaaacaaggccgaaactccacgacgtcccccgctcggcagcagcaacagccgagaccctagcgcagcatggcttggacaactgcggccacagtgtgctggcgcctgctccacctcccctccgcccgctgccctctctcgtcccgggcccggtgttccgctgcgcagagcccagacgccgtggacaaggagtacgccgacctcaacctccggcctctgtaccccaacaggggccatcacatgcgcatacggcagcacgtgaacccgctcagctcatccttctcggagcccacggggccgccagagtggaaggaggtgttcgacgaccccttgcttcccctcatggtcgacatcggctgcgggagtgggaggttcttgatttggcacgcgaagaattctggcaagagtcagaactaccttgggctagaaatccgccaaaaggttttattggttttaggttgcagcttgtttggtttctggattggatgattttttcctttttgtaatgtataaatgcccggatctctgcctttcagtttaagagagaaaagaaagatcacaacagttttagaaacaaagaactgggaagctcaagcagcacccccccccaaaaaaaaggcataccgcaccctcataacacggaacaaagaaaatgaactgcagaatcgcatgccatcattttgctttcaaagacatttgctttgctgtttggaacaattctcgaagatgattcagtttcgttctttcctgaggttccacattacatagattgccaggctgttgaaatattttggcataaaagatataagcgtatgccagtctcacacggtccattgcgcataatgcaattatcttgatgtggacaaccccttaaatccaagttgtctgctgcggaatttcgtcttgtttggtggagcgggcacagttctgggtgaatgaattggagcttatgaacgtctattttatgtttgcaaatgcaacagtgtcttttgagaaaatcatatcgtcataccctggtcccttgtcacttgtttcaatactgtgtcctgatccacacttcaaaaagaggcatcacaaaagaagagttctgcagcaaccattggtcgattcaatcataaataatctctgtttaggcggacaggttttcatacaatctgatgtactggaagtatctgtagacatgagggaaaggatggcttctggacaacccaatgggaatccggacagagcgagaaatccatgcagagcttgaaggagcaacgatatacaggagggtgtaccaaaagttgggaaaaaaaacaaagcatccaagtacaaagcctggcgaaccaaaacaaagagaagcccaagcaattagccaatgcttttgatgaagatgacaactggcataagtgttcctttgttggtcagattgtacttatggtgtttagcatcgggtgctgtcttcgttctgtccagaattcaggtctggaattgctcaccatctatcggtatgacatgtgcaatgactaa

SEQ ID NO: 6489 - DNA, 2020 bp, Zea Mays
cgctacattctcacaaatggctgcgggtcgcacccggcgctcggcatccctccccgccgcaaagtcgcgccgccgtcgcctcgcacgcacgaacgccatcacttcgtcgcttacccatcagacagacaaacaaggccgaaactccacgacgtcccccgctcggcagcagcaacagccgagaccctagcgcagcatggcttggacaactgcggccacagtgtgctggcgcctgctccacctcccctccgcccgctgccctctctcgtcccgggcccggtgttccgctgcgcagagcccagacgccgtggacaaggagtacgccgacctcaacctccggcctctgtaccccaacaggggccatcacatgcgcatacggcagcacgtgaacccgctcagctcatccttctcggagcccacggggccgccagagtggaaggaggtgttcgacgaccccttgcttcccctcatggtcgacatcggctgcgggagtgggaggttcttgatttggcacgcgaagaattctggcaagagtcagaactaccttgggctagaaatccgccaaaaggttttattggttttaggttgcagcttgtttggtttctggattggatgattttttcctttttgtaatgtataaatgcccggatctctgcctttcagtttaagagagaaaagaaagatcacaacagttttagaaacaaagaactgggaagctcaagcagcacccccccccaaaaaaaaggcataccgcaccctcataacacggaacaaagaaaatgaactgcagaatcgcatgccatcattttgctttcaaagacatttgctttgctgtttggaacaattctcgaagatgattcagtttcgttctttcctgaggttccacattacatagattgccaggctgttgaaatattttggcataaaagatataagcgtatgccagtctcacacggtccattgcgcataatgcaattatcttgatgtggacaaccccttaaatccaagttgtctgctgcggaatttcgtcttgtgtaagtgtccaagcaaaccatttaaatgtgcatctgttttccatgtgggtctgccaaattaggtttgatttgtacaattgtacccaagtaggagcctttgaactgcatccggtacttatgcattgttaaatttgtagtttggtgacgttctacttgttttgtttctgtagttggtggagcgggcacagttctgggtgaatgaattggagcttatgaacgttgtcctgatccacacttcaaaaagaggcatcacaaaagaagagttctgcagcaaccattggtcgattcaatcataaataatctctgtttaggcggacaggtatagcaattccatagtccaagcattgtctttctaatctcaaaggcacggacccgttacttccaaatgctgtaataatcgttgctctactcatactaatcctgcaggctctatgcgttgcacggtgatagttaattcaagataacctaatgcattaatgccatacattttaattttgagctaaggccattttttgttatgtacatcattctagtttttgatgctgtgatctcccttgtgtctatcatgtctacacatgtccttcatttcttcaagctaacttagtgtattgatactaggttttcatacaatctgatgtactggaagtatctgtagacatgagggaaaggatggcttctggacaacccaatgggaatccggacagagcgagaaatccatgcagagcttgaaggagcaacgatatacaggagggtgtaccaaaagttgggaaaaaaaacaaagcatccaagtacaaagcctggcgaaccaaaacaaagagaagcccaagcaattagccaatgcttttgatgaagatgacaactggcataagtgttcctttgttggtcagattgtacttatggtgtttagcatcgggtgctgtcttcgttctgtccagaattcaggtctggaattgctcaccatctatcggtatgacatgtgcaatgactaa

SEQ ID NO: 6490 - DNA, 4846 bp, Zea Mays
atacatgcacgaggatgctcttatgtgttccctgaaaaaaaaaatcatattctaattttttagcttcgtccgatccggcgaacaggaagcgcaaccgaaaaacctacggcgacagatctccacccaaacatctcaccagtcgacagtagtcatcagccgtctaacaaaaccgttaaacggacggaccatcgtcccgggcagacccgccgaacgacggtcgacggcagaggcaaaaccctcaccttcctccgtgggggcgatggcggcgccggaatcggaatgcggcgggagtgacggctaccgcgacctccgcggcgtgcgcgtcgacctggacacgggagcggcccgagccggtgggggaggaggcttcgccgtctccttctggctctacctgtccgtctccgccagaccgtcctcggtgatcctccaccagatcacagcgggagatgacaccaagttgccgtttcttgctttaggtgaaggaaacaaactgcttctcttcccgttgatgaggctgcacagggaagctcctgctcctgctagttcgtacccatggactgacacaaccaatctatcatctacgagtgtatgccctcttgagaaatggttccacattgggtgtgaggttactgaaaatgttatgcgtcttcacgttgatggtttcctaactgctgaggcccccctttgttcactgtttgatgagccagacagtcaggatgattcaaaccaaattagcttagttggaaatgatggcaagcttgaaggctatatctataatatcgaggtttcatatgtactaggagctataaaagaacaatacacaaagaacccaccatttaagttatctattgactattcatgctctgatggaatcgaagagggtgatgacggcatttggagcatcgttggtgggaaggcatcttgccggagaaatttcattttggaagtagtactaaccaacgcttttggtgaacctgtgaaggataaagaggtcgtttcttcacttgtctatgctgatgatggaacagtagttgcaaaatcaagggatgattctgagcctcctttgcttattacttgcgaaggacttgaatatgcagcgataagcaggcctctaccaattatacgtgggcgagcactatttaaactcaagatatctcagctctcttccaaatgtgacaataagctcttccgtattaaattctctacacttcacatgcaaagatattcttttctggaagcatattccaaaccgattcgctgtatatctcgaagccgcactgtccgccccttgggtcctacaaagcgggcgagttctgcaacagcaaatgaaattgacatgctcagtaatggccaagggtttgttagtactgacaaagtaaatagtcgtggacattcagtgtgtctgcatacgcccatgtttcccaagatagaagatggaatggtggaggtagtagaggcccacaaaatagtatcacagaataagaatgccagaaaagtggtagtaagcaaagaagcacagaatgtaatagggactgattcctcaacatccaactatgacagctttgattcaggaagttcttggagtggatcagaaggagatgatggtattgaaaccttttcagacgctgtggttttcagatactgtctagacagcacatatgaccggtcaaagtttcttagaggtgcatctcttactgttaacaaagatgacttggtaaaacttgcagaccgagtctcgttgtatagtggatgctcccaccacagaaaccaaatattaatgtcgaagagattgctcagagagggtgctgacacttggaacatgatctcaaagaacaatgaacgtgctctttggtcatctgccattccagagatcataacaaaatttacgaacattgcccattctgtgcgtaggggtttatcagagcaggatcttgaggttttaagaggcattgctggttgtggtgaggacataggaagagatgaatttgataggctatggtgctggttatacccagtggctgtttcattatcgagagagagaattaaaaagctgtgggattgcacagcacctagatggatagagggcttgattacaacagaagaagctgagagtgcactaagaagttccagggaattgttaaaggaggcaggaacatttgttctcagatttcctatcacccgaagctggccacatccagatgctggaagcctagttgtcacttacattggctctgatagctcaattcatcataggctactctctcttgattccagtgatgctagcgctgagaaactgcaagatttgctgctccaggaaccggaactatcacaattgggcagggttgatcgggtctcaatcaccatccggagatgaccgaggcttcaaacggttaaacttacattcaaaagcaggatttaggatgctgccacgagaagagggtcagcagcagctcgacgcatacaagttcattgtcatccaagagcatagcccataacacccattgcctgttttttttttgaatcaaacacccattgcctgttgttaccatgtacaggttgtaaattggttcccttggtagtttagttcgtacaaagagaggtactagtgaggtctagttgcttcagaaaaccaacagtaacatgagctaccatgtgtgtcgcaaaaagaaagaagctgtcatcatgtgcctcgaaactggaggattttcagtggctaacatgttgcatatagaattgacagttgatttatttttgggttccttttcaatcctgtcatttgggccgagaggaggataagtgtcgtcgtagcccatgtcaattttgaggtcaaaagcattgggccgtccactatccaagcaccgaatcacgctacattctcacaaatggctgcgggtcgcacccggcgctcggcatccctccccgccgcaaagtcgcgccgccgtcgcctcgcacgcacgaacgccatcacttcgtcgcttacccatcagacagacaaacaaggccgaaactccacgacgtcccccgctcggcagcagcaacagccgagaccctagcgcagcatggcttggacaactgcggccacagtgtgctggcgcctgctccacctcccctccgcccgctgccctctctcgtcccgggcccggtgttccgctgcgcagagcccagacgccgtggacaaggagtacgccgacctcaacctccggcctctgtaccccaacaggggccatcacatgcgcatacggcagcacgtgaacccgctcagctcatccttctcggagcccacggggccgccagagtggaaggaggtgttcgacgaccccttgcttcccctcatggtcgacatcggctgcgggagtgggaggttcttgatttggcacgcgaagaattctggcaagagtcagaactaccttgggctagaaatccgccaaaagtttaagagagaaaagaaagatcacaacagttttagaaacaaagaactgggaagctcaagcagcacccccccccaaaaaaaaggcataccgcaccctcataacacggaacaaagaaaatgaactgcagaatcgcatgccatcattttgctttcaaagacatttgctttgctgtttggaacaattctcgaagatgattcagtttcgttctttcctgaggttccacattacatagattgccaggctgttgaaatattttggcataaaagatataagcgtatgccagtctcacacggtccattgcgcataatgcaattatcttgatgtggacaaccccttaaatccaagttgtctgctgcggaatttcgtcttgtttggtggagcgggcacagttctgggtgaatgaattggagcttatgaacgtctattttatgtttgcaaatgcaacagtgtcttttgagaaaatcatatcgtcataccctggtcccttgtcacttgtttcaatactggtgagtgtagctgggtgctacatcagttccttagttatatctgttggctcagtgataattaatctgatcagcactttgttatttcctgatgttatggaaatggaactgagatttcagatgtctattcgctggttttgtagtgtcctgatccacacttcaaaaagaggcatcacaaaagaagagttctgcagcaaccattggtcgattcaatcataaataatctctgtttaggcggacaggtatagcaattccatagtccaagcattgtctttctaatctcaaaggcacggacccgttacttccaaatgctgtaataatcgttgctctactcatactaatcctgcaggctctatgcgttgcacggtgatagttaattcaagataacctaatgcattaatgccatacattttaattttgagctaaggccattttttgttatgtacatcattctagtttttgatgctgtgatctcccttgtgtctatcatgtctacacatgtccttcatttcttcaagctaacttagtgtattgatactaggttttcatacaatctgatgtactggaagtatctgtagacatgagggaaaggatggcttctggacaacccaatgggaatccggacagagcgagaaatccatgcagagcttgaaggagcaacgatatacaggagggtgtaccaaaagttgggaaaaaaaacaaagcatccaagtacaaagcctggcgaaccaaaacaaagagaagcccaagcaattagccaatgcttttgatgaagatgacaactggcataagtgttcctttgttggtcagattgtacttatggtgtttagcatcgggtgctgtcttcgttctgtccagaattcaggtctggaattgctcaccatctatcggtatgacatgtgcaatgactaa

SEQ ID NO: 6491 - DNA, 1909 bp, Zea Mays
cgctacattctcacaaatggctgcgggtcgcacccggcgctcggcatccctccccgccgcaaagtcgcgccgccgtcgcctcgcacgcacgaacgccatcacttcgtcgcttacccatcagacagacaaacaaggccgaaactccacgacgtcccccgctcggcagcagcaacagccgagaccctagcgcagcatggcttggacaactgcggccacagtgtgctggcgcctgctccacctcccctccgcccgctgccctctctcgtcccgggcccggtgttccgctgcgcagagcccagacgccgtggacaaggagtacgccgacctcaacctccggcctctgtaccccaacaggggccatcacatgcgcatacggcagcacgtgaacccgctcagctcatccttctcggagcccacggggccgccagagtggaaggaggtgttcgacgaccccttgcttcccctcatggtcgacatcggctgcgggagtgggaggttcttgatttggcacgcgaagaattctggcaagagtcagaactaccttgggctagaaatccgccaaaagttggtggagcgggcacagttctgggtgaatgaattggagcttatgaacgttgtcctgatccacacttcaaaaagaggcatcacaaaagaagagttctgcagcaaccattggtcgattcaatcataaataatctctgtttaggcggacaggttttcatacaatctgatgtactggaagtatctgtagacatgagggaaaggtttgatgggtactctggtattttggcacatgttaattatgttgatcaagatcttcagtgtgacaatgaaggatggcttctggacaacccaatgggaatccggacagagcgagaaatccatgcagagcttgaaggagcaacgatatacaggagggtgtaccaaaaggttagagatgcttctttctagctgtttatcagctacagaagttgtccaaggagtaaggtttccaagaatgttcattgcatgtattccattaagagaagttgggaaaaaaaacaaagcatccaagtacaaagcctggcgaaccaaaacaaagagaagcccaagcagtaacacctgatgtcttcctgcttgaaccatgccacaagttgcctttactacatcaagctgcattacatttctgacagtgcgcttgtgcacatctaatcttttttttcacctgatgcaatgagtcagattagccaatgcttttgatgaagatgacaactggcataagtgttcctttgttggtcagattgtacttatggtgtttagcatcgggtgctgtcttcgttctgtccagaattcaggtctggaattgctcaccatctatcggtatgcagactgtttgtagaggcaatccagatgaggcaatttgatgtgcgctaggattgttcaaactttggtccgctcaacgttcccttgacttggtagatatacaagaatggacaacgttttcttgacttggtaaagtttggtcattagtttgtgaaacagaatgctgcattgctcttggcatttgataagtgacaggtgaataagacgacaccgaggtgcatgtgggcactttttagtgtttgatgtttgctaagtcctctaccaacaggtcaatacatatgttaatcaatttgaataactcattaattgaaattttgttgctaatggtatcgaattaactcaccattgtattcggcttttcgctgagaaacagtttagtatcagaatcatttatcgaataatttttcgtcgcaacacagtcatattgtactggtgatagctgacactgttgggttacccatgtattgccacgatgtctatatatcatgtgtaaagaatttgtaataagacacataaatatatgttctattgattagatgagcgcgaa

SEQ ID NO: 6492 - DNA, 2945 bp, Zea Mays
cgctacattctcacaaatggctgcgggtcgcacccggcgctcggcatccctccccgccgcaaagtcgcgccgccgtcgcctcgcacgcacgaacgccatcacttcgtcgcttacccatcagacagacaaacaaggccgaaactccacgacgtcccccgctcggcagcagcaacagccgagaccctagcgcagcatggcttggacaactgcggccacagtgtgctggcgcctgctccacctcccctccgcccgctgccctctctcgtcccgggcccggtgttccgctgcgcagagcccagacgccgtggacaaggagtacgccgacctcaacctccggcctctgtaccccaacaggggccatcacatgcgcatacggcagcacgtgaacccgctcagctcatccttctcggagcccacggggccgccagagtggaaggaggtgttcgacgaccccttgcttcccctcatggtcgacatcggctgcgggagtgggaggttcttgatttggcacgcgaagaattctggcaagagtcagaactaccttgggctagaaatccgccaaaaggttttattggttttaggttgcagcttgtttggtttctggattggatgattttttcctttttgtaatgtataaatgcccggatctctgcctttcagtttaagagagaaaagaaagatcacaacagttttagaaacaaagaactgggaagctcaagcagcacccccccccaaaaaaaaggcataccgcaccctcataacacggaacaaagaaaatgaactgcagaatcgcatgccatcattttgctttcaaagacatttgctttgctgtttggaacaattctcgaagatgattcagtttcgttctttcctgaggttccacattacatagattgccaggctgttgaaatattttggcataaaagatataagcgtatgccagtctcacacggtccattgcgcataatgcaattatcttgatgtggacaaccccttaaatccaagttgtctgctgcggaatttcgtcttgtgtaagtgtccaagcaaaccatttaaatgtgcatctgttttccatgtgggtctgccaaattaggtttgatttgtacaattgtacccaagtaggagcctttgaactgcatccggtacttatgcattgttaaatttgtagtttggtgacgttctacttgttttgtttctgtagttggtggagcgggcacagttctgggtgaatgaattggagcttatgaacgttgtcttttgagaaaatcatatcgtcataccctggtcccttgtcacttgtttcaatactggtgagtgtagctgggtgctacatcagttccttagttatatctgttggctcagtgataattaatctgatcagcactttgttatttcctgatgttatggaaatggaactgagatttcagatgtctattcgctggttttgtagtgtcctgatccacacttcaaaaagaggcatcacaaaagaagagttctgcagcaaccattggtcgattcaatcataaataatctctgtttaggcggacaggtatagcaattccatagtccaagcattgtctttctaatctcaaaggcacggacccgttacttccaaatgctgtaataatcgttgctctactcatactaatcctgcaggctctatgcgttgcacggtgatagttaattcaagataacctaatgcattaatgccatacattttaattttgagctaaggccattttttgttatgtacatcattctagtttttgatgctgtgatctcccttgtgtctatcatgtctacacatgtccttcatttcttcaagctaacttagtgtattgatactaggttttcatacaatctgatgtactggaagtatctgtagacatgagggaaaggtttgatgggtactctggtattttggcacatgttaattatgttgatcaagatcttcagtgtgacaatgaaggatggcttctggacaacccaatgggaatccggacagagcgagaaatccatgcagagcttgaaggagcaacgatatacaggagggtgtaccaaaagttgggaaaaaaaacaaagcatccaagtacaaagcctggcgaaccaaaacaaagagaagcccaagcagtaacacctgatgtcttcctgcttgaaccatgccacaagttgcctttactacatcaagctgcattacatttctgacagtgcgcttgtgcacatctaatcttttttttcacctgatgcaatgagtcagattagccaatgcttttgatgaagatgacaactggcataagtgttcctttgttggtcagattgtacttatggtgtttagcatcgggtgctgtcttcgttctgtccagaattcaggtctggaattgctcaccatctatcggtatgcagactgtttgtagaggcaatccagatgaggcaatttgatgtgcgctaggattgttcaaactttggtccgctcaacgttcccttgacttggtagatatacaagaatggacaacgttttcttgacttggtaaagtttggtcattagtttgtgaaacagaatgctgcattgctcttggcatttgataagtgacaggtgaataagacgacaccgaggtgcatgtgggcactttttagtgtttgatgtttgctaagtcctctaccaacaggtcaatacatatgttaatcaatttgaataactcattaattgaaattttgttgctaatggtatcgaattaactcaccattgtattcggcttttcgctgagaaacagtttagtatcagaatcatttatcgaataatttttcgtcgcaacacagtcatattgtactggtgatagctgacactgttgggttacccatgtattgccacgatgtctatatatcatgtgtaaagaatttgtaataagacacataaatatatgttctattgattagatgagcgcgaa

SEQ ID NO: 6493 - DNA, 1698 bp, Zea Mays
cgctacattctcacaaatggctgcgggtcgcacccggcgctcggcatccctccccgccgcaaagtcgcgccgccgtcgcctcgcacgcacgaacgccatcacttcgtcgcttacccatcagacagacaaacaaggccgaaactccacgacgtcccccgctcggcagcagcaacagccgagaccctagcgcagcatggcttggacaactgcggccacagtgtgctggcgcctgctccacctcccctccgcccgctgccctctctcgtcccgggcccggtgttccgctgcgcagagcccagacgccgtggacaaggagtacgccgacctcaacctccggcctctgtaccccaacaggggccatcacatgcgcatacggcagcacgtgaacccgctcagctcatccttctcggagcccacggggccgccagagtggaaggaggtgttcgacgaccccttgcttcccctcatggtcgacatcggctgcgggagtgggaggttcttgatttggcacgcgaagaattctggcaagagtcagaactaccttgggctagaaatccgccaaaagttggtggagcgggcacagttctgggtgaatgaattggagcttatgaacgtctattttatgtttgcaaatgcaacagtgtcttttgagaaaatcatatcgtcataccctggtcccttgtcacttgtttcaatactgtgtcctgatccacacttcaaaaagaggcatcacaaaagaagagttctgcagcaaccattggtcgattcaatcataaataatctctgtttaggcggacaggttttcatacaatctgatgtactggaagtatctgtagacatgagggaaaggatggcttctggacaacccaatgggaatccggacagagcgagaaatccatgcagagcttgaaggagcaacgatatacaggagggtgtaccaaaagttgggaaaaaaaacaaagcatccaagtacaaagcctggcgaaccaaaacaaagagaagcccaagcaattagccaatgcttttgatgaagatgacaactggcataagtgttcctttgttggtcagattgtacttatggtgtttagcatcgggtgctgtcttcgttctgtccagaattcaggtctggaattgctcaccatctatcggtatgcagactgtttgtagaggcaatccagatgaggcaatttgatgtgcgctaggattgttcaaactttggtccgctcaacgttcccttgacttggtagatatacaagaatggacaacgttttcttgacttggtaaagtttggtcattagtttgtgaaacagaatgctgcattgctcttggcatttgataagtgacaggtgaataagacgacaccgaggtgcatgtgggcactttttagtgtttgatgtttgctaagtcctctaccaacaggtcaatacatatgttaatcaatttgaataactcattaattgaaattttgttgctaatggtatcgaattaactcaccattgtattcggcttttcgctgagaaacagtttagtatcagaatcatttatcgaataatttttcgtcgcaacacagtcatattgtactggtgatagctgacactgttgggttacccatgtattgccacgatgtctatatatcatgtgtaaagaatttgtaataagacacataaatatatgttctattgattagatgagcgcgaa

SEQ ID NO: 6494 - DNA, 2304 bp, Zea Mays
cgctacattctcacaaatggctgcgggtcgcacccggcgctcggcatccctccccgccgcaaagtcgcgccgccgtcgcctcgcacgcacgaacgccatcacttcgtcgcttacccatcagacagacaaacaaggccgaaactccacgacgtcccccgctcggcagcagcaacagccgagaccctagcgcagcatggcttggacaactgcggccacagtgtgctggcgcctgctccacctcccctccgcccgctgccctctctcgtcccgggcccggtgttccgctgcgcagagcccagacgccgtggacaaggagtacgccgacctcaacctccggcctctgtaccccaacaggggccatcacatgcgcatacggcagcacgtgaacccgctcagctcatccttctcggagcccacggggccgccagagtggaaggaggtgttcgacgaccccttgcttcccctcatggtcgacatcggctgcgggagtgggaggttcttgatttggcacgcgaagaattctggcaagagtcagaactaccttgggctagaaatccgccaaaaggttttattggttttaggttgcagcttgtttggtttctggattggatgattttttcctttttgtaatgtataaatgcccggatctctgcctttcagtttaagagagaaaagaaagatcacaacagttttagaaacaaagaactgggaagctcaagcagcacccccccccaaaaaaaaggcataccgcaccctcataacacggaacaaagaaaatgaactgcagaatcgcatgccatcattttgctttcaaagacatttgctttgctgtttggaacaattctcgaagatgattcagtttcgttctttcctgaggttccacattacatagattgccaggctgttgaaatattttggcataaaagatataagcgtatgccagtctcacacggtccattgcgcataatgcaattatcttgatgtggacaaccccttaaatccaagttgtctgctgcggaatttcgtcttgtttggtggagcgggcacagttctgggtgaatgaattggagcttatgaacgttgtcctgatccacacttcaaaaagaggcatcacaaaagaagagttctgcagcaaccattggtcgattcaatcataaataatctctgtttaggcggacaggttttcatacaatctgatgtactggaagtatctgtagacatgagggaaaggatggcttctggacaacccaatgggaatccggacagagcgagaaatccatgcagagcttgaaggagcaacgatatacaggagggtgtaccaaaaggttagagatgcttctttctagctgtttatcagctacagaagttgtccaaggagtaaggtttccaagaatgttcattgcatgtattccattaagagaagttgggaaaaaaaacaaagcatccaagtacaaagcctggcgaaccaaaacaaagagaagcccaagcagtaacacctgatgtcttcctgcttgaaccatgccacaagttgcctttactacatcaagctgcattacatttctgacagtgcgcttgtgcacatctaatcttttttttcacctgatgcaatgagtcagattagccaatgcttttgatgaagatgacaactggcataagtgttcctttgttggtcagattgtacttatggtgtttagcatcgggtgctgtcttcgttctgtccagaattcaggtctggaattgctcaccatctatcggtatgcagactgtttgtagaggcaatccagatgaggcaatttgatgtgcgctaggattgttcaaactttggtccgctcaacgttcccttgacttggtagatatacaagaatggacaacgttttcttgacttggtaaagtttggtcattagtttgtgaaacagaatgctgcattgctcttggcatttgataagtgacaggtgaataagacgacaccgaggtgcatgtgggcactttttagtgtttgatgtttgctaagtcctctaccaacaggtcaatacatatgttaatcaatttgaataactcattaattgaaattttgttgctaatggtatcgaattaactcaccattgtattcggcttttcgctgagaaacagtttagtatcagaatcatttatcgaataatttttcgtcgcaacacagtcatattgtactggtgatagctgacactgttgggttacccatgtattgccacgatgtctatatatcatgtgtaaagaatttgtaataagacacataaatatatgttctattgattagatgagcgcgaa

SEQ ID NO: 6495 - DNA, 2164 bp, Zea Mays
cgctacattctcacaaatggctgcgggtcgcacccggcgctcggcatccctccccgccgcaaagtcgcgccgccgtcgcctcgcacgcacgaacgccatcacttcgtcgcttacccatcagacagacaaacaaggccgaaactccacgacgtcccccgctcggcagcagcaacagccgagaccctagcgcagcatggcttggacaactgcggccacagtgtgctggcgcctgctccacctcccctccgcccgctgccctctctcgtcccgggcccggtgttccgctgcgcagagcccagacgccgtggacaaggagtacgccgacctcaacctccggcctctgtaccccaacaggggccatcacatgcgcatacggcagcacgtgaacccgctcagctcatccttctcggagcccacggggccgccagagtggaaggaggtgttcgacgaccccttgcttcccctcatggtcgacatcggctgcgggagtgggaggttcttgatttggcacgcgaagaattctggcaagagtcagaactaccttgggctagaaatccgccaaaaggttttattggttttaggttgcagcttgtttggtttctggattggatgattttttcctttttgtaatgtataaatgcccggatctctgcctttcagtttaagagagaaaagaaagatcacaacagttttagaaacaaagaactgggaagctcaagcagcacccccccccaaaaaaaaggcataccgcaccctcataacacggaacaaagaaaatgaactgcagaatcgcatgccatcattttgctttcaaagacatttgctttgctgtttggaacaattctcgaagatgattcagtttcgttctttcctgaggttccacattacatagattgccaggctgttgaaatattttggcataaaagatataagcgtatgccagtctcacacggtccattgcgcataatgcaattatcttgatgtggacaaccccttaaatccaagttgtctgctgcggaatttcgtcttgtttggtggagcgggcacagttctgggtgaatgaattggagcttatgaacgtctattttatgtttgcaaatgcaacagtgtcttttgagaaaatcatatcgtcataccctggtcccttgtcacttgtttcaatactgtgtcctgatccacacttcaaaaagaggcatcacaaaagaagagttctgcagcaaccattggtcgattcaatcataaataatctctgtttaggcggacaggttttcatacaatctgatgtactggaagtatctgtagacatgagggaaaggatggcttctggacaacccaatgggaatccggacagagcgagaaatccatgcagagcttgaaggagcaacgatatacaggagggtgtaccaaaagttgggaaaaaaaacaaagcatccaagtacaaagcctggcgaaccaaaacaaagagaagcccaagcaattagccaatgcttttgatgaagatgacaactggcataagtgttcctttgttggtcagattgtacttatggtgtttagcatcgggtgctgtcttcgttctgtccagaattcaggtctggaattgctcaccatctatcggtatgcagactgtttgtagaggcaatccagatgaggcaatttgatgtgcgctaggattgttcaaactttggtccgctcaacgttcccttgacttggtagatatacaagaatggacaacgttttcttgacttggtaaagtttggtcattagtttgtgaaacagaatgctgcattgctcttggcatttgataagtgacaggtgaataagacgacaccgaggtgcatgtgggcactttttagtgtttgatgtttgctaagtcctctaccaacaggtcaatacatatgttaatcaatttgaataactcattaattgaaattttgttgctaatggtatcgaattaactcaccattgtattcggcttttcgctgagaaacagtttagtatcagaatcatttatcgaataatttttcgtcgcaacacagtcatattgtactggtgatagctgacactgttgggttacccatgtattgccacgatgtctatatatcatgtgtaaagaatttgtaataagacacataaatatatgttctattgattagatgagcgcgaa

SEQ ID NO: 6496 - DNA, 2124 bp, Zea Mays
cgctacattctcacaaatggctgcgggtcgcacccggcgctcggcatccctccccgccgcaaagtcgcgccgccgtcgcctcgcacgcacgaacgccatcacttcgtcgcttacccatcagacagacaaacaaggccgaaactccacgacgtcccccgctcggcagcagcaacagccgagaccctagcgcagcatggcttggacaactgcggccacagtgtgctggcgcctgctccacctcccctccgcccgctgccctctctcgtcccgggcccggtgttccgctgcgcagagcccagacgccgtggacaaggagtacgccgacctcaacctccggcctctgtaccccaacaggggccatcacatgcgcatacggcagcacgtgaacccgctcagctcatccttctcggagcccacggggccgccagagtggaaggaggtgttcgacgaccccttgcttcccctcatggtcgacatcggctgcgggagtgggaggttcttgatttggcacgcgaagaattctggcaagagtcagaactaccttgggctagaaatccgccaaaagttggtggagcgggcacagttctgggtgaatgaattggagcttatgaacgtctattttatgtttgcaaatgcaacagtgtcttttgagaaaatcatatcgtcataccctggtcccttgtcacttgtttcaatactgtgtcctgatccacacttcaaaaagaggcatcacaaaagaagagttctgcagcaaccattggtcgattcaatcataaataatctctgtttaggcggacaggtatagcaattccatagtccaagcattgtctttctaatctcaaaggcacggacccgttacttccaaatgctgtaataatcgttgctctactcatactaatcctgcaggctctatgcgttgcacggtgatagttaattcaagataacctaatgcattaatgccatacattttaattttgagctaaggccattttttgttatgtacatcattctagtttttgatgctgtgatctcccttgtgtctatcatgtctacacatgtccttcatttcttcaagctaacttagtgtattgatactaggttttcatacaatctgatgtactggaagtatctgtagacatgagggaaaggatggcttctggacaacccaatgggaatccggacagagcgagaaatccatgcagagcttgaaggagcaacgatatacaggagggtgtaccaaaagttgggaaaaaaaacaaagcatccaagtacaaagcctggcgaaccaaaacaaagagaagcccaagcagtaacacctgatgtcttcctgcttgaaccatgccacaagttgcctttactacatcaagctgcattacatttctgacagtgcgcttgtgcacatctaatcttttttttcacctgatgcaatgagtcagattagccaatgcttttgatgaagatgacaactggcataagtgttcctttgttggtcagattgtacttatggtgtttagcatcgggtgctgtcttcgttctgtccagaattcaggtctggaattgctcaccatctatcggtatgcagactgtttgtagaggcaatccagatgaggcaatttgatgtgcgctaggattgttcaaactttggtccgctcaacgttcccttgacttggtagatatacaagaatggacaacgttttcttgacttggtaaagtttggtcattagtttgtgaaacagaatgctgcattgctcttggcatttgataagtgacaggtgaataagacgacaccgaggtgcatgtgggcactttttagtgtttgatgtttgctaagtcctctaccaacaggtcaatacatatgttaatcaatttgaataactcattaattgaaattttgttgctaatggtatcgaattaactcaccattgtattcggcttttcgctgagaaacagtttagtatcagaatcatttatcgaataatttttcgtcgcaacacagtcatattgtactggtgatagctgacactgttgggttacccatgtattgccacgatgtctatatatcatgtgtaaagaatttgtaataagacacataaatatatgttctattgattagatgagcgcgaa

SEQ ID NO: 6497 - DNA, 2434 bp, Zea Mays
cgctacattctcacaaatggctgcgggtcgcacccggcgctcggcatccctccccgccgcaaagtcgcgccgccgtcgcctcgcacgcacgaacgccatcacttcgtcgcttacccatcagacagacaaacaaggccgaaactccacgacgtcccccgctcggcagcagcaacagccgagaccctagcgcagcatggcttggacaactgcggccacagtgtgctggcgcctgctccacctcccctccgcccgctgccctctctcgtcccgggcccggtgttccgctgcgcagagcccagacgccgtggacaaggagtacgccgacctcaacctccggcctctgtaccccaacaggggccatcacatgcgcatacggcagcacgtgaacccgctcagctcatccttctcggagcccacggggccgccagagtggaaggaggtgttcgacgaccccttgcttcccctcatggtcgacatcggctgcgggagtgggaggttcttgatttggcacgcgaagaattctggcaagagtcagaactaccttgggctagaaatccgccaaaaggttttattggttttaggttgcagcttgtttggtttctggattggatgattttttcctttttgtaatgtataaatgcccggatctctgcctttcagtttaagagagaaaagaaagatcacaacagttttagaaacaaagaactgggaagctcaagcagcacccccccccaaaaaaaaggcataccgcaccctcataacacggaacaaagaaaatgaactgcagaatcgcatgccatcattttgctttcaaagacatttgctttgctgtttggaacaattctcgaagatgattcagtttcgttctttcctgaggttccacattacatagattgccaggctgttgaaatattttggcataaaagatataagcgtatgccagtctcacacggtccattgcgcataatgcaattatcttgatgtggacaaccccttaaatccaagttgtctgctgcggaatttcgtcttgtttggtggagcgggcacagttctgggtgaatgaattggagcttatgaacgttgtcttttgagaaaatcatatcgtcataccctggtcccttgtcacttgtttcaatactgtgtcctgatccacacttcaaaaagaggcatcacaaaagaagagttctgcagcaaccattggtcgattcaatcataaataatctctgtttaggcggacaggttttcatacaatctgatgtactggaagtatctgtagacatgagggaaaggtttgatgggtactctggtattttggcacatgttaattatgttgatcaagatcttcagtgtgacaatgaaggatggcttctggacaacccaatgggaatccggacagagcgagaaatccatgcagagcttgaaggagcaacgatatacaggagggtgtaccaaaaggttagagatgcttctttctagctgtttatcagctacagaagttgtccaaggagtaaggtttccaagaatgttcattgcatgtattccattaagagaagttgggaaaaaaaacaaagcatccaagtacaaagcctggcgaaccaaaacaaagagaagcccaagcagtaacacctgatgtcttcctgcttgaaccatgccacaagttgcctttactacatcaagctgcattacatttctgacagtgcgcttgtgcacatctaatcttttttttcacctgatgcaatgagtcagattagccaatgcttttgatgaagatgacaactggcataagtgttcctttgttggtcagattgtacttatggtgtttagcatcgggtgctgtcttcgttctgtccagaattcaggtctggaattgctcaccatctatcggtatgcagactgtttgtagaggcaatccagatgaggcaatttgatgtgcgctaggattgttcaaactttggtccgctcaacgttcccttgacttggtagatatacaagaatggacaacgttttcttgacttggtaaagtttggtcattagtttgtgaaacagaatgctgcattgctcttggcatttgataagtgacaggtgaataagacgacaccgaggtgcatgtgggcactttttagtgtttgatgtttgctaagtcctctaccaacaggtcaatacatatgttaatcaatttgaataactcattaattgaaattttgttgctaatggtatcgaattaactcaccattgtattcggcttttcgctgagaaacagtttagtatcagaatcatttatcgaataatttttcgtcgcaacacagtcatattgtactggtgatagctgacactgttgggttacccatgtattgccacgatgtctatatatcatgtgtaaagaatttgtaataagacacataaatatatgttctattgattagatgagcgcgaa

SEQ ID NO: 6498 - DNA, 2783 bp, Zea Mays
cgctacattctcacaaatggctgcgggtcgcacccggcgctcggcatccctccccgccgcaaagtcgcgccgccgtcgcctcgcacgcacgaacgccatcacttcgtcgcttacccatcagacagacaaacaaggccgaaactccacgacgtcccccgctcggcagcagcaacagccgagaccctagcgcagcatggcttggacaactgcggccacagtgtgctggcgcctgctccacctcccctccgcccgctgccctctctcgtcccgggcccggtgttccgctgcgcagagcccagacgccgtggacaaggagtacgccgacctcaacctccggcctctgtaccccaacaggggccatcacatgcgcatacggcagcacgtgaacccgctcagctcatccttctcggagcccacggggccgccagagtggaaggaggtgttcgacgaccccttgcttcccctcatggtcgacatcggctgcgggagtgggaggttcttgatttggcacgcgaagaattctggcaagagtcagaactaccttgggctagaaatccgccaaaaggttttattggttttaggttgcagcttgtttggtttctggattggatgattttttcctttttgtaatgtataaatgcccggatctctgcctttcagtttaagagagaaaagaaagatcacaacagttttagaaacaaagaactgggaagctcaagcagcacccccccccaaaaaaaaggcataccgcaccctcataacacggaacaaagaaaatgaactgcagaatcgcatgccatcattttgctttcaaagacatttgctttgctgtttggaacaattctcgaagatgattcagtttcgttctttcctgaggttccacattacatagattgccaggctgttgaaatattttggcataaaagatataagcgtatgccagtctcacacggtccattgcgcataatgcaattatcttgatgtggacaaccccttaaatccaagttgtctgctgcggaatttcgtcttgtgtaagtgtccaagcaaaccatttaaatgtgcatctgttttccatgtgggtctgccaaattaggtttgatttgtacaattgtacccaagtaggagcctttgaactgcatccggtacttatgcattgttaaatttgtagtttggtgacgttctacttgttttgtttctgtagttggtggagcgggcacagttctgggtgaatgaattggagcttatgaacgtctattttatgtttgcaaatgcaacagtgtcttttgagaaaatcatatcgtcataccctggtcccttgtcacttgtttcaatactgatgtctattcgctggttttgtagtgtcctgatccacacttcaaaaagaggcatcacaaaagaagagttctgcagcaaccattggtcgattcaatcataaataatctctgtttaggcggacaggtatagcaattccatagtccaagcattgtctttctaatctcaaaggcacggacccgttacttccaaatgctgtaataatcgttgctctactcatactaatcctgcaggctctatgcgttgcacggtgatagttaattcaagataacctaatgcattaatgccatacattttaattttgagctaaggccattttttgttatgtacatcattctagtttttgatgctgtgatctcccttgtgtctatcatgtctacacatgtccttcatttcttcaagctaacttagtgtattgatactaggttttcatacaatctgatgtactggaagtatctgtagacatgagggaaaggatggcttctggacaacccaatgggaatccggacagagcgagaaatccatgcagagcttgaaggagcaacgatatacaggagggtgtaccaaaagttgggaaaaaaaacaaagcatccaagtacaaagcctggcgaaccaaaacaaagagaagcccaagcagtaacacctgatgtcttcctgcttgaaccatgccacaagttgcctttactacatcaagctgcattacatttctgacagtgcgcttgtgcacatctaatcttttttttcacctgatgcaatgagtcagattagccaatgcttttgatgaagatgacaactggcataagtgttcctttgttggtcagattgtacttatggtgtttagcatcgggtgctgtcttcgttctgtccagaattcaggtctggaattgctcaccatctatcggtatgcagactgtttgtagaggcaatccagatgaggcaatttgatgtgcgctaggattgttcaaactttggtccgctcaacgttcccttgacttggtagatatacaagaatggacaacgttttcttgacttggtaaagtttggtcattagtttgtgaaacagaatgctgcattgctcttggcatttgataagtgacaggtgaataagacgacaccgaggtgcatgtgggcactttttagtgtttgatgtttgctaagtcctctaccaacaggtcaatacatatgttaatcaatttgaataactcattaattgaaattttgttgctaatggtatcgaattaactcaccattgtattcggcttttcgctgagaaacagtttagtatcagaatcatttatcgaataatttttcgtcgcaacacagtcatattgtactggtgatagctgacactgttgggttacccatgtattgccacgatgtctatatatcatgtgtaaagaatttgtaataagacacataaatatatgttctattgattagatgagcgcgaa

SEQ ID NO: 6499 - DNA, 2733 bp, Zea Mays
cgaacaggaagcgcaaccgaaaaacctacggcgacagatctccacccaaacatctcaccagtcgacagtagtcatcagccgtctaacaaaaccgttaaacggacggaccatcgtcccgggcagacccgccgaacgacggtcgacggcagaggcaaaaccctcaccttcctccgtgggggcgatggcggcgccggaatcggaatgcggcgggagtgacggctaccgcgacctccgcggcgtgcgcgtcgacctggacacgggagcggcccgagccggtgggggaggaggcttcgccgtctccttctggctctacctgtccgtctccgccagaccgtcctcggtgatcctccaccagatcacagcgggagatgacaccaagttgccgtttcttgctttaggtgaaggaaacaaactgcttctcttcccgttgatgaggctgcacagggaagctcctgctcctgctagttcgtacccatggactgacacaaccaatctatcatctacgagtgtatgccctcttgagaaatggttccacattgggtgtgagatgaaaaaaaacacaacatgcagcatccatcaagagctttatttcctggttactgaaaatgttatgcgtcttcacgttgatggtttcctaactgctgaggcccccctttgttcactgtttgatgagccagacagtcaggatgattcaaaccaaattagcttagttggaaatgatggcaagcttgaaggctatatctataatatcgaggtttcatatgtactaggagctataaaagaacaatacacaaagaacccaccatttaagttatctattgactattcatgctctgatggaatcgaagagggtgatgacggcatttggagcatcgttggtgggaaggcatcttgccggagaaatttcattttggaagtagtactaaccaacgcttttggtgaacctgtgaaggataaagaggtcgtttcttcacttgtctatgctgatgatggaacagtagttgcaaaatcaagggatgattctgagcctcctttgcttattacttgcgaaggacttgaatatgcagcgataagcaggcctctaccaattatacgtgggcgagcactatttaaactcaagatatctcagctctcttccaaatgtgacaataagctcttccgtattaaattctctacacttcacatgcaaagatattcttttctggaagcatattccaaaccgattcgctgtatatctcgaagccgcactgtccgccccttgggtcctacaaagcgggcgagttctgcaacagcaaatgaaattgacatgctcagtaatggccaagggtttgttagtactgacaaagtaaatagtcgtggacattcagtgtgtctgcatacgcccatgtttcccaagatagaagatggaatggtggaggtagtagaggcccacaaaatagtatcacagaataagaatgccagaaaagtggtagtaagcaaagaagcacagaatgtaatagggactgattcctcaacatccaactatgacagctttgattcaggaagttcttggagtggatcagaaggagatgatggtattgaaaccttttcagacgctgtggttttcagatactgtctagacagcacatatgaccggtcaaagtttcttagaggtgcatctcttactgttaacaaagatgacttggtaaaacttgcagaccgagtctcgttgtatagtggatgctcccaccacagaaaccaaatattaatgtcgaagagattgctcagagagggtgctgacacttggaacatgatctcaaagaacaatgaacgtgctctttggtcatctgccattccagagatcataacaaaatttacgaacattgcccattctgtgcgtaggggtttatcagagcagtattcactgtttcaggatcttgaggttttaagaggcattgctggttgtggtgaggacataggaagagatgaatttgataggctatggtgctggttatacccagtggctgtttcattatcgagagagagaattaaaaagctgtgggattgcacagcacctagatggatagagggcttgattacaacagaagaagctgagagtgcactaagaagttccagggaattgttaaaggaggcaggaacatttgttctcagatttcctatcacccgaagctggccacatccagatgctggaagcctagttgtcacttacattggctctgatagctcaattcatcataggctactctctcttgattccagtgatgctagcgctgagaaactgcaagatttgctgctccaggaaccggaactatcacaattgggcagggttgatcgggtctcaatcaccatccggagatgaccgaggcttcaaacggttaaacttacattcaaaagcaggatttaggatgctgccacgagaagagggtcagcagcagctcgacgcatacaagttcattgtcatccaagagcatagcccataacacccattgcctgttttttttttgaatcaaacacccattgcctgttgttaccatgtacaggttgtaaattggttcccttggtagtttagttcgtacaaagagaggtactagtgaggtctagttgcttcagaaaaccaacagtaacatgagctaccatgtgtgtcgcaaaaagaaagaagctgtcatcatgtgcctcgaaactggaggattttcagtggctaacatgttgcatatagaattgacagttgattta

SEQ ID NO: 6500 - DNA, 2637 bp, Zea Mays
cgaacaggaagcgcaaccgaaaaacctacggcgacagatctccacccaaacatctcaccagtcgacagtagtcatcagccgtctaacaaaaccgttaaacggacggaccatcgtcccgggcagacccgccgaacgacggtcgacggcagaggcaaaaccctcaccttcctccgtgggggcgatggcggcgccggaatcggaatgcggcgggagtgacggctaccgcgacctccgcggcgtgcgcgtcgacctggacacgggagcggcccgagccggtgggggaggaggcttcgccgtctccttctggctctacctgtccgtctccgccagaccgtcctcggtgatcctccaccagatcacagcgggagatgacaccaagttgccgtttcttgctttaggtgaaggaaacaaactgcttctcttcccgttgatgaggctgcacagggaagctcctgctcctgctagttcgtacccatggactgacacaaccaatctatcatctacgagtgtatgccctcttgagaaatggttccacattgggtgtgaggttactgaaaatgttatgcgtcttcacgttgatggtttcctaactgctgaggcccccctttgttcactgtttgatgagccagacagtcaggatgattcaaaccaaattagcttagttggaaatgatggcaagcttgaaggctatatctataatatcgaggtttcatatgtactaggagctataaaagaacaatacacaaagaacccaccatttaagttatctattgactattcatgctctgatggaatcgaagagggtgatgacggcatttggagcatcgttggtgggaaggcatcttgccggagaaatttcattttggaagtagtactaaccaacgcttttggtgaacctgtgaaggataaagaggtcgtttcttcacttgtctatgctgatgatggaacagtagttgcaaaatcaagggatgattctgagcctcctttgcttattacttgcgaaggacttgaatatgcagcgataagcaggcctctaccaattatacgtgggcgagcactatttaaactcaagatatctcagctctcttccaaatgtgacaataagctcttccgtattaaattctctacacttcacatgcaaagatattcttttctggaagcatattccaaaccgattcgctgtatatctcgaagccgcactgtccgccccttgggtcctacaaagcgggcgagttctgcaacagcaaatgaaattgacatgctcagtaatggccaagggtttgttagtactgacaaagtaaatagtcgtggacattcagtgtgtctgcatacgcccatgtttcccaagatagaagatggaatggtggaggtagtagaggcccacaaaatagtatcacagaataagaatgccagaaaagtggtagtaagcaaagaagcacagaatgtaatagggactgattcctcaacatccaactatgacagctttgattcaggaagttcttggagtggatcagaaggagatgatggtattgaaaccttttcagacgctgtggttttcagatactgtctagacagcacatatgaccggtcaaagtttcttagaggtgcatctcttactgttaacaaagatgacttggtaaaacttgcagaccgagtctcgttgtatagtggatgctcccaccacagagagggtgctgacacttggaacatgatctcaaagaacaatgaacgtgctctttggtcatctgccattccagagatcataacaaaatttacgaacattgcccattctgtgcgtaggggtttatcagagcaggatcttgaggttttaagaggcattgctggttgtggtgaggacataggaagagatgaatttgataggctatggtgctggttatacccagtggctgtttcattatcgagagagagaattaaaaagctgtgggattgcacagcacctagatggatagagggcttgattacaacagaagaagctgagagtgcactaagaagttccagggaattgttaaaggaggcaggaacatttgttctcagatttcctatcacccgaagctggccacatccagatgctggaagcctagttgtcacttacattggctctgatagctcaattcatcataggctactctctcttgattccagtgatgctagcgctgagaaactgcaagatttgctgctccaggaaccggaactatcacaattgggcagggttgatcgggtctcaatcaccatccggagatgaccgaggcttcaaacggttaaacttacattcaaaagcaggatttaggatgctgccacgagaagagggtcagcagcagctcgacgcatacaagttcattgtcatccaagagcatagcccataacacccattgcctgttttttttttgaatcaaacacccattgcctgttgttaccatgtacaggttgtaaattggttcccttggtagtttagttcgtacaaagagaggtactagtgaggtctagttgcttcagaaaaccaacagtaacatgagctaccatgtgtgtcgcaaaaagaaagaagctgtcatcatgtgcctcgaaactggaggattttcagtggctaacatgttgcatatagaattgacagttgattta

SEQ ID NO: 6501 - DNA, 2857 bp, Zea Mays
cgaacaggaagcgcaaccgaaaaacctacggcgacagatctccacccaaacatctcaccagtcgacagtagtcatcagccgtctaacaaaaccgttaaacggacggaccatcgtcccgggcagacccgccgaacgacggtcgacggcagaggcaaaaccctcaccttcctccgtgggggcgatggcggcgccggaatcggaatgcggcgggagtgacggctaccgcgacctccgcggcgtgcgcgtcgacctggacacgggagcggcccgagccggtgggggaggaggcttcgccgtctccttctggctctacctgtccgtctccgccagaccgtcctcggtgatcctccaccagatcacagcgggagatgacaccaagttgccgtttcttgctttaggtgaaggaaacaaactgcttctcttcccgttgatgaggctgcacagggaagctcctgctcctgctagttcgtacccatggactgacacaaccaatctatcatctacgagtgtatgccctcttgagaaatggttccacattgggtgtgaggtatgatgcaaataactgtaggcatcccccccttacccccttgcatttgtagcccgcaaatgaaagtgcaaatggcaacatgtttggcactttcccctgctcttatttcttttgtgtttgtgtgtacctctatttttagatgaaaaaaaacacaacatgcagcatccatcaagagctttatttcctggttactgaaaatgttatgcgtcttcacgttgatggtttcctaactgctgaggcccccctttgttcactgtttgatgagccagacagtcaggatgattcaaaccaaattagcttagttggaaatgatggcaagcttgaaggctatatctataatatcgaggtttcatatgtactaggagctataaaagaacaatacacaaagaacccaccatttaagttatctattgactattcatgctctgatggaatcgaagagggtgatgacggcatttggagcatcgttggtgggaaggcatcttgccggagaaatttcattttggaagtagtactaaccaacgcttttggtgaacctgtgaaggataaagaggtcgtttcttcacttgtctatgctgatgatggaacagtagttgcaaaatcaagggatgattctgagcctcctttgcttattacttgcgaaggacttgaatatgcagcgataagcaggcctctaccaattatacgtgggcgagcactatttaaactcaagatatctcagctctcttccaaatgtgacaataagctcttccgtattaaattctctacacttcacatgcaaagatattcttttctggaagcatattccaaaccgattcgctgtatatctcgaagccgcactgtccgccccttgggtcctacaaagcgggcgagttctgcaacagcaaatgaaattgacatgctcagtaatggccaagggtttgttagtactgacaaagtaaatagtcgtggacattcagtgtgtctgcatacgcccatgtttcccaagatagaagatggaatggtggaggtagtagaggcccacaaaatagtatcacagaataagaatgccagaaaagtggtagtaagcaaagaagcacagaatgtaatagggactgattcctcaacatccaactatgacagctttgattcaggaagttcttggagtggatcagaaggagatgatggtattgaaaccttttcagacgctgtggttttcagatactgtctagacagcacatatgaccggtcaaagtttcttagaggtgcatctcttactgttaacaaagatgacttggtaaaacttgcagaccgagtctcgttgtatagtggatgctcccaccacagaaaccaaatattaatgtcgaagagattgctcagagagggtgctgacacttggaacatgatctcaaagaacaatgaacgtgctctttggtcatctgccattccagagatcataacaaaatttacgaacattgcccattctgtgcgtaggggtttatcagagcaggatcttgaggttttaagaggcattgctggttgtggtgaggacataggaagagatgaatttgataggctatggtgctggttatacccagtggctgtttcattatcgagagagagaattaaaaagctgtgggattgcacagcacctagatggatagagggcttgattacaacagaagaagctgagagtgcactaagaagttccagggaattgttaaaggaggcaggaacatttgttctcagatttcctatcacccgaagctggccacatccagatgctggaagcctagttgtcacttacattggctctgatagctcaattcatcataggctactctctcttgattccagtgatgctagcgctgagaaactgcaagatttgctgctccaggaaccggaactatcacaattgggcagggttgatcgggtctcaatcaccatccggagatgaccgaggcttcaaacggttaaacttacattcaaaagcaggatttaggatgctgccacgagaagagggtcagcagcagctcgacgcatacaagttcattgtcatccaagagcatagcccataacacccattgcctgttttttttttgaatcaaacacccattgcctgttgttaccatgtacaggttgtaaattggttcccttggtagtttagttcgtacaaagagaggtactagtgaggtctagttgcttcagaaaaccaacagtaacatgagctaccatgtgtgtcgcaaaaagaaagaagctgtcatcatgtgcctcgaaactggaggattttcagtggctaacatgttgcatatagaattgacagttgattta

SEQ ID NO: 6502 - DNA, 382 bp, Zea Mays
gatttacatgccagcaacataacaaccttgaagctcaaggcagccttggaattgaagaccaaaatctacagtcttttgagtcaccaccgaaaagggctaggcgcaaatctttaaaatttgattgcgatgaggatgcatccgataaggataaatgtatgactatttcattcacttcctgcattgtatgtaaaggctatttccccccactgtgcaactgccctcaagacacacatgctaattactgttgctcaaagttaaacaaacaatgccaaacatctaatgacaatagcttttcttacagtcaaataagttaatttaaaatttggagaatcaaatactaacttaccaaaattacaactgcaatggaaaatgacttacaaag

SEQ ID NO: 6503 - DNA, 2607 bp, Zea Mays
caaaaacggtggtggggtttctgtttctttaagatttataggaagatagtgttaggcagcccttattggtgggcaggagtatattattgctcgaggtaggaggagagccaggggttgttagaacaagtccagtctagagagggagcgaaccaaaagggagaaataacaaaaaaagaatagagacacacacacacagctctgttcttcttattccaatcctctctcatcttgctggttcatccttgggatcggctctgtcgtcccctagctagttcgttcggtgctgtggtttctgccgctgtatccaagaactcttgctcttgctgagtctgggacttcagttcctcgcagagccaggctttacatatcttgggtgccgcacacagtatctatgcacctttgacaacaccaatctgattctgatgacaacaacagccactatctcccgtcatccttgcatcgatctgtcagctggcgtcgcctcgtgcttctgaagacgatggccacattcttctccacttccacgaaccagagggacctcgccggaggcggcggcgacatgtcgtcgttccaccactacgcctactcggacccaccagccggcggcctcatgcctttccccgccaccatcgtgtcgtcggaaggccacgtcgcgcacggcggtgacgacggcggcaggggcgcgttcgtggacgtgaacgcgagggacgggccgacgggcggcgccgagatgggcctgcagacgcagctgctcatggcgaacgccgcgtcggcggtgcagcaccaggggctgtcgcttagccttggcacgcagggggtgccggtgtctctttaccagtaccgccaggcggaggcaggcatggccgccgccgcctttctaagcccgaaccaggcgtcggtggcggcgaccaggagcgcgcagagcatctacgtccagaactccaggtacctcaaggccgcgagggagctgctggacgaggtggtcaacgtccaggacgcgatcaagcggaagggggacaagagccagcagggcaaggattccggcggcggcggcggtggcggcgagggcaaggacgccgagacgagcgacgagaaggctggcgagcacgaggggaactcctccgcgccggagctgtcgccgtcggagaggcaggacctccagaacaaagtgtcggcactgatggcgctgctggatcaggtggaccgcaagtacaggcactaccaccaccagatgcagatggtgatgtcgtccttcgacgcggtggccggcgccggcgcggcgaggccgtacacggcgctggcgctgcagaccatctcgcggcacttccggtcgctgcgcgacgccgtcggcgcgcaggtgcagtcgctgcggcggagcctgggcgagaaggacgggtccgcgcagggaggcgggctgccccggctgcgctacatcgaccagcagctgcggcagcagcgcgccatgcagcagttcggcatgatgcagcagccgcagcacgcctggcgcccgcagcgcggcctcccggagtccgccgtctccgtgctccgcgcctggctcttcgagcatttcctccacccgtacccgaaagattccgagaagctgatgctcgctaggcaaacaggcttgtctaggggtcaggtgtccaactggttcatcaacgcgcgcgttcgactgtggaagccgatgatcgaggagatgtacagggaagagttcggggcggagatggactcgcactcgtcgtcggagaacgcggcgggcaacaagggcaaggacgaggcgatatcctcggaggaccacgaggagttccagagcccgtcgagcgccgccgcggccgcagtgccactgccaggccacctcagcgcgttcaagtcggaggcgatcggtgtcatggacgccgccggcattggagcgagctccagcctcgacggcgccgtcatcggcccgtacgcgacgagcctcaacctcggcggcggcggcggcatcctgcaggaggccctcgcgcaccaccaccaccaccacggcggcgccgacgcgaggttcgtgcaggcgtacggcgacatggccggcttcggcggctacgacggcggcagcgtgtcgctgactctgggcctgcagcactgcaacgaggccggcgccggagccggccccgctgagccgcaggccctcctgtacggcagcgccggcgacttcgacttcatcagcggctccgaggacaggcagcggttcgggtcgtcgcagctgctgcacgattttgtggcgtgagcggctggactggacgtcgttggggaataacgtgcgcggacggcgtcagaagcctgggatggccggccggcgccgccgcgggtatacctaccaaccatatgatggccgtacgtcatggtacatggtctcaaattaaccagcaaggttaagcatgcatatatatacatacacatatatatataaggtgtggtaagtgaggtagcataagcagggtaagcagctgtatcagttgttcagttcagcgctaacaacaacgcagaaacattaagcatactactctgcttttctatacatatataaactcatgatttgaaccttattgtgacatctgatctgagacagat

SEQ ID NO: 6504 - DNA, 2947 bp, Zea Mays
cttgcacagcgtttggataatcctgtattctaagctaaaaaaagtttccgacgaaaaaaaatctggatgtgggaaggactgattcagaaggctaaagatggaggcttggatgtgattcagacctatgtcttttggaacggacatgagcctacgcctggaaattactatttcgaagagaggtacgatttggtcaggttcgtaaagacggtccagaaggccggcctgtttgtacatctccgcatcggcccctacatctgcggcgagtggaacttcggtggcttcccagtttggttgaagtatgtaccaggcatcagcttcaggacagacaacgaacctttcaagacggcaatgcagggtttcactgagaaaattgttggaatgatgaagagcgaaaacctctttgcatcccaaggtggcccaattatcctctctcagattgagaatgagtatgggccagaaggcaaggagtttggtgccgcaggtcaggcatatatcaactgggcagcaaagatggcagtgggactggacactggtgtgccgtgggtgatgtgcaaggaggaggatgcacctgatccagtgatcaatgcgtgtaatggtttctactgtgatgcattttctcctaacaaaccttacaagcccacaatgtggactgaagcttggagtggctggttcacagaatttggtgggaccatccgccaacgaccggttgaagatctcgcatttgctgttgctcgatttgtacaaaagggtggctcttttatcaattactacatgtatcatggaggaacaaattttggacgcactgctgggggtcccttcatcacaacaagctatgattatgatgctccaattgatgaatatggacttattagagaaccaaagcacagtcatcttaaagaactccacagagctgttaagttatgtgaacaggctttggtttctgttgaccccacaattactacccttggaactatgcaagaggcccatgtcttccgatctccatctggttgtgcagctttccttgcaaactacaattctaactcccatgcaaaagttgtgttcaacaatgagcaatacagcctcccaccttggtcaattagcatccttcctgattgcaagaatgtagtttttaacagtgccacagttggtgttcagacatctcagatgcaaatgtggggagatggtgccacatcgatgatgtgggagaggtacgatgaggaggttgattctctggcagctgctccattgctcaccacaactggtttgcttgagcagcttaacgtcaccagagacagcagtgattatctgtggtacattaccagtgttgacataagcccatctgaaaactttctacaaggtggtggcaagcctccgtctctgagtgttcagtctgctggtcacgccttgcatgtctttgtcaacggacaacttcaaggttcttcgtatggtaccagggaggatcgaagaattaaatataatggcaatgttaaccttcgagctggtactaacaaaatcgcactactgagtgttgcttgcggattgccgaatgttggagtgcattatgagacgtggaacaccggcgtcggtggtcctgtcgtgcttcatggattgaatgaaggttcgcgagaccttacttggcagacctggtcctatcaggttggcctgaaaggcgagcagatgaatctgaactccgtagaaggctcaggctcagttgaatggatgcaagggtcactgatagctcagaagcaacagccgttggcctggtataaggcttacttcgagactcccagcggggacgagccattggctttggatatgggcagcatgggcaagggacaggtctggataaacggacaaagcattggacgctactggacagcgtatgcagacggggactgcaaagggtgcagctacaccgggaccttccgggcacccaagtgccaagcaggctgcggccagcccacccagcgttggtaccatgtgccaaggtcctggctgcagcccagcagaaacctactggtagtcttggaggaactgggtggtggggactcgtcgaagatcgccctagccaagaggtcggtctcgagcgtctgtgccgacgtgtccgaggaccatccgaacatcaagaagtggcagatcgagagctacggcgagcgcgagcaccgcagggccaaggtgcacctgaggtgcgcgcacgggcagtccatctccgcgatcagattcgcgagcttcgggacgcctgtgggcacctgcggcaacttccagcagggaggctgccactcggctagctctcacgctgtgctagagaagagatgcattgggctccagagatgcgtcgtcgccatctcccccgacaacttcggaggagacccctgcccgagcgtgacgaagagggtggcggtcgaggcggtgtgctctcccgccgcttaggcttagcctgcccgcccgcccctacttctccgactcaccgagcaacggatttgaaggccgaaaccgatgtgtgtggagagtggaactgtaagtatcgacttgcattggtcggagggaggtttagcattcgtccgtctgattccggattaggattggtgctctgctacgtctccatgaactgttcaaagcggccagctgggtccagggatggagctgtagagagagtaggagtagaagactgatcatgcgttcttttgctgttgtgtgttagtagtagctgtgtacctacccgtgacacatctcgtttttcttgaaacggaggaagacgcaggtgaagcgtgcatcgtgcctttgttgttgcaattgtgttgtgtgtggtgggggaggaaaaaaaaagaacaggctttgatgttctcagaagctcaagttcagatctgatagtgcatggaaaatcatgaaccctgaggaatcgattttcgcactctgatttgtaatgctgtactgtaattagacagac

SEQ ID NO: 6505 - DNA, 3175 bp, Zea Mays
ctcccactgtcgccctctcccaagaacccgcccaaagaatcctagaatccaagaagaagggcagcaacaaaaaacaaggggcggggggggctgcaggtctgagggcggagggggaggaggtggtgctgccgtgctggaagaccagtgtgtgaagaccacacagagtctctcgcgcacccggtgtgctgtgctgtggtcttcctctttgaccgccttctcggagcggggagtttggccatggggaggcggattctcttctccggatccatacactaccccaggagcacccctgatatgtgggaaggactgattcagaaggctaaagatggaggcttggatgtgattcagacctatgtcttttggaacggacatgagcctacgcctggaaattactatttcgaagagaggtacgatttggtcaggttcgtaaagacggtccagaaggccggcctgtttgtacatctccgcatcggcccctacatctgcggcgagtggaacttcggtggcttcccagtttggttgaagtatgtaccaggcatcagcttcaggacagacaacgaacctttcaagacggcaatgcagggtttcactgagaaaattgttggaatgatgaagagcgaaaacctctttgcatcccaaggtggcccaattatcctctctcagattgagaatgagtatgggccagaaggcaaggagtttggtgccgcaggtcaggcatatatcaactgggcagcaaagatggcagtgggactggacactggtgtgccgtgggtgatgtgcaaggaggaggatgcacctgatccagtgatcaatgcgtgtaatggtttctactgtgatgcattttctcctaacaaaccttacaagcccacaatgtggactgaagcttggagtggctggttcacagaatttggtgggaccatccgccaacgaccggttgaagatctcgcatttgctgttgctcgatttgtacaaaagggtggctcttttatcaattactacatgtatcatggaggaacaaattttggacgcactgctgggggtcccttcatcacaacaagctatgattatgatgctccaattgatgaatatggacttattagagaaccaaagcacagtcatcttaaagaactccacagagctgttaagttatgtgaacaggctttggtttctgttgaccccacaattactacccttggaactatgcaagaggcccatgtcttccgatctccatctggttgtgcagctttccttgcaaactacaattctaactcccatgcaaaagttgtgttcaacaatgagcaatacagcctcccaccttggtcaattagcatccttcctgattgcaagaatgtagtttttaacagtgccacagttggtgttcagacatctcagatgcaaatgtggggagatggtgccacatcgatgatgtgggagaggtacgatgaggaggttgattctctggcagctgctccattgctcaccacaactggtttgcttgagcagcttaacgtcaccagagacagcagtgattatctgtggtacattaccagtgttgacataagcccatctgaaaactttctacaaggtggtggcaagcctccgtctctgagtgttcagtctgctggtcacgccttgcatgtctttgtcaacggacaacttcaaggttcttcgtatggtaccagggaggatcgaagaattaaatataatggcaatgttaaccttcgagctggtactaacaaaatcgcactactgagtgttgcttgcggattgccgaatgttggagtgcattatgagacgtggaacaccggcgtcggtggtcctgtcgtgcttcatggattgaatgaaggttcgcgagaccttacttggcagacctggtcctatcaggttggcctgaaaggcgagcagatgaatctgaactccgtagaaggctcaggctcagttgaatggatgcaagggtcactgatagctcagaagcaacagccgttggcctggtataaggcttacttcgagactcccagcggggacgagccattggctttggatatgggcagcatgggcaagggacaggtctggataaacggacaaagcattggacgctactggacagcgtatgcagacggggactgcaaagggtgcagctacaccgggaccttccgggcacccaagtgccaagcaggctgcggccagcccacccagcgttggtaccatgtgccaaggtcctggctgcagcccagcagaaacctactggtagtcttggaggaactgggtggtggggactcgtcgaagatcgccctagccaagaggtcggtctcgagcgtctgtgccgacgtgtccgaggaccatccgaacatcaagaagtggcagatcgagagctacggcgagcgcgagcaccgcagggccaaggtgcacctgaggtgcgcgcacgggcagtccatctccgcgatcagattcgcgagcttcgggacgcctgtgggcacctgcggcaacttccagcagggaggctgccactcggctagctctcacgctgtgctagagaagagatgcattgggctccagagatgcgtcgtcgccatctcccccgacaacttcggaggagacccctgcccgagcgtgacgaagagggtggcggtcgaggcggtgtgctctcccgccgcttaggcttagcctgcccgcccgcccctacttctccgactcaccgagcaacggatttgaaggccgaaaccgatgtgtgtggagagtggaactgtaagtatcgacttgcattggtcggagggaggtttagcattcgtccgtctgattccggattaggattggtgctctgctacgtctccatgaactgttcaaagcggccagctgggtccagggatggagctgtagagagagtaggagtagaagactgatcatgcgttcttttgctgttgtgtgttagtagtagctgtgtacctacccgtgacacatctcgtttttcttgaaacggaggaagacgcaggtgaagcgtgcatcgtgcctttgttgttgcaattgtgttgtgtgtggtgggggaggaaaaaaaaagaacaggctttgatgttctcagaagctcaagttcagatctgatagtgcatggaaaatcatgaaccctgaggaatcgattttcgcactctgatttgtaatgctgtactgtaattagacagac

SEQ ID NO: 6506 - DNA, 3091 bp, Zea Mays
gtgcctcactgcctctgccaccgtacatagactacagagacacacgggccgcggcttcccacagtctcttttttttttccacccgtcttttctctttcctccgtcttctcccacttgttgtagggcctgggtgggaggagtcaggacaggaggcagcacagccattataatagcacgccatacgccaaaagctgcagtggagccgagcagatgtgggaaggactgattcagaaggctaaagatggaggcttggatgtgattcagacctatgtcttttggaacggacatgagcctacgcctggaaattactatttcgaagagaggtacgatttggtcaggttcgtaaagacggtccagaaggccggcctgtttgtacatctccgcatcggcccctacatctgcggcgagtggaacttcggtggcttcccagtttggttgaagtatgtaccaggcatcagcttcaggacagacaacgaacctttcaagacggcaatgcagggtttcactgagaaaattgttggaatgatgaagagcgaaaacctctttgcatcccaaggtggcccaattatcctctctcagattgagaatgagtatgggccagaaggcaaggagtttggtgccgcaggtcaggcatatatcaactgggcagcaaagatggcagtgggactggacactggtgtgccgtgggtgatgtgcaaggaggaggatgcacctgatccagtgatcaatgcgtgtaatggtttctactgtgatgcattttctcctaacaaaccttacaagcccacaatgtggactgaagcttggagtggctggttcacagaatttggtgggaccatccgccaacgaccggttgaagatctcgcatttgctgttgctcgatttgtacaaaagggtggctcttttatcaattactacatgtatcatggaggaacaaattttggacgcactgctgggggtcccttcatcacaacaagctatgattatgatgctccaattgatgaatatggacttattagagaaccaaagcacagtcatcttaaagaactccacagagctgttaagttatgtgaacaggctttggtttctgttgaccccacaattactacccttggaactatgcaagaggcccatgtcttccgatctccatctggttgtgcagctttccttgcaaactacaattctaactcccatgcaaaagttgtgttcaacaatgagcaatacagcctcccaccttggtcaattagcatccttcctgattgcaagaatgtagtttttaacagtgccacagttggtgttcagacatctcagatgcaaatgtggggagatggtgccacatcgatgatgtgggagaggtacgatgaggaggttgattctctggcagctgctccattgctcaccacaactggtttgcttgagcagcttaacgtcaccagagacagcagtgattatctgtggtacattaccagtgttgacataagcccatctgaaaactttctacaaggtggtggcaagcctccgtctctgagtgttcagtctgctggtcacgccttgcatgtctttgtcaacggacaacttcaaggttcttcgtatggtaccagggaggatcgaagaattaaatataatggcaatgttaaccttcgagctggtactaacaaaatcgcactactgagtgttgcttgcggattgccgaatgttggagtgcattatgagacgtggaacaccggcgtcggtggtcctgtcgtgcttcatggattgaatgaaggttcgcgagaccttacttggcagacctggtcctatcaggttggcctgaaaggcgagcagatgaatctgaactccgtagaaggctcaggctcagttgaatggatgcaagggtcactgatagctcagaagcaacagccgttggcctggtataaggcttacttcgagactcccagcggggacgagccattggctttggatatgggcagcatgggcaagggacaggtctggataaacggacaaagcattggacgctactggacagcgtatgcagacggggactgcaaagggtgcagctacaccgggaccttccgggcacccaagtgccaagcaggctgcggccagcccacccagcgttggtaccatgtgccaaggtcctggctgcagcccagcagaaacctactggtagtcttggaggaactgggtggtggggactcgtcgaagatcgccctagccaagaggtcggtctcgagcgtctgtgccgacgtgtccgaggaccatccgaacatcaagaagtggcagatcgagagctacggcgagcgcgagcaccgcagggccaaggtgcacctgaggtgcgcgcacgggcagtccatctccgcgatcagattcgcgagcttcgggacgcctgtgggcacctgcggcaacttccagcagggaggctgccactcggctagctctcacgctgtgctagagaagagatgcattgggctccagagatgcgtcgtcgccatctcccccgacaacttcggaggagacccctgcccgagcgtgacgaagagggtggcggtcgaggcggtgtgctctcccgccgcttaggcttagcctgcccgcccgcccctacttctccgactcaccgagcaacggatttgaaggccgaaaccgatgtgtgtggagagtggaactgtaagtatcgacttgcattggtcggagggaggtttagcattcgtccgtctgattccggattaggattggtgctctgctacgtctccatgaactgttcaaagcggccagctgggtccagggatggagctgtagagagagtaggagtagaagactgatcatgcgttcttttgctgttgtgtgttagtagtagctgtgtacctacccgtgacacatctcgtttttcttgaaacggaggaagacgcaggtgaagcgtgcatcgtgcctttgttgttgcaattgtgttgtgtgtggtgggggaggaaaaaaaaagaacaggctttgatgttctcagaagctcaagttcagatctgatagtgcatggaaaatcatgaaccctgaggaatcgattttcgcactctgatttgtaatgctgtactgtaattagacagac

SEQ ID NO: 6507 - DNA, 2930 bp, Zea Mays
ctctgcctcacgacgatgctgcatgcccgcccgccgaccgacttcaatgatgtgggaaggactgattcagaaggctaaagatggaggcttggatgtgattcagacctatgtcttttggaacggacatgagcctacgcctggaaattactatttcgaagagaggtacgatttggtcaggttcgtaaagacggtccagaaggccggcctgtttgtacatctccgcatcggcccctacatctgcggcgagtggaacttcggtggcttcccagtttggttgaagtatgtaccaggcatcagcttcaggacagacaacgaacctttcaagacggcaatgcagggtttcactgagaaaattgttggaatgatgaagagcgaaaacctctttgcatcccaaggtggcccaattatcctctctcagattgagaatgagtatgggccagaaggcaaggagtttggtgccgcaggtcaggcatatatcaactgggcagcaaagatggcagtgggactggacactggtgtgccgtgggtgatgtgcaaggaggaggatgcacctgatccagtgatcaatgcgtgtaatggtttctactgtgatgcattttctcctaacaaaccttacaagcccacaatgtggactgaagcttggagtggctggttcacagaatttggtgggaccatccgccaacgaccggttgaagatctcgcatttgctgttgctcgatttgtacaaaagggtggctcttttatcaattactacatgtatcatggaggaacaaattttggacgcactgctgggggtcccttcatcacaacaagctatgattatgatgctccaattgatgaatatggacttattagagaaccaaagcacagtcatcttaaagaactccacagagctgttaagttatgtgaacaggctttggtttctgttgaccccacaattactacccttggaactatgcaagaggcccatgtcttccgatctccatctggttgtgcagctttccttgcaaactacaattctaactcccatgcaaaagttgtgttcaacaatgagcaatacagcctcccaccttggtcaattagcatccttcctgattgcaagaatgtagtttttaacagtgccacagttggtgttcagacatctcagatgcaaatgtggggagatggtgccacatcgatgatgtgggagaggtacgatgaggaggttgattctctggcagctgctccattgctcaccacaactggtttgcttgagcagcttaacgtcaccagagacagcagtgattatctgtggtacattaccagtgttgacataagcccatctgaaaactttctacaaggtggtggcaagcctccgtctctgagtgttcagtctgctggtcacgccttgcatgtctttgtcaacggacaacttcaaggttcttcgtatggtaccagggaggatcgaagaattaaatataatggcaatgttaaccttcgagctggtactaacaaaatcgcactactgagtgttgcttgcggattgccgaatgttggagtgcattatgagacgtggaacaccggcgtcggtggtcctgtcgtgcttcatggattgaatgaaggttcgcgagaccttacttggcagacctggtcctatcaggttggcctgaaaggcgagcagatgaatctgaactccgtagaaggctcaggctcagttgaatggatgcaagggtcactgatagctcagaagcaacagccgttggcctggtataaggcttacttcgagactcccagcggggacgagccattggctttggatatgggcagcatgggcaagggacaggtctggataaacggacaaagcattggacgctactggacagcgtatgcagacggggactgcaaagggtgcagctacaccgggaccttccgggcacccaagtgccaagcaggctgcggccagcccacccagcgttggtaccatgtgccaaggtcctggctgcagcccagcagaaacctactggtagtcttggaggaactgggtggtggggactcgtcgaagatcgccctagccaagaggtcggtctcgagcgtctgtgccgacgtgtccgaggaccatccgaacatcaagaagtggcagatcgagagctacggcgagcgcgagcaccgcagggccaaggtgcacctgaggtgcgcgcacgggcagtccatctccgcgatcagattcgcgagcttcgggacgcctgtgggcacctgcggcaacttccagcagggaggctgccactcggctagctctcacgctgtgctagagaagagatgcattgggctccagagatgcgtcgtcgccatctcccccgacaacttcggaggagacccctgcccgagcgtgacgaagagggtggcggtcgaggcggtgtgctctcccgccgcttaggcttagcctgcccgcccgcccctacttctccgactcaccgagcaacggatttgaaggccgaaaccgatgtgtgtggagagtggaactgtaagtatcgacttgcattggtcggagggaggtttagcattcgtccgtctgattccggattaggattggtgctctgctacgtctccatgaactgttcaaagcggccagctgggtccagggatggagctgtagagagagtaggagtagaagactgatcatgcgttcttttgctgttgtgtgttagtagtagctgtgtacctacccgtgacacatctcgtttttcttgaaacggaggaagacgcaggtgaagcgtgcatcgtgcctttgttgttgcaattgtgttgtgtgtggtgggggaggaaaaaaaaagaacaggctttgatgttctcagaagctcaagttcagatctgatagtgcatggaaaatcatgaaccctgaggaatcgattttcgcactctgatttgtaatgctgtactgtaattagacagac

SEQ ID NO: 6508 - DNA, 1015 bp, Zea Mays
cggcggtgctggagaacgtagagatggcaatgagtaccggtgagttttttaaacccggtgtggcctcgtttgggagcaggtaccaggccacaccggccagccacaaccggcagggacaatacctgcactgttactgttgttccctagtgtggtacagtccccaggggcacatgtgccctatgtctgtttggcatatattactgcgggtaacaaataagcaagcagtacaggtaacaaaaatcatccaatagcaatgccaaaaatacaatgtagcaaatatctcaaattttcaatagcaaatagttctgatcgcaaatgttctactgaaattggtcgtgcaacaaaatatctctgtcctcaacacacaatgagatacgtgctgctattgaattataatattggttgcaggacccatgacagatctaattataatattgatgggcaagtgcagtaaggaaaagtcttaaataagaaaagaaattacactatcttattcaatgggaaagctacacaacatgtcgtactcagtctgtattctcttcgcacaagcatgcaaccatgggccatggcgctacgacaccagtgacattgatgtggtctagtgggatactaccagccagagaagccatggatgagctaggactaggattcacacggcatcttggcaggtgcctgtcgtcacaggcccaacgcccgagcgagggaacattaccgtccccatggtggataggaagccaaaggaggcgcgggtgggatgaactggatgctcagaccaagagaggaggagggcggtctgcgcgccggtgacgaacagaagcaaaagaggtggaagctcaccagatcgaagacgaggagtagcgtcttcttcctcagcagtcaacccttggatccgcgtcttcttccttagatccacgtcttcttcttccgaggcggtgggtgaggcaggtgtcaatggcggaggcgatgggtgaaggcggtggtggctgcatctatggatgaaagtggtaatccgaac

SEQ ID NO: 6509 - DNA, 1225 bp, Zea Mays
caaactctcttgtactggctctgatgtagccatcagctctgcttgaaccgctcaattgcataggattagaacaagtcagaggattcgtacaggtatagagaaacatgattaacaatgaaaggtctagagagaaatgaaagaaaaacagggaataaatcatctcccacaggtaagcaaatatttacttttccatcattccatgtggcaatgagttttatttttgtaaggctgagcaatggtatttttcaaattattgacgctgctagtgctatggaaaaccagtgttctaagttccaatgataagagcttttctttatcctctgcttatttacagtttgagaaatgcaaacgatgtgattgctctgcagaagtgttcagtgaaacttaaaaatctgaatgctcctgctaattagaaatacatgcacatactgtctcttgtctcctcttatctaacgaccagaggctatacataaatataaggaccagggttctagcaccacaactgtaatatttccacgagcctatgctatgaatactgacataatacacccaataactcaacttctgatcgggattttgaacataggttatacttatagaaatatagagaattacaaaatattactgcaccgatctgctcatagtaaatcagcaaaatgaaatccagttaatgtttctgtccctcaagatcaaaccttaaagatgagactgcccaattgatagaggcgtgaggatatcagaacatgaccgtaatcgatcaatttcatagttacataaactcactacagaccatggggcaacgaactacgaagtgatctcctactatagttttgttctaaaaacaataaattaggcatattggtaatcttagggctggacaaaattggtgggcatgagttcaatcattagaaaaagtaaagttcattcactctgtttagatgtgtatggcactatggcgcctgccttgcgaacgaggcgtacaaaaaacgttgctttggcgtcataatcacgtggaatcgcttgtggcgggcgctatacggaccgggagcgggaggaagttggagatcgatgggggaacggcgggagtgagagagaaggagcgcgcaagagagattgggaggtttctctcaccagcaagcgtgggagaggaagcagaagtagcagcacgcccgtgccgcccgtcgagaagtagctgtcgccaaagtccaggtcgatctgacggggc

SEQ ID NO: 6510 - DNA, 5591 bp, Zea Mays
tcccatgggccggaagaagcgaacctccgcaccaaaccctactccgccaccgctggacgcctcccgccggtcgccggcggcggcggagaagccagccggcatcggcagggaagatgccgccgtgcgcgccgaggtcgacaaagcgcttgcgtgcctgcagcggggcagccacgcgcgtgcgcagcgcctcacgagggacgccatcgcccgccacggggaggcctcaccgctgctcctgcgggcgcacggcaccgtccacgctcgcgccgcctccgtcctcgacgaccacgccagccgcgcgcgccaccagcgtacagcgctccaggcggcccagcgcgccgtccagctcgcgccggactccatcgagctggcccacttccacgccatgctgctcttcgacgctgccaccgactcccgcgcctacgatgaggtcgtcgctgagtgcgagcgcggcctcagcatcgaggccccctccgaccccgcgccccactccctcaggttgcccggccccgacgtcgaccaggtccagtccgagctccgcaacttgatccagaaggccaacctcgcctccatctcctcttgggtcaaaaacatgggcggcgcgggggacgacaagcttcgcctcatccctgtgcgccgtctagcggacgagccaatggaggcccggcttgtccccacggcgccctccccgcgccgcccaaacgagatcaagaaggcgaccaagaccaccgaggagcgccgccaggagatcgaggtacgcctggctgccatgaggctgctgcagcagcagaaggagcagagcaatgatgttgtgtctgctacccctgcctcttcccggtcacatggagatgatgccccctcatcgtctgagtcatcggtgggcggacatcgagctgaccggagaaaaggtgggtctaggaaagcaacaggctcatccgcgtctgagcgcactgaccaggtgcgtgcctactggggctcgataccagtggagcaaaggcttgcattcttaaacactagcatttctgagctcaagtcacactatgcttctgcaatgcacaaggagaaagatgctgccagtgcagcatctgatgtgctcaatgaggtgatacaatttgccaacaagcatgacaagtgggagttcatggtatgtggtaggtgtcgggagcagtttacacatgtggaggcacaccggtggcatgtcatggttgagcatgttgggctactctcatccgagctgcaggaaatggttccgcaggagattgatgctgactgggcagaaatgctcagtggttgcaactggaggccattggatgctactgccgcactgaaactttttgaggaagatcaacacaacaaccttggaccagatagggaggatgaatcgaattcgttagatagttggagtaacaaagccatggacatgtcagaatcctcagcctggtcacacaacgaggagtctagcggttttggagtggtggtgagggaaggtgacaccaagtggccattctcagatgatgacgaaagggccaagattttagaaagaatccattcatcgttcaaaatccttgtgaagaaccataatctttcagtgcacaatctaaacagggtgattcgatttgctgtagaggaactcagggggttgccatctgggtcactactgcttaatcactctttggacgagtcgccactttgcattcgcttcttggaggcatcatcactgcagaaagtagataatttcttgcaggacttaatgcaggcttctggacttaataggaacttacagaaggctgaaggattaggtgacggggatagtttcatccaaaaccacgatgtactagagaaggttacccttaattctgattcatcagaactgatcattgatgggcacaccttcggcggaaagtttgattccgagagtgttgatactgatgcattgctttcatggctgtacgccggatcttcaattggtgagcagctattggcctggaatcgtatgatcgacgaaaggtcaaatcagtgcgtcgaccttattcgagcacttgggagggagttcaacaacctgcaaaactcatgtgaacggaaacttgaacagctgagaaatgaggatgcctttacttctgtggagggcctcttttgtgaagagcaaacacgaagggagcaggtgggacggtatggattccaaactttcgaggagctcctcaggaagcggcaggagtttttggaacacaacactgaggagcagtccgacagtaacagatctgagatagatgcaatctcagctattttgaaggaacttcacacatcacactttggttatgatgaggcccttactggcatggccccacgcttttctgacttcgatgggggcgaagaagatgaatggaggctgcatgattttatacatccaaatgattcaatggtacacatggttgtatcaaagatgaaggaacatgttactatggagattagcaagatagatgctaagattatgcgaactttatctgtgatgcggcaactagagcacaagcttggacctgtttctgctcttgattatcgaatgattcttttaccccttatgaggtcgttcttgcagagccatttggaagagctggtggataaggatgcgagagagagatctgatgctgcaagggaagccttcttggctgaacttgctttggatgctaagaagaatgcaagcaaagggggtgatatgaaacaatcccatgaaaaatcaaaggataagaagaagtttaaggattctcgtagggcaaaggagttcaaggattcaagctggagcgaccagtctctcattcaccaagacagtgctgacgaggaaacaacagagacatttcaaattcttgctgattgtgatgatctggattgcaaattctccacaagtgatgattacttcaatgaacaagaggaagaacttaggcataaggtacaacttgaagcagaggaacgaaagctggaagagactctggaatatcaacggcggatagaggaggaagcaaagcagaaacatcttgcagaacaatgtagaagtacttatgcatcttctgtaattggtacagctcgtctttcaagcactgggaatcaggataaccatgaaagtgcaatcaatcactcttcccgtacttatctcgaaggcataaagtttggtgattttcgctacaccgagaacaatttcagccagaaacttaatggattggattcatctgatgcacatgcattaaccagcagtgatatgaatgctcctagatggaccagcacttgtaaaatcgctccctacgcaaaccacagctatcaaactggaaaacaaaatcggctacatgtgttgccttcagatgatctgcaatttgctcatagagatcacgctgcaggaacagagaagccaaattttgagaaagtggtgcaataccatcagcggatttgtgcatcaaggatgattttgataaaaggtttcaagaagatcttgatgaagcagtgcgccaaagccttggatacgatgcttatcctgctggtacaataagcacttcaaatgaaacagaagtgtatggcactggccttaaaaatgccgctggtgaatacaattgtttcttgaatgtgattattcagtcattatggcatataaggcggtttcgggacgagttccttaaaacatcatcactgcacaagcatgttgaagatccttgtgctgtctgcgctttatatggtatcttcattgacctgagcaaagcagccaagggacacggagaagctgttgcgcctacttcattgaggatcgctttgagcaaatcctacccgaacagcaaattctttcaggagggccagatgaatgatgcatctgaggtactgggtgtaatctttgagtgtttgcataagtcatacacttcgcgtactgtctgccatggtaaacctcatgagaagaattctattggatcatgggattgtgcaaatatttcttgcatagcacatagtctttttgggatggacgtatatgaacggatgaactgtcacaattgcaagatggagtctcggcggctcaaatatacttcatttttccacaatattaatgctagttcactccgaaccgcgaagatgatgtgtccagattcttcatttgatgaacttttgaaggttgtcataatgaatgatcaactagcttgtgatcaagacgttggcggctgtggaaaaccgaatcacatacaccacatcctttctactcccccacatgtctttacagttggtaagccttttttggctcttggatatttcaggctgcaattattttgcatgtactttcatgtccagtcttgctgttgtttgatgaatatttgacctcacagtattctcttagaatgctttatatgttttattattcctataatcgtgtaggataggttgctgtattctcttagtcgaccatcttcaattgagcaattgtgatctactttgctttttggcacgttacagccttgtgagggggtgatcctgcactaacacttccatgttctatgtttggtgagatcatttgttggcattctcctctacttacctattgaactttcgttttagttttgggatggcagaacaacaaagagaatgtggatgacatatctgcaactttggctggtatttcaactgagatagacattagcatattctaccgtggcctagatcaaggaagcaaacacaccctggtgtcagtggtttgttactatggccagcattatcattgttttgccttcaaggatggacgatgggtcatgtatgatgaccagacagtcaaggttgtaggtagttggggtgatgtgctcgtgatgtgtgaaaagggtcacttgcaaccccaagtgcttttctttgagtctgcaaattaatcattcttcagagtcgtaaagtgttgtgcagtggttaacatgccctcaaatatagggtttttacctgtggccgtgaagattagaaatagagtagcaaattcgttttgagcgggggtatagagtagcaaattcaacagctgcgttggtctctgagctttggtcgagcccctcgtaataagtagtcacctgaggattaaaggagagctgtttacccctctgtttttttaacctttggtatacttgctgaacttcggatccttcatctgccaatgagatttcactgccgatcaagttggtggggacgcattcgacatgaactgccatccaacaattctagccggatctgcctaaagctcttcattatgcaccagttatgtatagaattttgtgcttacaatgaggtgacaggtataggagtgtgactgttttgaggccagaaggtttagagaatggaaggaaatggaattgttggtgcggtgtgtatctgtggagtactgtttgaaaagaggaacgatatctggaatacggtagactttgagaaatctgtagtacacgagtctatgtaaacagggactcgatgagattatgtgagatgagtatagcgatgaataccagactccttatcactactgtttttatagttaaattcttattttttttatttagctaaagattgcgcgcctaagatataaaagaaaccgttgaagtgac

SEQ ID NO: 6511 - DNA, 5598 bp, Zea Mays
tcccatgggccggaagaagcgaacctccgcaccaaaccctactccgccaccgctggacgcctcccgccggtcgccggcggcggcggagaagccagccggcatcggcagggaagatgccgccgtgcgcgccgaggtcgacaaagcgcttgcgtgcctgcagcggggcagccacgcgcgtgcgcagcgcctcacgagggacgccatcgcccgccacggggaggcctcaccgctgctcctgcgggcgcacggcaccgtccacgctcgcgccgcctccgtcctcgacgaccacgccagccgcgcgcgccaccagcgtacagcgctccaggcggcccagcgcgccgtccagctcgcgccggactccatcgagctggcccacttccacgccatgctgctcttcgacgctgccaccgactcccgcgcctacgatgaggtcgtcgctgagtgcgagcgcggcctcagcatcgaggccccctccgaccccgcgccccactccctcaggttgcccggccccgacgtcgaccaggtccagtccgagctccgcaacttgatccagaaggccaacctcgcctccatctcctcttgggtcaaaaacatgggcggcgcgggggacgacaagcttcgcctcatccctgtgcgccgtctagcggacgagccaatggaggcccggcttgtccccacggcgccctccccgcgccgcccaaacgagatcaagaaggcgaccaagaccaccgaggagcgccgccaggagatcgaggtacgcctggctgccatgaggctgctgcagcagcagaaggagcagagcaatgatgttgtgtctgctacccctgcctcttcccggtcacatggagatgatgccccctcatcgtctgagtcatcggtgggcggacatcgagctgaccggagaaaaggtgggtctaggaaagcaacaggctcatccgcgtctgagcgcactgaccaggtgcgtgcctactggggctcgataccagtggagcaaaggcttgcattcttaaacactagcatttctgagctcaagtcacactatgcttctgcaatgcacaaggagaaagatgctgccagtgcagcatctgatgtgctcaatgaggtgatacaatttgccaacaagcatgacaagtgggagttcatggtatgtggtaggtgtcgggagcagtttacacatgtggaggcacaccggtggcatgtcatggttgagcatgttgggctactctcatccgagctgcaggaaatggttccgcaggagattgatgctgactgggcagaaatgctcagtggttgcaactggaggccattggatgctactgccgcactgaaactttttgaggaagatcaacacaacaaccttggaccagatagggaggatgaatcgaattcgttagatagttggagtaacaaagccatggacatgtcagaatcctcagcctggtcacacaacgaggagtctagcggttttggagtggtggtgagggaaggtgacaccaagtggccattctcagatgatgacgaaagggccaagattttagaaagaatccattcatcgttcaaaatccttgtgaagaaccataatctttcagtgcacaatctaaacagggtgattcgatttgctgtagaggaactcagggggttgccatctgggtcactactgcttaatcactctttggacgagtcgccactttgcattcgcttcttggaggcatcatcactgcagaaagtagataatttcttgcaggacttaatgcaggcttctggacttaataggaacttacagaaggctgaaggattaggtgacggggatagtttcatccaaaaccacgatgtactagagaaggttacccttaattctgattcatcagaactgatcattgatgggcacaccttcggcggaaagtttgattccgagagtgttgatactgatgcattgctttcatggctgtacgccggatcttcaattggtgagcagctattggcctggaatcgtatgatcgacgaaaggtcaaatcagtgcgtcgaccttattcgagcacttgggagggagttcaacaacctgcaaaactcatgtgaacggaaacttgaacagctgagaaatgaggatgcctttacttctgtggagggcctcttttgtgaagagcaaacacgaagggagcaggtgggacggtatggattccaaactttcgaggagctcctcaggaagcggcaggagtttttggaacacaacactgaggagcagtccgacagtaacagatctgagatagatgcaatctcagctattttgaaggaacttcacacatcacactttggttatgatgaggcccttactggcatggccccacgcttttctgacttcgatgggggcgaagaagatgaatggaggctgcatgattttatacatccaaatgattcaatggtacacatggttgtatcaaagatgaaggaacatgttactatggagattagcaagatagatgctaagattatgcgaactttatctgtgatgcggcaactagagcacaagcttggacctgtttctgctcttgattatcgaatgattcttttaccccttatgaggtcgttcttgcagagccatttggaagagctggtggataaggatgcgagagagagatctgatgctgcaagggaagccttcttggctgaacttgctttggatgctaagaagaatgcaagcaaagggggtgatatgaaacaatcccatgaaaaatcaaaggataagaagaagtttaaggattctcgtagggcaaaggagttcaaggattcaagctggagcgaccagtctctcattcaccaagacagtgctgacgaggaaacaacagagacatttcaaattcttgctgattgtgatgatctggattgcaaattctccacaagtgatgattacttcaatgaacaagaggaagaacttaggcataaggtacaacttgaagcagaggaacgaaagctggaagagactctggaatatcaacggcggatagaggaggaagcaaagcagaaacatcttgcagaacaatgtagaagtacttatgcatcttctgtaattggtacagctcgtctttcaagcactgggaatcaggataaccatgaaagtgcaatcaatcactcttcccgtacttatctcgaaggcataaagtttggtgattttcgctacaccgagaacaatttcagccagaaacttaatggattggattcatctgatgcacatgcattaaccagcagtgatatgaatgctcctagatggaccagcacttgtaaaatcgctccctacgcaaaccacagctatcaaactggaaaacaaaatcggctacatgtgttgccttcagatgatctgcaatttgctcatagagatcacgctgcaggaacagagaagccaaattttgagaaagttggcagtggtgcaataccatcagcggatttgtgcatcaaggatgattttgataaaaggtttcaagaagatcttgatgaagcagtgcgccaaagccttggatacgatgcttatcctgctggtacaataagcacttcaaatgaaacagaagtgtatggcactggccttaaaaatgccgctggtgaatacaattgtttcttgaatgtgattattcagtcattatggcatataaggcggtttcgggacgagttccttaaaacatcatcactgcacaagcatgttgaagatccttgtgctgtctgcgctttatatggtatcttcattgacctgagcaaagcagccaagggacacggagaagctgttgcgcctacttcattgaggatcgctttgagcaaatcctacccgaacagcaaattctttcaggagggccagatgaatgatgcatctgaggtactgggtgtaatctttgagtgtttgcataagtcatacacttcgcgtactgtctgccatggtaaacctcatgagaagaattctattggatcatgggattgtgcaaatatttcttgcatagcacatagtctttttgggatggacgtatatgaacggatgaactgtcacaattgcaagatggagtctcggcggctcaaatatacttcatttttccacaatattaatgctagttcactccgaaccgcgaagatgatgtgtccagattcttcatttgatgaacttttgaaggttgtcataatgaatgatcaactagcttgtgatcaagacgttggcggctgtggaaaaccgaatcacatacaccacatcctttctactcccccacatgtctttacagttggtaagccttttttggctcttggatatttcaggctgcaattattttgcatgtactttcatgtccagtcttgctgttgtttgatgaatatttgacctcacagtattctcttagaatgctttatatgttttattattcctataatcgtgtaggataggttgctgtattctcttagtcgaccatcttcaattgagcaattgtgatctactttgctttttggcacgttacagccttgtgagggggtgatcctgcactaacacttccatgttctatgtttggtgagatcatttgttggcattctcctctacttacctattgaactttcgttttagttttgggatggcagaacaacaaagagaatgtggatgacatatctgcaactttggctggtatttcaactgagatagacattagcatattctaccgtggcctagatcaaggaagcaaacacaccctggtgtcagtggtttgttactatggccagcattatcattgttttgccttcaaggatggacgatgggtcatgtatgatgaccagacagtcaaggttgtaggtagttggggtgatgtgctcgtgatgtgtgaaaagggtcacttgcaaccccaagtgcttttctttgagtctgcaaattaatcattcttcagagtcgtaaagtgttgtgcagtggttaacatgccctcaaatatagggtttttacctgtggccgtgaagattagaaatagagtagcaaattcgttttgagcgggggtatagagtagcaaattcaacagctgcgttggtctctgagctttggtcgagcccctcgtaataagtagtcacctgaggattaaaggagagctgtttacccctctgtttttttaacctttggtatacttgctgaacttcggatccttcatctgccaatgagatttcactgccgatcaagttggtggggacgcattcgacatgaactgccatccaacaattctagccggatctgcctaaagctcttcattatgcaccagttatgtatagaattttgtgcttacaatgaggtgacaggtataggagtgtgactgttttgaggccagaaggtttagagaatggaaggaaatggaattgttggtgcggtgtgtatctgtggagtactgtttgaaaagaggaacgatatctggaatacggtagactttgagaaatctgtagtacacgagtctatgtaaacagggactcgatgagattatgtgagatgagtatagcgatgaataccagactccttatcactactgtttttatagttaaattcttattttttttatttagctaaagattgcgcgcctaagatataaaagaaaccgttgaagtgac

SEQ ID NO: 6512 - DNA, 5256 bp, Zea Mays
tcccatgggccggaagaagcgaacctccgcaccaaaccctactccgccaccgctggacgcctcccgccggtcgccggcggcggcggagaagccagccggcatcggcagggaagatgccgccgtgcgcgccgaggtcgacaaagcgcttgcgtgcctgcagcggggcagccacgcgcgtgcgcagcgcctcacgagggacgccatcgcccgccacggggaggcctcaccgctgctcctgcgggcgcacggcaccgtccacgctcgcgccgcctccgtcctcgacgaccacgccagccgcgcgcgccaccagcgtacagcgctccaggcggcccagcgcgccgtccagctcgcgccggactccatcgagctggcccacttccacgccatgctgctcttcgacgctgccaccgactcccgcgcctacgatgaggtcgtcgctgagtgcgagcgcggcctcagcatcgaggccccctccgaccccgcgccccactccctcaggttgcccggccccgacgtcgaccaggtccagtccgagctccgcaacttgatccagaaggccaacctcgcctccatctcctcttgggtcaaaaacatgggcggcgcgggggacgacaagcttcgcctcatccctgtgcgccgtctagcggacgagccaatggaggcccggcttgtccccacggcgccctccccgcgccgcccaaacgagatcaagaaggcgaccaagaccaccgaggagcgccgccaggagatcgaggtacgcctggctgccatgaggctgctgcagcagcagaaggagcagagcaatgatgttgtgtctgctacccctgcctcttcccggtcacatggagatgatgccccctcatcgtctgagtcatcggtgggcggacatcgagctgaccggagaaaaggtgggtctaggaaagcaacaggctcatccgcgtctgagcgcactgaccaggtgcgtgcctactggggctcgataccagtggagcaaaggcttgcattcttaaacactagcatttctgagctcaagtcacactatgcttctgcaatgcacaaggagaaagatgctgccagtgcagcatctgatgtgctcaatgaggtgatacaatttgccaacaagcatgacaagtgggagttcatggtatgtggtaggtgtcgggagcagtttacacatgtggaggcacaccggtggcatgtcatggttgagcatgttgggctactctcatccgagctgcaggaaatggttccgcaggagattgatgctgactgggcagaaatgctcagtggttgcaactggaggccattggatgctactgccgcactgaaactttttgaggaagatcaacacaacaaccttggaccagatagggaggatgaatcgaattcgttagatagttggagtaacaaagccatggacatgtcagaatcctcagcctggtcacacaacgaggagtctagcggttttggagtggtggtgagggaaggtgacaccaagtggccattctcagatgatgacgaaagggccaagattttagaaagaatccattcatcgttcaaaatccttgtgaagaaccataatctttcagtgcacaatctaaacagggtgattcgatttgctgtagaggaactcagggggttgccatctgggtcactactgcttaatcactctttggacgagtcgccactttgcattcgcttcttggaggcatcatcactgcagaaagtagataatttcttgcaggacttaatgcaggcttctggacttaataggaacttacagaaggctgaaggattaggtgacggggatagtttcatccaaaaccacgatgtactagagaaggttacccttaattctgattcatcagaactgatcattgatgggcacaccttcggcggaaagtttgattccgagagtgttgatactgatgcattgctttcatggctgtacgccggatcttcaattggtgagcagctattggcctggaatcgtatgatcgacgaaaggtcaaatcagtgcgtcgaccttattcgagcacttgggagggagttcaacaacctgcaaaactcatgtgaacggaaacttgaacagctgagaaatgaggatgcctttacttctgtggagggcctcttttgtgaagagcaaacacgaagggagcaggtgggacggtatggattccaaactttcgaggagctcctcaggaagcggcaggagtttttggaacacaacactgaggagcagtccgacagtaacagatctgagatagatgcaatctcagctattttgaaggaacttcacacatcacactttggttatgatgaggcccttactggcatggccccacgcttttctgacttcgatgggggcgaagaagatgaatggaggctgcatgattttatacatccaaatgattcaatggtacacatggttgtatcaaagatgaaggaacatgttactatggagattagcaagatagatgctaagattatgcgaactttatctgtgatgcggcaactagagcacaagcttggacctgtttctgctcttgattatcgaatgattcttttaccccttatgaggtcgttcttgcagagccatttggaagagctggtggataaggatgcgagagagagatctgatgctgcaagggaagccttcttggctgaacttgctttggatgctaagaagaatgcaagcaaagggggtgatatgaaacaatcccatgaaaaatcaaaggataagaagaagtttaaggattctcgtagggcaaaggagttcaaggattcaagctggagcgaccagtctctcattcaccaagacagtgctgacgaggaaacaacagagacatttcaaattcttgctgattgtgatgatctggattgcaaattctccacaagtgatgattacttcaatgaacaagaggaagaacttaggcataaggtacaacttgaagcagaggaacgaaagctggaagagactctggaatatcaacggcggatagaggaggaagcaaagcagaaacatcttgcagaacaatgtagaagtacttatgcatcttctgtaattggtacagctcgtctttcaagcactgggaatcaggataaccatgaaagtgcaatcaatcactcttcccgtacttatctcgaaggcataaagtttggtgattttcgctacaccgagaacaatttcagccagaaacttaatggattggattcatctgatgcacatgcattaaccagcagtgatatgaatgctcctagatggaccagcacttgtaaaatcgctccctacgcaaaccacagctatcaaactggaaaacaaaatcggctacatgtgttgccttcagatgatctgcaatttgctcatagagatcacgctgcaggaacagagaagccaaattttgagaaagttggcagtggtgcaataccatcagcggatttgtgcatcaaggatgattttgataaaaggtttcaagaagatcttgatgaagcagtgcgccaaagccttggatacgatgcttatcctgctggtacaataagcacttcaaatgaaacagaagtgtatggcactggccttaaaaatgccgctggtgaatacaattgtttcttgaatgtgattattcagtcattatggcatataaggcggtttcgggacgagttccttaaaacatcatcactgcacaagcatgttgaagatccttgtgctgtctgcgctttatatggtatcttcattgacctgagcaaagcagccaagggacacggagaagctgttgcgcctacttcattgaggatcgctttgagcaaatcctacccgaacagcaaattctttcaggagggccagatgaatgatgcatctgaggtactgggtgtaatctttgagtgtttgcataagtcatacacttcgcgtactgtctgccatggtaaacctcatgagaagaattctattggatcatgggattgtgcaaatatttcttgcatagcacatagtctttttgggatggacgtatatgaacggatgaactgtcacaattgcaagatggagtctcggcggctcaaatatacttcatttttccacaatattaatgctagttcactccgaaccgcgaagattcttcatttgatgaacttttgaaggttgtcataatgaatgatcaactagcttgtgatcaagacgttggcggctgtggaaaaccgaatcacatacaccacatcctttctactcccccacatgtctttacagttgttttgggatggcagaacaacaaagagaatgtggatgacatatctgcaactttggctggtatttcaactgagatagacattagcatattctaccgtggcctagatcaaggaagcaaacacaccctggtgtcagtggtttgttactatggccagcattatcattgttttgccttcaaggatggacgatgggtcatgtatgatgaccagacagtcaaggttgtaggtagttggggtgatgtgctcgtgatgtgtgaaaagggtcacttgcaaccccaagtgcttttctttgagtctgcaaattaatcattcttcagagtcgtaaagtgttgtgcagtggttaacatgccctcaaatatagggtttttacctgtggccgtgaagattagaaatagagtagcaaattcgttttgagcgggggtatagagtagcaaattcaacagctgcgttggtctctgagctttggtcgagcccctcgtaataagtagtcacctgaggattaaaggagagctgtttacccctctgtttttttaacctttggtatacttgctgaacttcggatccttcatctgccaatgagatttcactgccgatcaagttggtggggacgcattcgacatgaactgccatccaacaattctagccggatctgcctaaagctcttcattatgcaccagttatgtatagaattttgtgcttacaatgaggtgacaggtataggagtgtgactgttttgaggccagaaggtttagagaatggaaggaaatggaattgttggtgcggtgtgtatctgtggagtactgtttgaaaagaggaacgatatctggaatacggtagactttgagaaatctgtagtacacgagtctatgtaaacagggactcgatgagattatgtgagatgagtatagcgatgaataccagactccttatcactactgtttttatagttaaattcttattttttttatttagctaaagattgcgcgcctaagatataaaagaaaccgttgaagtgac

SEQ ID NO: 6513 - DNA, 5315 bp, Zea Mays
atcggatcgtctagcgcacgctcgctctcgctctcgctctcgctcgtgttaggtgtagagacccagacctggacccaccgcggcggcactccagtccggctggctgcgcgtcttgttttatggggtatccgcgcggcgctccggttcgcccccaaatctcattcccatgggccggaagaagcgaacctccgcaccaaaccctactccgccaccgctggacgcctcccgccggtcgccggcggcggcggagaagccagccggcatcggcagggaagatgccgccgtgcgcgccgaggtcgacaaagcgcttgcgtgcctgcagcggggcagccacgcgcgtgcgcagcgcctcacgagggacgccatcgcccgccacggggaggcctcaccgctgctcctgcgggcgcacggcaccgtccacgctcgcgccgcctccgtcctcgacgaccacgccagccgcgcgcgccaccagcgtacagcgctccaggcggcccagcgcgccgtccagctcgcgccggactccatcgagctggcccacttccacgccatgctgctcttcgacgctgccaccgactcccgcgcctacgatgaggtcgtcgctgagtgcgagcgcggcctcagcatcgaggccccctccgaccccgcgccccactccctcaggttgcccggccccgacgtcgaccaggtccagtccgagctccgcaacttgatccagaaggccaacctcgcctccatctcctcttgggtcaaaaacatgggcggcgcgggggacgacaagcttcgcctcatccctgtgcgccgtctagcggacgagccaatggaggcccggcttgtccccacggcgccctccccgcgccgcccaaacgagatcaagaaggcgaccaagaccaccgaggagcgccgccaggagatcgaggtacgcctggctgccatgaggctgctgcagcagcagaaggagcagagcaatgatgttgtgtctgctacccctgcctcttcccggtcacatggagatgatgccccctcatcgtctgagtcatcggtgggcggacatcgagctgaccggagaaaaggtgggtctaggaaagcaacaggctcatccgcgtctgagcgcactgaccaggtgcgtgcctactggggctcgataccagtggagcaaaggcttgcattcttaaacactagcatttctgagctcaagtcacactatgcttctgcaatgcacaaggagaaagatgctgccagtgcagcatctgatgtgctcaatgaggtgatacaatttgccaacaagcatgacaagtgggagttcatggtatgtggtaggtgtcgggagcagtttacacatgtggaggcacaccggtggcatgtcatggttgagcatgttgggctactctcatccgagctgcaggaaatggttccgcaggagattgatgctgactgggcagaaatgctcagtggttgcaactggaggccattggatgctactgccgcactgaaactttttgaggaagatcaacacaacaaccttggaccagatagggaggatgaatcgaattcgttagatagttggagtaacaaagccatggacatgtcagaatcctcagcctggtcacacaacgaggagtctagcggttttggagtggtggtgagggaaggtgacaccaagtggccattctcagatgatgacgaaagggccaagattttagaaagaatccattcatcgttcaaaatccttgtgaagaaccataatctttcagtgcacaatctaaacagggtgattcgatttgctgtagaggaactcagggggttgccatctgggtcactactgcttaatcactctttggacgagtcgccactttgcattcgcttcttggaggcatcatcactgcagaaagtagataatttcttgcaggacttaatgcaggcttctggacttaataggaacttacagaaggctgaaggattaggtgacggggatagtttcatccaaaaccacgatgtactagagaaggttacccttaattctgattcatcagaactgatcattgatgggcacaccttcggcggaaagtttgattccgagagtgttgatactgatgcattgctttcatggctgtacgccggatcttcaattggtgagcagctattggcctggaatcgtatgatcgacgaaaggtcaaatcagtgcgtcgaccttattcgagcacttgggagggagttcaacaacctgcaaaactcatgtgaacggaaacttgaacagctgagaaatgaggatgcctttacttctgtggagggcctcttttgtgaagagcaaacacgaagggagcaggtgggacggtatggattccaaactttcgaggagctcctcaggaagcggcaggagtttttggaacacaacactgaggagcagtccgacagtaacagatctgagatagatgcaatctcagctattttgaaggaacttcacacatcacactttggttatgatgaggcccttactggcatggccccacgcttttctgacttcgatgggggcgaagaagatgaatggaggctgcatgattttatacatccaaatgattcaatggtacacatggttgtatcaaagatgaaggaacatgttactatggagattagcaagatagatgctaagattatgcgaactttatctgtgatgcggcaactagagcacaagcttggacctgtttctgctcttgattatcgaatgattcttttaccccttatgaggtcgttcttgcagagccatttggaagagctggtggataaggatgcgagagagagatctgatgctgcaagggaagccttcttggctgaacttgctttggatgctaagaagaatgcaagcaaagggggtgatatgaaacaatcccatgaaaaatcaaaggataagaagaagtttaaggattctcgtagggcaaaggagttcaaggattcaagctggagcgaccagtctctcattcaccaagacagtgctgacgaggaaacaacagagacatttcaaattcttgctgattgtgatgatctggattgcaaattctccacaagtgatgattacttcaatgaacaagaggaagaacttaggcataaggtacaacttgaagcagaggaacgaaagctggaagagactctggaatatcaacggcggatagaggaggaagcaaagcagaaacatcttgcagaacaatgtagaagtacttatgcatcttctgtaattggtacagctcgtctttcaagcactgggaatcaggataaccatgaaagtgcaatcaatcactcttcccgtacttatctcgaaggcataaagtttggtgattttcgctacaccgagaacaatttcagccagaaacttaatggattggattcatctgatgcacatgcattaaccagcagtgatatgaatgctcctagatggaccagcacttgtaaaatcgctccctacgcaaaccacagctatcaaactggaaaacaaaatcggctacatgtgttgccttcagatgatctgcaatttgctcatagagatcacgctgcaggaacagagaagccaaattttgagaaagttggcagtggtgcaataccatcagcggatttgtgcatcaaggatgattttgataaaaggtttcaagaagatcttgatgaagcagtgcgccaaagccttggatacgatgcttatcctgctggtacaataagcacttcaaatgaaacagaagtgtatggcactggccttaaaaatgccgctggtgaatacaattgtttcttgaatgtgattattcagtcattatggcatataaggcggtttcgggacgagttccttaaaacatcatcactgcacaagcatgttgaagatccttgtgctgtctgcgctttatatggtatcttcattgacctgagcaaagcagccaagggacacggagaagctgttgcgcctacttcattgaggatcgctttgagcaaatcctacccgaacagcaaattctttcaggagggccagatgaatgatgcatctgaggtactgggtgtaatctttgagtgtttgcataagtcatacacttcgcgtactgtctgccatgatggagtctcggcggctcaaatatacttcatttttccacaatattaatgctagttcactccgaaccgcgaagatgatgtgtccagattcttcatttgatgaacttttgaaggttgtcataatgaatgatcaactagcttgtgatcaagacgttggcggctgtggaaaaccgaatcacatacaccacatcctttctactcccccacatgtctttacagttgttttgggatggcagaacaacaaagagaatgtggatgacatatctgcaactttggctggtatttcaactgagatagacattagcatattctaccgtggcctagatcaaggaagcaaacacaccctggtgtcagtggtttgttactatggccagcattatcattgttttgccttcaaggatggacgatgggtcatgtatgatgaccagacagtcaaggttgtaggtagttggggtgatgtgctcgtgatgtgtgaaaagggtcacttgcaaccccaagtgcttttctttgagtctgcaaattaatcattcttcagagtcgtaaagtgttgtgcagtggttaacatgccctcaaatatagggtttttacctgtggccgtgaagattagaaatagagtagcaaattcgttttgagcgggggtatagagtagcaaattcaacagctgcgttggtctctgagctttggtcgagcccctcgtaataagtagtcacctgaggattaaaggagagctgtttacccctctgtttttttaacctttggtatacttgctgaacttcggatccttcatctgccaatgagatttcactgccgatcaagttggtggggacgcattcgacatgaactgccatccaacaattctagccggatctgcctaaagctcttcattatgcaccagttatgtatagaattttgtgcttacaatgaggtgacaggtataggagtgtgactgttttgaggccagaaggtttagagaatggaaggaaatggaattgttggtgcggtgtgtatctgtggagtactgtttgaaaagaggaacgatatctggaatacggtagactttgagaaatctgtagtacacgagtctatgtaaacagggactcgatgagattatgtgagatgagtatagcgatgaataccagactccttatcactactgtttttatagttaaattcttattttttttatttagctaaagattgcgcgcctaagatataaaagaaaccgttgaagtgac

SEQ ID NO: 6514 - DNA, 2914 bp, Zea Mays
gttggacttgcaactcatggttatggtctggatgctgtcatgctgtttcatcgagtggaggcagaaaaggttgcagtggacgatcttagtgtacttgtcattctgattgcttgcacacatgctggcttgatctcagagggtttagaaatatttcacagaatgaaaaatgattttgggatagatcccgaggtagaattggttgatctacttggccgtgctggacatttgcgttgagctggctgagttataaatggaacgtcttgcaaatcttggagctgattctggagtctgtttttctatcaaatatatatgctgatgaagcaatgtggggtgatgttttgaggattaggaaaatgatatgtgatgaggggatgagaaaggatattggacggagtgtgattgaagtggatggagaaatacatgagtttgtgaagggaggttgctcatatcattataaggaggaaatgtacttggtgctttggaatttatctaacatggcagcatctatttgattgcttctttctgtaccaactttgtgaaatcattcatcacgagtctgttgattcaacattctagtcatgcaccaaattgcatctgatggttcatagcccagatggtaactgcctatttttcaagcctgaattttcctgctcaagcacaagcaggtgccaacatgaacagtaccgactcaatgaggctcttgagtatccatgtgctgtccatttattattatttttcttgacttgcttccacagtggtgactcaacatgtgatttaacgaagaagatttatgcttttggctgcagttgttactccttttagtcagttttaaattgcatcatgcattagagtagccacttgtggattatgggatttaaaagtggttttggcctttaaaggacaagtttagtcctaattgagaagtgtctgcacctctgtaccattgttctttacttcatcagagtgaagatacatgaagttcagatttcagaatgaagacttcaagattgcgtcttatgcagtatgaacttttggtgtgagctgtctgagggtgggcgcagtcacgcacgcaggaagctgattgacgagcctggacggatcactctcgctccactccagtcaccagtagccgagtgccacgtccatcttttacgtgacgcgaagccgcgaagcggtcggttcttatcacttatcatcagggggccagtcggggcaaccagctacaggacacgtccagatgaacttgcccagggacaggtccgcctcctcgccgtctcgtctgaccgtacgtctttggtgatgaagcatcgatccgggagaaggttcagcattagctctagctagagctagatagccggaggaggagctagtaggaagaggcatggataatcatcaacttgtcgccatggcagcggtggctcagccggcgagcccgacctcgccgcacgtcgcgcacaagatcccgcccggcgacgggccttacgcgagggccaagcacttccagctggtggagaaggacctggacgcgtcgatcgcgtggttctggaaggcgatcagcgcgggcgacaagttggacagcgcgctcaaggacatggcggtggtgatgaagcagcgcgggtacctggcggaggccatcgacgccatcaggtcgctgcggcacctgtgcccgaagcagtcccaggagccgctggacaacatcctcctggacctctacaaggccagcgggcggaccaaggaggagatcgagctgctcaagcagaagctccgcaagatctacctcggcgaggcgttccatggcaggaccaccaagcgcgcccgctcgcacggccgcaagatccacgtctccgtcaagcaagagacatcgcgcgtcctgggcaacctcgcgtgggcgtacatgcagcagcgcaacttcatggcggcggaggtggtgtaccggaaggcgcagatgatcgacccggacgccaacaaggcgtgcaacctcgccctctgcctcatcgagcaggcccggctcgccgacgccgagctcgtcctcgccgacgtgctcgccgggaggtacctgcaggcccgcgaccagcaggacggcaagatcgtccggaaagtggaggagctgctggcccggatcatggcgcatacgacgtggccgggcggtggcggcggtgacggacgacgacgcccggcggataagagcgggagcgggagcgagagcgacgacgatgactgggtcgagaaccagatgctggctttgctcgacgtggcggtgccgtaccggaagaagagcaggaggctgccggtctttgaggagatctcgcgagcagaatagcagatggctgatatagattagcagcagcatcatcatctttcgatcgagctccatgcatatatcgtttgagcgagcgcggatcctctggacctaactgcagtctgcagataggtaggtaggtaggtctgagctgatccagacccacatgtcagtgaccggacgcagaggatctgcttccattattatttgatcgactcctgtccagctcaaccttttggaccaactccgtggcgatagcagtagcagcagcagaaaggtaaagcgcgcgtgtgtgtgtgtgcccctgtgaatctgtggatcggagacagtgtgcagtagcatagcatcagcagcaaggtatttaaagcgtgcaagtgtgtgtataactgtatatacgcttcttatatgcatctgtggatattttgcatggatcggacgcatgtcgcagtcgtgtagtacgtgcgtttgtaaagctattttcaccagtatactcatctctatgctcatattcaaattttcactatatatctggttggttgccgtgtcagtctaacaggatgcaatttcactatacgtctgattggttgccgtatcagtctaacaatttcactatac

SEQ ID NO: 6515 - DNA, 2774 bp, Zea Mays
atttttgttgatgggcattcaggtgtgaggaagccaaggaggctttggagtattttcagagtatgccggggtgtggcgtaaggcctgataaggtcgttgccgtgggggctgtcagtgctagtgctcagctgggcgctttggagcaagtaagatggcttcactcttgcttggagaagtgctatctgatgatgtggtctggatgtcgttggacttgcaactcatggttatggtctggatgctgtcatgctgtttcatcgagtggaggcagaaaaggttgcagtggacgatcttagtgtacttgtcattctgattgcttgcacacatgctggcttgatctcagagggtttagaaatatttcacagaatgaaaaatgattttgggatagatcccgaggtagaattggttgatctacttggccgtgctggacatttgcgttgagctggctgagttataaatggaacgtcttgcaaatcttggagctgattctggagtctgtttttctatcaaatatatatgctgatgaagcaatgtggggtgatgttttgaggattaggaaaatgatatgtgatgaggggatgagaaaggatattggacggagtgtgattgaagtggatggagaaatacatgagtttgtgaagggaggttgctcatatcattataaggaggaaatgtacttggtgctttggaatttatctaacatggcagcatctatttgattgcttctttctgtaccaactttgtgaaatcattcatcacgagtctgttgattcaacattctagtcatgcaccaaattgcatctgatggttcatagcccagatggtaactgcctatttttcaagcctgaattttcctgctcaagcacaagcaggcgtcttatgcagtatgaacttttggtgtgagctgtctgagggtgggcgcagtcacgcacgcaggaagctgattgacgagcctggacggatcactctcgctccactccagtcaccagtagccgagtgccacgtccatcttttacgtgacgcgaagccgcgaagcggtcggttcttatcacttatcatcagggggccagtcggggcaaccagctacaggacacgtccagatgaacttgcccagggacaggtccgcctcctcgccgtctcgtctgaccgtacgtctttggtgatgaagcatcgatccgggagaaggttcagcattagctctagctagagctagatagccggaggaggagctagtaggaagaggcatggataatcatcaacttgtcgccatggcagcggtggctcagccggcgagcccgacctcgccgcacgtcgcgcacaagatcccgcccggcgacgggccttacgcgagggccaagcacttccagctggtggagaaggacctggacgcgtcgatcgcgtggttctggaaggcgatcagcgcgggcgacaagttggacagcgcgctcaaggacatggcggtggtgatgaagcagcgcgggtacctggcggaggccatcgacgccatcaggtcgctgcggcacctgtgcccgaagcagtcccaggagccgctggacaacatcctcctggacctctacaaggccagcgggcggaccaaggaggagatcgagctgctcaagcagaagctccgcaagatctacctcggcgaggcgttccatggcaggaccaccaagcgcgcccgctcgcacggccgcaagatccacgtctccgtcaagcaagagacatcgcgcgtcctgggcaacctcgcgtgggcgtacatgcagcagcgcaacttcatggcggcggaggtggtgtaccggaaggcgcagatgatcgacccggacgccaacaaggcgtgcaacctcgccctctgcctcatcgagcaggcccggctcgccgacgccgagctcgtcctcgccgacgtgctcgccgggaggtacctgcaggcccgcgaccagcaggacggcaagatcgtccggaaagtggaggagctgctggcccggatcatggcgcatacgacgtggccgggcggtggcggcggtgacggacgacgacgcccggcggataagagcgggagcgggagcgagagcgacgacgatgactgggtcgagaaccagatgctggctttgctcgacgtggcggtgccgtaccggaagaagagcaggaggctgccggtctttgaggagatctcgcgagcagaatagcagatggctgatatagattagcagcagcatcatcatctttcgatcgagctccatgcatatatcgtttgagcgagcgcggatcctctggacctaactgcagtctgcagataggtaggtaggtaggtctgagctgatccagacccacatgtcagtgaccggacgcagaggatctgcttccattattatttgatcgactcctgtccagctcaaccttttggaccaactccgtggcgatagcagtagcagcagcagaaaggtaaagcgcgcgtgtgtgtgtgtgcccctgtgaatctgtggatcggagacagtgtgcagtagcatagcatcagcagcaaggtatttaaagcgtgcaagtgtgtgtataactgtatatacgcttcttatatgcatctgtggatattttgcatggatcggacgcatgtcgcagtcgtgtagtacgtgcgtttgtaaagctattttcaccagtatactcatctctatgctcatattcaaattttcactatatatctggttggttgccgtgtcagtctaacaggatgcaatttcactatacgtctgattggttgccgtatcagtctaacaatttcactatac

SEQ ID NO: 6516 - DNA, 2720 bp, Zea Mays
atttttgttgatgggcattcaggtgtgaggaagccaaggaggctttggagtattttcagagtatgccggggtgtggcgtaaggcctgataaggtcgttgccgtgggggctgtcagtgctagtgctcagctgggcgctttggagcaagtaagatggcttcactcttgcttggagaagtgctatctgatgatgtggtctggatgtcgttggacttgcaactcatggttatggtctggatgctgtcatgctgtttcatcgagtggaggcagaaaaggttgcagtggacgatcttagtgtacttgtcattctgattgcttgcacacatgctggcttgatctcagagggtttagaaatatttcacagaatgaaaaatgattttgggatagatcccgaggtagaattggttgatctacttggccgtgctggacatttgcgttgagctggctgagttataaatggaacgtcttgcaaatcttggagctgattctggagtctgtttttctatcaaatatatatgctgatgaagcaatgtggggtgatgttttgaggattaggaaaatgatatgtgatgaggggatgagaaaggatattggacggagtgtgattgaagtggatggagaaatacatgagtttgtgaagggaggttgctcatatcattataaggaggaaatgtacttggtgctttggaatttatctaacatggcagcatctatttgattgcttctttctgtaccaactttgtgaaatcattcatcacgagtctgttgattcaacattctagtcatgcaccaaattgcatctgatggttcatagcccagatggtaactgcctatttttcaagcctgaattttcctgctcaagcacaagcaggcgtcttatgcagtatgaacttttggtgtgagctgtctgagggtgggcgcagtcacgcacgcaggaagctgattgacgagcctggacggatcactctcgctccactccagtcaccagtagccgagtgccacgtccatcttttacgtgacgcgaagccgcgaagcggtcggttcttatcacttatcatcagggggccagtcggggcaaccagctacaggacacgtccagatgaacttgcccagcatcgatccgggagaaggttcagcattagctctagctagagctagatagccggaggaggagctagtaggaagaggcatggataatcatcaacttgtcgccatggcagcggtggctcagccggcgagcccgacctcgccgcacgtcgcgcacaagatcccgcccggcgacgggccttacgcgagggccaagcacttccagctggtggagaaggacctggacgcgtcgatcgcgtggttctggaaggcgatcagcgcgggcgacaagttggacagcgcgctcaaggacatggcggtggtgatgaagcagcgcgggtacctggcggaggccatcgacgccatcaggtcgctgcggcacctgtgcccgaagcagtcccaggagccgctggacaacatcctcctggacctctacaaggccagcgggcggaccaaggaggagatcgagctgctcaagcagaagctccgcaagatctacctcggcgaggcgttccatggcaggaccaccaagcgcgcccgctcgcacggccgcaagatccacgtctccgtcaagcaagagacatcgcgcgtcctgggcaacctcgcgtgggcgtacatgcagcagcgcaacttcatggcggcggaggtggtgtaccggaaggcgcagatgatcgacccggacgccaacaaggcgtgcaacctcgccctctgcctcatcgagcaggcccggctcgccgacgccgagctcgtcctcgccgacgtgctcgccgggaggtacctgcaggcccgcgaccagcaggacggcaagatcgtccggaaagtggaggagctgctggcccggatcatggcgcatacgacgtggccgggcggtggcggcggtgacggacgacgacgcccggcggataagagcgggagcgggagcgagagcgacgacgatgactgggtcgagaaccagatgctggctttgctcgacgtggcggtgccgtaccggaagaagagcaggaggctgccggtctttgaggagatctcgcgagcagaatagcagatggctgatatagattagcagcagcatcatcatctttcgatcgagctccatgcatatatcgtttgagcgagcgcggatcctctggacctaactgcagtctgcagataggtaggtaggtaggtctgagctgatccagacccacatgtcagtgaccggacgcagaggatctgcttccattattatttgatcgactcctgtccagctcaaccttttggaccaactccgtggcgatagcagtagcagcagcagaaaggtaaagcgcgcgtgtgtgtgtgtgcccctgtgaatctgtggatcggagacagtgtgcagtagcatagcatcagcagcaaggtatttaaagcgtgcaagtgtgtgtataactgtatatacgcttcttatatgcatctgtggatattttgcatggatcggacgcatgtcgcagtcgtgtagtacgtgcgtttgtaaagctattttcaccagtatactcatctctatgctcatattcaaattttcactatatatctggttggttgccgtgtcagtctaacaggatgcaatttcactatacgtctgattggttgccgtatcagtctaacaatttcactatac

SEQ ID NO: 6517 - DNA, 4198 bp, Zea Mays
gttcctcgggcagtcaggccacctctccgcctccccgttatggctctccaaccgcttcctcctcgccctcgcgtccatcccggtgtcgccacgctcgcggacgccgtcttcgcgcgccccccggatcccgccgcccgcgaccgattcccctggaacacgtccgtccgcctccacgcccccgcatcgcgctgctctactttgcgtggatgcgctattgcgacgtgcggccgggcgcctacaacgttcctcactgtcctcaaggcctgtggccgcgccggactcctggttcacgccgaggccgtgaggagagagggctgggcgcggacctcttcacggtgaacacgctcatcaacttctaatgcaggatcctggattgccactaggggaggattgtgttcgacaaggcgggcaacgtctcatggaactccatggtcgctgggttcttcgggaaggggagatgaggctcgcgcaggagctgttcgacgaaatgccgcagaaagacacgttctcttgggggtccttgatcgacgtttacacggaatgtgatcttagaaacatttttgttgatgggcattcaggtgtgaggaagccaaggaggctttggagtattttcagagtatgccggggtgtggcgtaaggcctgataaggtcgttgccgtgggggctgtcagtgctagtgctcagctgggcgctttggagcaagtaagatggcttcactcttgcttggagaagtgctatctgatgatgtggtctggatgtcgttggacttgcaactcatggttatggtctggatgctgtcatgctgtttcatcgagtggaggcagaaaaggttgcagtggacgatcttagtgtacttgtcattctgattgcttgcacacatgctggcttgatctcagagggtttagaaatatttcacagaatgaaaaatgattttgggatagatcccgaggtagaattggttgatctacttggccgtgctggacatttgcgttgagctggctgagttataaatggaacgtcttgcaaatcttggagctgattctggagtctgtttttctatcaaatatatatgctgatgaagcaatgtggggtgatgttttgaggattaggaaaatgatatgtgatgaggggatgagaaaggatattggacggagtgtgattgaagtggatggagaaatacatgagtttgtgaagggaggttgctcatatcattataaggaggaaatgtacttggtgctttggaatttatctaacatggcagcatctatttgattgcttctttctgtaccaactttgtgaaatcattcatcacgagtctgttgattcaacattctagtcatgcaccaaattgcatctgatggttcatagcccagatggtaactgcctatttttcaagcctgaattttcctgctcaagcacaagcaggtgccaacatgaacagtaccgactcaatgaggctcttgagtatccatgtgctgtccatttattattatttttcttgacttgcttccacagtggtgactcaacatgtgatttaacgaagaagatttatgcttttggctgcagttgttactccttttagtcagttttaaattgcatcatgcattagagtagccacttgtggattatgggatttaaaagtggttttggcctttaaaggacaagtttagtcctaattgagaagtgtctgcacctctgtaccattgttctttacttcatcagagtgaagatacatgaagttcagatttcagaatgaagacttcaagattgtatactgcctcttacttccgtctactttatgtgtttcattttatatctgtgttgttgtttgctgattacaaaaatgaaaagtggctgattttgggaacaacatttgatgatttgggactctgtaatatgccttgttttggttatttggctttagaactgaaaagtgattgctttctaaattaccagtatggtttatgcatatagtcatgactacctgaccatcagcacgagtagtttgacttggcactctattttgtttagtcgatctagcatgattgagacacctaaatggttggtcctctttgctaattgtaagaagcatgctcaagcttagaatttaagattatatcctaacagagttaacaatgatgaacactatcaagctacataagtgctgctggaccgtggggttcggtggtgtatttacgtcaaccttggggcatgagactcgagtatggtttggtgtaggcgtcttatgcatgtaaaatagaacagaaaccaatttgtttgttcctcttttttttcctgtttattaatacctactttaccttaaacactaaaactttgtttggtgtaggcgtcttatgcagtatgaacttttggtgtgagctgtctgagggtgggcgcagtcacgcacgcaggaagctgattgacgagcctggacggatcactctcgctccactccagtcaccagtagccgagtgccacgtccatcttttacgtgacgcgaagccgcgaagcggtcggttcttatcacttatcatcagggggccagtcggggcaaccagctacaggacacgtccagatgaacttgcccagcatcgatccgggagaaggttcagcattagctctagctagagctagatagccggaggaggagctagtaggaagaggcatggataatcatcaacttgtcgccatggcagcggtggctcagccggcgagcccgacctcgccgcacgtcgcgcacaagatcccgcccggcgacgggccttacgcgagggccaagcacttccagctggtggagaaggacctggacgcgtcgatcgcgtggttctggaaggcgatcagcgcgggcgacaagttggacagcgcgctcaaggacatggcggtggtgatgaagcagcgcgggtacctggcggaggccatcgacgccatcaggtcgctgcggcacctgtgcccgaagcagtcccaggagccgctggacaacatcctcctggacctctacaaggccagcgggcggaccaaggaggagatcgagctgctcaagcagaagctccgcaagatctacctcggcgaggcgttccatggcaggaccaccaagcgcgcccgctcgcacggccgcaagatccacgtctccgtcaagcaagagacatcgcgcgtcctgggcaacctcgcgtgggcgtacatgcagcagcgcaacttcatggcggcggaggtggtgtaccggaaggcgcagatgatcgacccggacgccaacaaggcgtgcaacctcgccctctgcctcatcgagcaggcccggctcgccgacgccgagctcgtcctcgccgacgtgctcgccgggaggtacctgcaggcccgcgaccagcaggacggcaagatcgtccggaaagtggaggagctgctggcccggatcatggcgcatacgacgtggccgggcggtggcggcggtgacggacgacgacgcccggcggataagagcgggagcgggagcgagagcgacgacgatgactgggtcgagaaccagatgctggctttgctcgacgtggcggtgccgtaccggaagaagagcaggaggctgccggtctttgaggagatctcgcgagcagaatagcagatggctgatatagattagcagcagcatcatcatctttcgatcgagctccatgcatatatcgtttgagcgagcgcggatcctctggacctaactgcagtctgcagataggtaggtaggtaggtctgagctgatccagacccacatgtcagtgaccggacgcagaggatctgcttccattattatttgatcgactcctgtccagctcaaccttttggaccaactccgtggcgatagcagtagcagcagcagaaaggtaaagcgcgcgtgtgtgtgtgtgcccctgtgaatctgtggatcggagacagtgtgcagtagcatagcatcagcagcaaggtatttaaagcgtgcaagtgtgtgtataactgtatatacgcttcttatatgcatctgtggatattttgcatggatcggacgcatgtcgcagtcgtgtagtacgtgcgtttgtaaagctattttcaccagtatactcatctctatgctcatattcaaattttcactatatatctggttggttgccgtgtcagtctaacaggatgcaatttcactatacgtctgattggttgccgtatcagtctaacaatttcactatac

SEQ ID NO: 6518 - DNA, 4278 bp, Zea Mays
ctcctctctcgcctccagcctcacgcgttcctcgggcagtcaggccacctctccgcctccccgttatggctctccaaccgcttcctcctcgccctcgcgtccatcccggtgtcgccacgctcgcggacgccgtcttcgcgcgccccccggatcccgccgcccgcgaccgattcccctggaacacgtccgtccgcctccacgcccccgcatcgcgctgctctactttgcgtggatgcgctattgcgacgtgcggccgggcgcctacaacgttcctcactgtcctcaaggcctgtggccgcgccggactcctggttcacgccgaggccgtgaggagagagggctgggcgcggacctcttcacggtgaacacgctcatcaacttctaatgcaggatcctggattgccactaggggaggattgtgttcgacaaggcgggcaacgtctcatggaactccatggtcgctgggttcttcgggaaggggagatgaggctcgcgcaggagctgttcgacgaaatgccgcagaaagacacgttctcttgggggtccttgatcgacgtttacacggaatgtgatcttagaaacatttttgttgatgggcattcaggtgtgaggaagccaaggaggctttggagtattttcagagtatgccggggtgtggcgtaaggcctgataaggtcgttgccgtgggggctgtcagtgctagtgctcagctgggcgctttggagcaagtaagatggcttcactcttgcttggagaagtgctatctgatgatgtggtctggatgtcgttggacttgcaactcatggttatggtctggatgctgtcatgctgtttcatcgagtggaggcagaaaaggttgcagtggacgatcttagtgtacttgtcattctgattgcttgcacacatgctggcttgatctcagagggtttagaaatatttcacagaatgaaaaatgattttgggatagatcccgaggtagaattggttgatctacttggccgtgctggacatttgcgttgagctggctgagttataaatggaacgtcttgcaaatcttggagctgattctggagtctgtttttctatcaaatatatatgctgatgaagcaatgtggggtgatgttttgaggattaggaaaatgatatgtgatgaggggatgagaaaggatattggacggagtgtgattgaagtggatggagaaatacatgagtttgtgaagggaggttgctcatatcattataaggaggaaatgtacttggtgctttggaatttatctaacatggcagcatctatttgattgcttctttctgtaccaactttgtgaaatcattcatcacgagtctgttgattcaacattctagtcatgcaccaaattgcatctgatggttcatagcccagatggtaactgcctatttttcaagcctgaattttcctgctcaagcacaagcaggtgccaacatgaacagtaccgactcaatgaggctcttgagtatccatgtgctgtccatttattattatttttcttgacttgcttccacagtggtgactcaacatgtgatttaacgaagaagatttatgcttttggctgcagttgttactccttttagtcagttttaaattgcatcatgcattagagtagccacttgtggattatgggatttaaaagtggttttggcctttaaaggacaagtttagtcctaattgagaagtgtctgcacctctgtaccattgttctttacttcatcagagtgaagatacatgaagttcagatttcagaatgaagacttcaagattgtatactgcctcttacttccgtctactttatgtgtttcattttatatctgtgttgttgtttgctgattacaaaaatgaaaagtggctgattttgggaacaacatttgatgatttgggactctgtaatatgccttgttttggttatttggctttagaactgaaaagtgattgctttctaaattaccagtatggtttatgcatatagtcatgactacctgaccatcagcacgagtagtttgacttggcactctattttgtttagtcgatctagcatgattgagacacctaaatggttggtcctctttgctaattgtaagaagcatgctcaagcttagaatttaagattatatcctaacagagttaacaatgatgaacactatcaagctacataagtgctgctggaccgtggggttcggtggtgtatttacgtcaaccttggggcatgagactcgagtatggtttggtgtaggcgtcttatgcatgtaaaatagaacagaaaccaatttgtttgttcctcttttttttcctgtttattaatacctactttaccttaaacactaaaactttgtttggtgtaggcgtcttatgcagtatgaacttttggtgtgagctgtctgagggtgggcgcagtcacgcacgcaggaagctgattgacgagcctggacggatcactctcgctccactccagtcaccagtagccgagtgccacgtccatcttttacgtgacgcgaagccgcgaagcggtcggttcttatcacttatcatcagggggccagtcggggcaaccagctacaggacacgtccagatgaacttgcccagggacaggtccgcctcctcgccgtctcgtctgaccgtacgtctttggtgatgaagcatcgatccgggagaaggttcagcattagctctagctagagctagatagccggaggaggagctagtaggaagaggcatggataatcatcaacttgtcgccatggcagcggtggctcagccggcgagcccgacctcgccgcacgtcgcgcacaagatcccgcccggcgacgggccttacgcgagggccaagcacttccagctggtggagaaggacctggacgcgtcgatcgcgtggttctggaaggcgatcagcgcgggcgacaagttggacagcgcgctcaaggacatggcggtggtgatgaagcagcgcgggtacctggcggaggccatcgacgccatcaggtcgctgcggcacctgtgcccgaagcagtcccaggagccgctggacaacatcctcctggacctctacaaggccagcgggcggaccaaggaggagatcgagctgctcaagcagaagctccgcaagatctacctcggcgaggcgttccatggcaggaccaccaagcgcgcccgctcgcacggccgcaagatccacgtctccgtcaagcaagagacatcgcgcgtcctgggcaacctcgcgtgggcgtacatgcagcagcgcaacttcatggcggcggaggtggtgtaccggaaggcgcagatgatcgacccggacgccaacaaggcgtgcaacctcgccctctgcctcatcgagcaggcccggctcgccgacgccgagctcgtcctcgccgacgtgctcgccgggaggtacctgcaggcccgcgaccagcaggacggcaagatcgtccggaaagtggaggagctgctggcccggatcatggcgcatacgacgtggccgggcggtggcggcggtgacggacgacgacgcccggcggataagagcgggagcgggagcgagagcgacgacgatgactgggtcgagaaccagatgctggctttgctcgacgtggcggtgccgtaccggaagaagagcaggaggctgccggtctttgaggagatctcgcgagcagaatagcagatggctgatatagattagcagcagcatcatcatctttcgatcgagctccatgcatatatcgtttgagcgagcgcggatcctctggacctaactgcagtctgcagataggtaggtaggtaggtctgagctgatccagacccacatgtcagtgaccggacgcagaggatctgcttccattattatttgatcgactcctgtccagctcaaccttttggaccaactccgtggcgatagcagtagcagcagcagaaaggtaaagcgcgcgtgtgtgtgtgtgcccctgtgaatctgtggatcggagacagtgtgcagtagcatagcatcagcagcaaggtatttaaagcgtgcaagtgtgtgtataactgtatatacgcttcttatatgcatctgtggatattttgcatggatcggacgcatgtcgcagtcgtgtagtacgtgcgtttgtaaagctattttcaccagtatactcatctctatgctcatattcaaattttcactatatatctggttggttgccgtgtcagtctaacaggatgcaatttcactatacgtctgattggttgccgtatcagtctaacaatttcactatac

SEQ ID NO: 6519 - DNA, 615 bp, Zea Mays
gtaaaactatgattttgataaatactgttgccaaacataccctcaaccggatcataaaaaaccaaactgcaatcttatcaccaggctcacaaataatcatacaaggcaggtgttttgaaggtcataccaaagtttgacaaacatagcacaattagatgacatccaactccatacgaaaactaccaatacactattccgcctcaacgcagcctcctagcctccctctcagactcgagcagtgtgaggatgtctccctcgcgaaccggtcccttgacgttcctcatgatgagacggttctggtcatccaagaacttcactctgacctgggtaacctgacccctggagccggtccttcccatcacctctcgcttctcgcgcagagtcgcggacggaggacgacgggcttacgaaggaaaccggggcggcggcggcgatgacagcactggaggaggaaggaaaccctaggcctatatataacaaaagtagtggggtttgcactttgtagctgagcccagggccccaggctgccctggacgggaacgggacgcgctggctgccattgcgctagaccgtctgggtgggcgtgggcctcatcgaaagccaactcgtgcgttg

SEQ ID NO: 6520 - DNA, 657 bp, Zea Mays
gtaaaactatgattttgataaatactgttgccaaacataccctcaaccggatcataaaaaaccaaactgcaatcttatcaccaggctcacaaataatcatacaaggcaggtgttttgaaggtcataccaaagtttgacaaacatagcacaattagatgacatccaactccatacgaaaactaccaatacactattccgcctcaacgcagcctcctagcctccctctcagactcgagcagtgtgaggatgtctccctcgcgaaccggtcccttgacgttcctcatgatgagacggttctggtcatccaagaacttcactctgacctgggtaacctgacccctggagccggtccttcccatcaccttcaccacaacagcaagcttcacttgggtgtccatactgcactctcgcttctcgcgcagagtcgcggacggaggacgacgggcttacgaaggaaaccggggcggcggcggcgatgacagcactggaggaggaaggaaaccctaggcctatatataacaaaagtagtggggtttgcactttgtagctgagcccagggccccaggctgccctggacgggaacgggacgcgctggctgccattgcgctagaccgtctgggtgggcgtgggcctcatcgaaagccaactcgtgcgttg

SEQ ID NO: 6521 - DNA, 684 bp, Zea Mays
atggctggcctgtcaagagtccagttacaatatgtggtgatatacatggacaattccatgatcttgtagagcttttccgaattggtgggaagtgtccagacaccaattacttatttatgggggattatgtagatcgtggctactattctgttgagactgtcactctgctagtagcactaaaagtgaggtacccacatcgaattacaatccttcgtggaaaccatgagagtcggcagatcacacaggtgtatggattctatgacgaatgtctacgcaagtatggcaatgcaaatgtatggaagacatttacggatctttttgattattttcctctgacagctctggtgtgtactcttaagactggaaccaccttttttcagttgtatctggagcatctattctatgcatcatcttcccaatatgcagaatcttaaaacactaaaatgatgtagtagatagaaccacaaatggcttagtagctagaatctcatcgttcttttttagcaccagtttcagattcttcagtcggcagtatatttatgaattatgagttatgaccaacttcttttaacccgttagagcatgttggattggaaattgagaaccatagcatagagtatgtattcagatgttccaattatttggaacaccctgttgaacatcaattgtcttcatttgtttgtc

SEQ ID NO: 6522 - DNA, 1432 bp, Zea Mays
atcaatctctccagcctctttctcggatcccccctccccgatttccttccccactctgtcagtctagtgccccgcgcgcgctctctcgccgcctcgccgccggcgacgagcttgagctcgagctcgagctggtttctcgtatcgaagacgcggccgcggtatggatcccatgaacgtagacaacggcggctgcggcggccttgacgcgcagatcgagcagctgatgcagtgccgcccgctcgccgagcaggaggttaaggccctgtgcgagaaggccaaggagatattgatggaggaaagcaacgttcagcctgtcaagagtccagttacaatatgtggtgatatacatggacaattccatgatcttgtagagcttttccgaattggtgggaagtgtccagacaccaattacttatttatgggggattatgtagatcgtggctactattctgttgagactgtcactctgctagtagcactaaaagtgaggtacccacatcgaattacaatccttcgtggaaaccatgagagtcggcagatcacacaggtgtatggattctatgacgaatgtctacgcaagtgagtttgtttaggtgcttaaagttcaagttagatttccaggtgtaggatgttcctatggacctatatagcacatactgtatcattacctgtgtgagaaggtctatgtttaatcttttttcttaattacagttgtatgttagcttcagatttcccagttttctcacacatgcacaatctctttggcatcttgtgccttttctattactgcattagactctttggacttgtagatacttcttttcattgtgtatagcttttgtctgatggacaccatcactatgcttaggatttggtacgaatgaaagttgaatggtcaattggtcatattgtttgttatcttatataaactcattggttcatgtaaactttttttttcctacaagtccacaatataatgatagcttcttgtcatttctgttgctaactgctttattttaaaccaggtatggcaatgcaaatgtatggaagacatttacggatctttttgattattttcctctgacagctctggtgtgtactcttaagactggaaccaccttttttcagttgtatctggagcatctattctatgcatcatcttcccaatatgcagaatcttaaaacactaaaatgatgtagtagatagaaccacaaatggcttagtagctagaatctcatcgttcttttttagcaccagtttcagattcttcagtcggcagtatatttatgaattatgagttatgaccaacttcttttaacccgttagagcatgttggattggaaattgagaaccatagcatagagtatgtattcagatgttccaattatttggaacaccctgttgaacatcaattgtcttcatttgtttgtc

SEQ ID NO: 6523 - DNA, 864 bp, Zea Mays
agcagggaggcccacctggcgagcgggcttcccgatcaatctctccagcctctttctcggatcccccctccccgatttccttccccactctgtcagtctagtgccccgcgcgcgctctctcgccgcctcgccgccggcgacgagcttgagctcgagctcgagctggtttctcgtatcgaagacgcggccgcggtatggatcccatgaacgtagacaacggcggctgcggcggccttgacgcgcagatcgagcagctgatgcagtgccgcccgctcgccgagcaggaggttaaggccctgtgcgagaaggccaaggagatattgatggaggaaagcaacgttcagctgctagtagcactaaaagtgaggtacccacatcgaattacaatccttcgtggaaaccatgagagtcggcagatcacacaggtgtatggattctatgacgaatgtctacgcaagtatggcaatgcaaatgtatggaagacatttacggatctttttgattattttcctctgacagctctggtgtgtactcttaagactggaaccaccttttttcagttgtatctggagcatctattctatgcatcatcttcccaatatgcagaatcttaaaacactaaaatgatgtagtagatagaaccacaaatggcttagtagctagaatctcatcgttcttttttagcaccagtttcagattcttcagtcggcagtatatttatgaattatgagttatgaccaacttcttttaacccgttagagcatgttggattggaaattgagaaccatagcatagagtatgtattcagatgttccaattatttggaacaccctgttgaacatcaattgtcttcatttgtttgtc

SEQ ID NO: 6524 - DNA, 756 bp, Zea Mays
atcttcgcaatttatgagagaaggttaaggccctgtgcgagaaggccaaggagatattgatggaggaaagcaacgttcagcctgtcaagagtccagttacaatatgtggtgatatacatggacaattccatgatcttgtagagcttttccgaattggtgggaagtgtccagacaccaattacttatttatgggggattatgtagatcgtggctactattctgttgagactgtcactctgctagtagcactaaaagtgaggtacccacatcgaattacaatccttcgtggaaaccatgagagtcggcagatcacacaggtgtatggattctatgacgaatgtctacgcaagtatggcaatgcaaatgtatggaagacatttacggatctttttgattattttcctctgacagctctggtgtgtactcttaagactggaaccaccttttttcagttgtatctggagcatctattctatgcatcatcttcccaatatgcagaatcttaaaacactaaaatgatgtagtagatagaaccacaaatggcttagtagctagaatctcatcgttcttttttagcaccagtttcagattcttcagtcggcagtatatttatgaattatgagttatgaccaacttcttttaacccgttagagcatgttggattggaaattgagaaccatagcatagagtatgtattcagatgttccaattatttggaacaccctgttgaacatcaattgtcttcatttgtttgtc

SEQ ID NO: 6525 - DNA, 1115 bp, Zea Mays
agcacgatctatcacgacgatcagcgcgtatccctgacaaaagcacacagacagctcgtattcgcggctgcaaagctcgagctcagaaagatcagcaatggcgtttctctcgcggtcgaggagccacgctgtcccctcggcgctgctggtgctgctgctcttgtcggtggcctcggcggccgcggtgggcgtggcggccaagacggacgtccacgacgtcgcggaggagagcaacaaggacgaggagtcatggacgggctgggccaaggacaagatctccgaggggttggggctcaagcaccatgccgacgtcgacgaggaggagaccgcgcgcaaggctggccacaccgtcaagtccgcgcgcgagtccgcccagcacaccgcctccgagatagggaagaaggcggggtacgccaaggagacggcgggagatgccgcggccggcgcgtcgaacaaggccgggcaagccaaggaccaggctaaggacacggtgaaggacgcggccggcgaagcgtccaacaaggcggagtacggcaagcagaagaccaaggaggccgccgaggcggcgagcgagagtggtgccgaggcggacaaggccggcaagaaggcgcaggagtccaaggaggcggccaaggggaaggcaacggagaaggcggcgtccgccaaggacgcggcgtgggagacggtggaggcggccaaggagaaggccggcgaagggtatgagagggtgaaggagaaggcgcgggagacggcggacacggccaaggagaggctggaggaggtgaaggagagggtcgctgggcccgacgtcgccgccgtcgacggcaaggggaagcaccggagggcggacgtggacaagtaccggtcggagtcggaggacgagctgtgaggagagcccgccgcggcgggtgatgtttgcattcagtgtccaggtcgttttcagcgtgttcaaagctagttttttttttctttcctacacggatctgtatactagtcttctgtttcagcctcgaccatatgctgttcctgctcttagtacaataatctgatgacatgcacacaaacttcgcagaaattcgagttatacgtacaacaacttaatgtcatctattagc

SEQ ID NO: 6526 - DNA, 114 bp, Zea Mays
cgctcggacctcccagccccgccgctgagcaaggccccacacaccgcatctgatcagcgaatccccagtcctggtgagtcagggaggcggaactgaggcgagcgagaaattgcg

SEQ ID NO: 6527 - DNA, 124 bp, Zea Mays
gcaaaaattgagttccgcttctccccgaagcggatgctgctacacctcagcaaactccctttgttggtactcagctctggggcattattggtaaagccttggtctacaatcttggatgctcgcc

SEQ ID NO: 6528 - DNA, 1716 bp, Zea Mays
tgttagataacatactatgttaatgttatcatcgactactctactatatgctacaggtttcaaaataaaaaatgaactcacaacgattggagtaatctcttgatcttatttttcacaactgcactttgggcgtgtagatttctacccctattccaaattatagcttactttaaccaagtttcaaaataaaaaatgaagtcacaacgattggattaatctcttgatcttattttccacaactgcactttgggcgtgtagatctctacggttctacccctatttgacactatgacataggaacagttcatgatatgtgtctcaaattcaaatgtagtaggaataatattaggagaagacatggacctgcatcgaatcgacgtctatcacatccttctggccttcacccaaactcccatgacatagcaagttagcaacccaccatttgagagtgcaacaataatatattctgcagatgcatgatttaaccacttgaaatatttaacagtgataactcatcctaggctacatgatgaggatggtaccacgtcctgtgtagcacaattgttcagaaatgttataatcttgacaaaagacataacaccttctctaactaaagtttgcggacaagctaatggagctaaaaacagatcagattaataaaggacacaatatctctaatcacaaaggtatgagaacacatttcatcctgatctgagtatgtcatggcctaaggaggcccacggaggggctgcggtagcagcagccatgggccctccaagaggattagataaggatagttagagattcatactacttattaagaaggtaagagtagtctgccgttctgccctccccgtgttctgtcgttctgccctccccgtgttctgccgttctgccctcccccgttccgcgcgcaggaaaaaaaattaaaccgtggttgctcaaggattaaaccttggatctattgagtagaatgtctagccttccaccctctagccaacatgacccatgttggctttatttgtgtttaacccgccgtccactctgtatgctcactgagtctagaaaaacatttatagcttggcccctgatgtttctggaatttgggacgcagtccaggaaataaagaaaatagggaaaagagtttggaaattgatttttagtttaaaaataattgcaaaagcccatttaattcatggaaatttcatattaaatctaaatgaattcattccaatttctataattctataatattattttttatcacataatacctctgttttgtcatgaaaacaacaataaaattgatttcctaattaatcctatatcaaatacatagaaactttggaaattcgtaacttccccattttaattctaaattgaaccgttccagttgtgttagtctcgtatgaatatttactacgcagtaacaacattgattataccatgtttcatacttttataattagatatttatttatcctgtgttaattgggttaatctatgtctattggattaatttatttaatatattaatatagtattctaactttatggttatacggtgtttgaccattagtcttgcaaacacacacttacctttttgtttaagcaaaagcgtatggtggtacgtgtccgatgactaacgatgtacgagggaatttcttctggtatgtgtgaaacatgctctccaataatgagaccatacaaatcgtg

SEQ ID NO: 6529 - DNA, 1318 bp, Zea Mays
cttctgcatcaacgacaggccgaaggacgctcacacaaggacgactgaagctatgctccagtgtgagatatgcttatccatggtggagagataaagaaattgattctcaagccaagaggtcgcaaggactgtgcccacttactcctgaggaggcatcacttgttttgaaagctctaggatttcaaaaggatgctcttatgtacatcgcagctggtgaaatttatgggggagataggagactagaaccactacggtctgcttttccaaaccttgtacgaaaggagatgctgctagactctgaagttctgcatcaattccaaaatcactcttcccagatggctgcacttgacttcattgtatccacagctagcgatgttttcattcccactttcgatggtaacatggcaaagcttgttgaaggtcaccgaaggttcctgggttttcggagaagtgtggtgctagaccgccggaaattagttgaacttctagatctgtacaccaacaagacaatctcttgggacaaatttgcatcttctgttcgggaagctcataaggaccgtgtagctcaaccatcctgcaggcgaaaacttgaaaacagaccaaaagaagaggattacttctatgctaacccccatgaatgcctagccaattcaaccttgtgcagctaaactgagtttctggtttctgttaggtgaccagatgtgagcgtgaaatcattaccaggcaggaattggcacacggttgttttgatgtcgtgttgtcgagggaccgaagccagatttacacagcccatcacgatcttttgacttcgaattccttattatcctgttgtataggtcagtttttagcttctgtattgattcgttcgctttccaacatgccaaaaggggcctgtttggagcatgtaaattttggtttgttgtctaccatttttcttcatcggtgtctaactcgtgctgctaggccgaagggttagctgtttcatcttttggttttgtttctctaattttacaaattcttagtggaattatcacctttttaaaactgtgctgtttcaatacaggagtgctgaacctgtctcatttgtctctcttttcttttttggaaaaggttgtccagtttgcttggtgcatcagccttctcgatgaatgctttactgtgtaaacccttccgtgagatcatctacaggagtttctaaaagaatctaaaaaaacaattagaaaatcaagagtttttaagtggctaaaaaaggtatgagcatatttgttgagctgttgctctcaagatacaatacggtttgacatccgtcttctctaac

SEQ ID NO: 6530 - DNA, 1424 bp, Zea Mays
gagccatccaaccatcctctctcccttctgcatcaacgacaggccgaaggacgctcacacaaggacgactgaagctatgctccagtgtgaggtctggcagcgtctgcttcaagcatcttatctggtccaggtcgttcagaattgatcacagaccccataatcctctctaaaagatatgcttatccatggtggagagataaagaaattgattctcaagccaagaggtcgcaaggactgtgcccacttactcctgaggaggcatcacttgttttgaaagctctaggatttcaaaaggatgctcttatgtacatcgcagctggtgaaatttatgggggagataggagactagaaccactacggtctgcttttccaaaccttgtacgaaaggagatgctgctagactctgaagttctgcatcaattccaaaatcactcttcccagatggctgcacttgacttcattgtatccacagctagcgatgttttcattcccactttcgatggtaacatggcaaagcttgttgaaggtcaccgaaggttcctgggttttcggagaagtgtggtgctagaccgccggaaattagttgaacttctagatctgtacaccaacaagacaatctcttgggacaaatttgcatcttctgttcgggaagctcataaggaccgtgtagctcaaccatcctgcaggcgaaaacttgaaaacagaccaaaagaagaggattacttctatgctaacccccatgaatgcctagccaattcaaccttgtgcagctaaactgagtttctggtttctgttaggtgaccagatgtgagcgtgaaatcattaccaggcaggaattggcacacggttgttttgatgtcgtgttgtcgagggaccgaagccagatttacacagcccatcacgatcttttgacttcgaattccttattatcctgttgtataggtcagtttttagcttctgtattgattcgttcgctttccaacatgccaaaaggggcctgtttggagcatgtaaattttggtttgttgtctaccatttttcttcatcggtgtctaactcgtgctgctaggccgaagggttagctgtttcatcttttggttttgtttctctaattttacaaattcttagtggaattatcacctttttaaaactgtgctgtttcaatacaggagtgctgaacctgtctcatttgtctctcttttcttttttggaaaaggttgtccagtttgcttggtgcatcagccttctcgatgaatgctttactgtgtaaacccttccgtgagatcatctacaggagtttctaaaagaatctaaaaaaacaattagaaaatcaagagtttttaagtggctaaaaaaggtatgagcatatttgttgagctgttgctctcaagatacaatacggtttgacatccgtcttctctaac

SEQ ID NO: 6531 - DNA, 1974 bp, Zea Mays
cccaggccaacaaaatcacctcccgcacctccgcgattcttctcgaagactcgaaccgcctggaatcagaatcgccgttgtcgggaatcgctccgatgcccgcggcgatcgggaggcggccgcccgaacgccgggtctagacctcgcgtgcgatggcgaggtcgaggcctagggtttggctcgtggcgggctgcgccgccgtcatcctgtgggcctccgtcgcgcagctcgtcgccgtcggccgctttctcctccttttcggcctcgtgggcgacgccgatccctcgccgccaccttccgcgcttccgcccccgagaatatacatgagcaatggttatctgaagatatcttgtaatgggggtctgaatcagatgcgctcagagatttgtgacatggtggcagttgctcgtcttctaaatctcactatggttgtccccgaacttgacaagagatcattctgggctgatcaaagtaattttggagatatatttgacgtgaggcatttcatcaactctttgagagataaggtgcacatcattgaacagcttccagagaagcttggtccaagagattcaaacattattatacttgaaatgccacctgtgagctggtcagatgaaaaatattacttgcatcagatcctaccgctgttcaacaaatacagcatcatccattttaacaaaacagatgctcgcatagccaataatggtatcagtacagagcttcaattgcttagatgccgtgttaattttcatgcactgaaattcacacctcaaattgagggattagggaataaactggtacataaactgcgagccaagggatcatttgtagccttgcatttacgctatgagatggatatgctggcgttttctggttgcaaccatggcctttcacctgaagaagccgaggagctcaaaaaaatgaggtacgaaaggagatgctgctagactctgaagttctgcatcaattccaaaatcactcttcccagatggctgcacttgacttcattgtatccacagctagcgatgttttcattcccactttcgatggtaacatggcaaagcttgttgaaggtcaccgaaggttcctgggttttcggagaagtgtggtgctagaccgccggaaattagttgaacttctagatctgtacaccaacaagacaatctcttgggacaaatttgcatcttctgttcgggaagctcataaggaccgtgtagctcaaccatcctgcaggcgaaaacttgaaaacagaccaaaagaagaggattacttctatgctaacccccatgaatgcctagccaattcaaccttgtgcagctaaactgagtttctggtttctgttaggtgaccagatgtgagcgtgaaatcattaccaggcaggaattggcacacggttgttttgatgtcgtgttgtcgagggaccgaagccagatttacacagcccatcacgatcttttgacttcgaattccttattatcctgttgtataggtcagtttttagcttctgtattgattcgttcgctttccaacatgccaaaaggggcctgtttggagcatgtaaattttggtttgttgtctaccatttttcttcatcggtgtctaactcgtgctgctaggccgaagggttagctgtttcatcttttggttttgtttctctaattttacaaattcttagtggaattatcacctttttaaaactgtgctgtttcaatacaggagtgctgaacctgtctcatttgtctctcttttcttttttggaaaaggttgtccagtttgcttggtgcatcagccttctcgatgaatgctttactgtgtaaacccttccgtgagatcatctacaggagtttctaaaagaatctaaaaaaacaattagaaaatcaagagtttttaagtggctaaaaaaggtatgagcatatttgttgagctgttgctctcaagatacaatacggtttgacatccgtcttctctaac

SEQ ID NO: 6532 - DNA, 2086 bp, Zea Mays
ctaaaaatgattttttattaaaataaaaaaatttcggccactatggcggttggcttcatcgtcaccgcgctacacgctacactcgaccagttcctactccccaggccaacaaaatcacctcccgcacctccgcgattcttctcgaagactcgaaccgcctggaatcagaatcgccgttgtcgggaatcgctccgatgcccgcggcgatcgggaggcggccgcccgaacgccgggtctagacctcgcgtgcgatggcgaggtcgaggcctagggtttggctcgtggcgggctgcgccgccgtcatcctgtgggcctccgtcgcgcagctcgtcgccgtcggccgctttctcctccttttcggcctcgtgggcgacgccgatccctcgccgccaccttccgcgcttccgcccccgagaatatacatgagcaatggttatctgaagatatcttgtaatgggggtctgaatcagatgcgctcagagatttgtgacatggtggcagttgctcgtcttctaaatctcactatggttgtccccgaacttgacaagagatcattctgggctgatcaaagtaattttggagatatatttgacgtgaggcatttcatcaactctttgagagataaggtgcacatcattgaacagcttccagagaagcttggtccaagagattcaaacattattatacttgaaatgccacctgtgagctggtcagatgaaaaatattacttgcatcagatcctaccgctgttcaacaaatacagcatcatccattttaacaaaacagatgctcgcatagccaataatggtatcagtacagagcttcaattgcttagatgccgtgttaattttcatgcactgaaattcacacctcaaattgagggattagggaataaactggtacataaactgcgagccaagggatcatttgtagccttgcatttacgctatgagatggatatgctggcgttttctggttgcaaccatggcctttcacctgaagaagccgaggagctcaaaaaaatgaggtctggcagcgtctgcttcaagcatcttatctggtccaggtcgttcagaattgatcacagaccccataatcctctctaaaagatatgcttatccatggtggagagataaagaaattgattctcaagccaagaggtcgcaaggactgtgcccacttactcctgaggaggcatcacttgttttgaaagctctaggatttcaaaaggatgctcttatgtacatcgcagctggtgaaatttatgggggagataggagactagaaccactacggtctgcttttccaaaccttgtacgaaaggagatgctgctagactctgaagttctgcatcaattccaaaatcactcttcccagatggctgcacttgacttcattgtatccacagctagcgatgttttcattcccactttcgatggtaacatggcaaagcttgttgaaggtcaccgaaggttcctgggttttcggagaagtgtggtgctagaccgccggaaattagttgaacttctagatctgtacaccaacaagacaatctcttgggacaaatttgcatcttctgttcgggaagctcataaggaccgtgtagctcaaccatcctgcaggcgaaaacttgaaaacagaccaaaagaagaggattacttctatgctaacccccatgaatgcctagccaattcaaccttgtgcagctaaactgagtttctggtttctgttaggtgaccagatgtgagcgtgaaatcattaccaggcaggaattggcacacggttgttttgatgtcgtgttgtcgagggaccgaagccagatttacacagcccatcacgatcttttgacttcgaattccttattatcctgttgtataggttgtccagtttgcttggtgcatcagccttctcgatgaatgctttactgtgtaaacccttccgtgagatcatctacaggagtttctaaaagaatctaaaaaaacaattagaaaatcaagagtttttaagtggctaaaaaaggtatgagcatatttgttgagctgttgctctcaagatacaatacggtttgacatccgtcttctctaac

SEQ ID NO: 6533 - DNA, 1923 bp, Zea Mays
ctaaaaatgattttttattaaaataaaaaaatttcggccactatggcggttggcttcatcgtcaccgcgctacacgctacactcgaccagttcctactccccaggccaacaaaatcacctcccgcacctccgcgattcttctcgaagactcgaaccgcctggaatcagaatcgccgttgtcgggaatcgctccgatgcccgcggcgatcgggaggcggccgcccgaacgccgggtctagacctcgcgtgcgatggcgaggtcgaggcctagggtttggctcgtggcgggctgcgccgccgtcatcctgtgggcctccgtcgcgcagctcgtcgccgtcggccgctttctcctccttttcggcctcgtgggcgacgccgatccctcgccgccaccttccgcgcttccgcccccgagaatatacatgagcaatggttatctgaagatatcttgtaatgggggtctgaatcagatgcgctcagagatttgtgacatggtggcagttgctcgtcttctaaatctcactatggttgtccccgaacttgacaagagatcattctgggctgatcaaagtaattttggagatatatttgacgtgaggcatttcatcaactctttgagagataaggtgcacatcattgaacagcttccagagaagcttggtccaagagattcaaacattattatacttgaaatgccacctgtgagctggtcagatgaaaaatattacttgcatcagatcctaccgctgttcaacaaatacagcatcatccattttaacaaaacagatgctcgcatagccaataatgggaataaactggtacataaactgcgagccaagggatcatttgtagccttgcatttacgctatgagatggatatgctggcgttttctggttgcaaccatggcctttcacctgaagaagccgaggagctcaaaaaaatgagatatgcttatccatggtggagagataaagaaattgattctcaagccaagaggtcgcaaggactgtgcccacttactcctgaggaggcatcacttgttttgaaagctctaggatttcaaaaggatgctcttatgtacatcgcagctggtgaaatttatgggggagataggagactagaaccactacggtctgcttttccaaaccttgtacgaaaggagatgctgctagactctgaagttctgcatcaattccaaaatcactcttcccagatggctgcacttgacttcattgtatccacagctagcgatgttttcattcccactttcgatggtaacatggcaaagcttgttgaaggtcaccgaaggttcctgggttttcggagaagtgtggtgctagaccgccggaaattagttgaacttctagatctgtacaccaacaagacaatctcttgggacaaatttgcatcttctgttcgggaagctcataaggaccgtgtagctcaaccatcctgcaggcgaaaacttgaaaacagaccaaaagaagaggattacttctatgctaacccccatgaatgcctagccaattcaaccttgtgcagctaaactgagtttctggtttctgttaggtgaccagatgtgagcgtgaaatcattaccaggcaggaattggcacacggttgttttgatgtcgtgttgtcgagggaccgaagccagatttacacagcccatcacgatcttttgacttcgaattccttattatcctgttgtataggttgtccagtttgcttggtgcatcagccttctcgatgaatgctttactgtgtaaacccttccgtgagatcatctacaggagtttctaaaagaatctaaaaaaacaattagaaaatcaagagtttttaagtggctaaaaaaggtatgagcatatttgttgagctgttgctctcaagatacaatacggtttgacatccgtcttctctaac

SEQ ID NO: 6534 - DNA, 1056 bp, Zea Mays
cccaggccaacaaaatcacctcccgcacctccgcgattcttctcgaagactcgaaccgcctggaatcagaatcgccgttgtcgggaatcgctccgatgcccgcggcgatcgggaggcggccgcccgaacgccgggtctagacctcgcgtgcgatggcgaggtcgaggcctagggtttggctcgtggcgggctgcgccgccgtcatcctgtgggcctccgtcgcgcagctcgtcgccgtcggccgctttctcctccttttcggcctcgtgggcgacgccgatccctcgccgccaccttccgcgcttccgcccccgagaatatacatgagcaatggttatctgaagatatcttgtaatgggggtctgaatcagatgcgctcagagatttgtgacatggtggcagttgctcgtcttctaaatctcactatggttgtccccgaacttgacaagagatcattctgggctgatcaaagtaattttggagatatatttgacgtgaggcatttcatcaactctttgagagataaggtgcacatcattgaacagcttccagagaagcttggtccaagagattcaaacattattatacttgaaatgccacctgtgagctggtcagatgaaaaatattacttgcatcagatcctaccgctgttcaacaaatacagcatcatccattttaacaaaacagatgctcgcatagccaataatggtatcagtacagagcttcaattgcttagatgccgtgttaattttcatgcactgaaattcacacctcaaattgagggattagggaataaactggtacataaactgcgagccaagggatcatttgtagccttgcatttacgctatgagatggatatgctggcgttttctggttgcaaccatggcctttcacctgaagaagccgaggagctcaaaaaaatgaggtctggcagcgtctgcttcaagcatcttatctggtccaggtcgttcagaattgatcacagaccccataatcctctctaaaagaactgcttttggatcctcggacatggaagaactctcagtaggagac

SEQ ID NO: 6535 - DNA, 2113 bp, Zea Mays
gctcaagacccctcctggaaggtcagtgaccgcgagagcgcagctgggttcccctgcaagaacggcaagccgctgatggctgccgagtgaggagttgccgtccttgccgcctcttcgttctgctcaaaaacccttgcgagcttgcagcctctgccgccatctttgcctgccttgtcgccgccgatcccgattagcgacaggatagagctcctggccacctcgtccacgtcgtcgatccggatcgtcttgggcacccacaccttgccatttcctttggcgcctccttcctcgtcgcggtctctagggtgctttcctggcgtgaagcagatgttggacttggtggatgctgctggagaggcggaggtaatggacgagcccgtctcggactggccggagtgaggcggccatgcgccactccaagctcctggaaccatgcaaccccagtaggcagcagcagcagctgctgccgggtagaacgggattgcgatgctgcctgggccgtaacaggcagaggccggtactggtggcgcacagctaaatggccacatggccaccccgttcgtcatgcatggatgctgaacaactctcgcggatttatctgctgtaacattctccttccggtccgggtcttctgccttggcagaaggtccttgagtgcgagacccaactgagcgctcgtcccccgctatcgggacgagcttttccttgagctgtttcatctgctccgtgaggtctaagctggacatggcagagccgaagctgagcaccgtgccgttagtcttggctgccgcgcagacgagcgggtcgacgggcagaccggccctgaccctctggaggaagtgggaagtggccgacgcgctcttgctcttgcgccggcctgcgcccacgggcacgttgcgcatggcaccgccggcagtccagtacctctggcagttcttgcagaagtggcgcggctggttgatgttgtagttgttgtagtagcagaacttggtgtccatgctgttgcaccgcgggcacggcaggatcttgtcgggcttcttgagcttctcctttgggttgcccgcctcgccctgctgtttgtctgccgacgagtcttcggtgtccgcgacctcctgctgcggaggcgagcctgtggagtcctgaacgttgttctcttgccctttcggatcagtcgtaccgctgccgctgccgccgctttgttgcatgtcctgcaatcatgcatacaagctcgctgagttcttgacctactcaaagctctcgcaagagttttcaggtttcagctttgtttgttgtagaaaaaaaatactagttcacagccaaaaggtcatacatgaataattttttccggttggacctatgaactctaatgctatttattttcttttttttcactcttgatcgctaataaagcagctgttgatcgtgtgactttaacactaatcaaaacatggtgatgtaactgatcccgtaccacacggcgcatgctgtagtggttgatacagcagcttctgcctatatttggtggcgaaatccttgaaagcaagggcaaagggaacaatcggaagggtacagctgaatcctgcaccacctctgaataaactgctaaataatgtttcttttcggctgacataataaaaccatagccataggtttggccgcaaacagcaagaacactgctgttagagagagagagagagagagagagagagagagagagagagagagagagagagagagaggaggggtacccaaaaaaaacccggtaaaattcgcatgctaatggaaggcaaaagtgtcaaacatgacaccatatcacatagcttctacatacaaaaaatttaaaacaggaagaacagaaaatcaccatcctatgtttacataaatcctgagggagcaactgggcaacagaaaaaccagctgccacgtacgatggaacctaaacctagtaggtgcgaaaaaaaaattctggttgccctgatcactggctatgtccaagcaagcactcaccctaccgttcgctccaattcaaacgtggcttgggcttgggaaagagagatgttaggcggagggagaagagaaacgagacgaaccttggcagcctcgccgacggcgg

SEQ ID NO: 6536 - DNA, 1918 bp, Zea Mays
atgggtaacatgtatatccgcaaggcacccccgagcggctcatctcatcggcgactaccaaagagcaatggtgggacggaagccgatgcgccggcgccgaagtgaccggcaaccgccgccgcaatccttcggcgccacggctcgcccgagttccccacgctcgttcgactccacaaccgccgccgctgccgcagttgccaccgacctggacgagctgctgctgacggcgccgccgccgtccgcgtcggagccccggagcttctcctatgcggtgaaacagcagtgctgggagaaggcggagcggctgcccggacgtgacccggagaggtggcgccgcgatgcgctcggcaacatcgtcttccgcaagctcgtgggttgccccggctgcctttgccacgactacgaccacatcgtcccctactccaagggcgggaagagcacattggagaattgccaagttttgcaggctacggtgaatcgatctaaaggcaacaagactgagatatccaaatctgagctcatacagaagagtgcatactgtagggtttcaggacgggacatggatcttgttgaactttctgcctatggaaatgtccggcgagggccagattcagggggctgcaaaatccaatgaagtagatatatctgaatggcgtcaaagttggaagtagttgcctcaaagttggaagtagttgcctgaggctcaatggagaaagcttgattcattgttctgtcaaatatctccaatcatgtttatactatgtagcttaacacttcaaatgatttatcccagaaaagaaatcgtgatatatttgaatcaatgattgtctgcattcatgctcagtaacaccagccccacctgtcctgaaaaactggactgccagcgatgtctctccagtgaagaccacatttacctatcccagtaatgacaggttgattgggtattttgtctggatattgcgagatttgaaaacattaacacctgcaggttgtgagtcttaagatgactacaccaaccacccaatgaatgtacctttcctcctactgcagcgccgagaattgccatcatggatcatctggaaacactaatggcagtacaaaatgtacctaagttgtaggttcagttcgttaatgttgtgatactgacagataactaataagtcgtgtgctcagtttaaatgttctgtggtggtactgtatattcttataagttttgctttattttttgtattaatatatatatccattgattctgtcagtatttcagaagtttctgctatcgctgctcacattccagggattgactatcaagggtggtatgttagttgggtcaacctacttgtgctggacaggatcattcttttttgcattccatacacggattcaaaaacgtggagtgtgtacacggatactgcattctttccgcgtgaattgactgatctaacatctgtgtccacaagtgtatgagtggatgaggacgcatggagctgtatgatattaagtggcaacacacagagaagcaatatccgtatcagccatgatgatgccaatgaatcgacagtgactggtataattgtaccaggattagataaacatgccaacgtgtccaaattatagtcaggtcacaacctacaactttccaagccagattttagatttgttccgtatcttatgcctgtggaacaaaccacttacagaattactttcaccatatgttgttcaattcattgccaaggtcattttaaggacttggaagtagcttaaaattgtgaaggcaatctgatgtcttcagattagaaaccttcagggttcattttagcttttgttttcttttttatacatagacaaggatgtaattaaatattttccaattgcatactctggatttatgcttaagagttatcttcttacacatttc

SEQ ID NO: 6537 - DNA, 1938 bp, Zea Mays
gggctttggtgggtcggtcacgggcagccagatgggtaacatgtatatccgcaaggcacccccgagcggctcatctcatcggcgactaccaaagagcaatggtgggacggaagccgatgcgccggcgccgaagtgaccggcaaccgccgccgcaatccttcggcgccacggctcgcccgagttccccacgctcgttcgactccacaaccgccgccgctgccgcagttgccaccgacctggacgagctgctgctgacggcgccgccgccgtccgcgtcggagccccggagcttctcctatgcggtgaaacagcagtgctgggagaaggcggagcggctgcccggacgtgacccggagaggtggcgccgcgatgcgctcggcaacatcgtcttccgcaagctcgtgggttgccccggctgcctttgccacgactacgaccacatcgtcccctactccaagggcgggaagagcacattggagaattgccaagttttgcaggctacggtgaatcgatctaaaggcaacaagactgagatatccaaatctgagctcatacagaagagtgcatactgtagggtttcaggacgggacatggatcttgttgaactttctgcctatggaaatgtccggcgagggccagattcagggggctgcaaaatccaatgaagtagatatatctgaatggcgtcaaagttggaagtagttgcctcaaagttggaagtagttgcctgaggctcaatggagaaagcttgattcattgttctgtcaaatatctccaatcatgtttatactatgtagcttaacacttcaaatgatttatcccagaaaagaaatcgtgatatatttgaatcaatgattgtctgcattcatgctcagtaacaccagccccacctgtcctgaaaaactggactgccagcgatgtctctccagtgaagaccacatttacctatcccagtaatgacaggttgattgggtattttgtctggatattgcgagatttgaaaacattaacacctgcaggttgtgagtcttaagatgactacaccaaccacccaatgaatgtacctttcctcctactgcagcgccgagaattgccatcatggatcatctggaaacactaatggcagtacaaaatgtacctaagttgtaggttcagttcgttaatgttgtgatactgacagataactaataagtcgtgtgctcagtttaaatgttctgtggtggtactgtatattcttataagttttgctttattttttgtattaatatatatatccattgattctgtcagtatttcagaagtttctgctatcgctgctcacattccagggattgactatcaagggtggtatgttagttgggtcaacctacttgtgctggacaggatcattcttttttgcattccatacacggattcaaaaacgagtgtgtacacggatactgcattctttccgcgtgaattgactgatctaacatctgtgtccacaagtgtatgagtggatgaggacgcatggagctgtatgatattaagtggcaacacacagagaagcaatatccgtatcagccatgatgatgccaatgaatcgacagtgactggtaccaggattagataaacatgccaacgtgtccaaattatagtcaggtcacaacctacaactttccaagccagattttagatttgttccgtatcttatgcctgtggaacaaaccacttacagaattactttcaccatatgttgttcaattcattgccaaggtcattttaaggacttggaagtagcttaaaattgtgaaggcaatctgatgtcttcagattagaaaccttcagggttcattttagcttttgttttcttttttatacatagacaaggatgtaattaaatattttccaattgcatactctggatttatgcttaagagttatcttcttacacatttc

SEQ ID NO: 6538 - DNA, 985 bp, Zea Mays
ctaaaacataccccaaaacctattttaggcttggaataaaaaaatcttatccaacagctcctctaactttccccaaaattttcgtcaccccgtatccgagctctctcctcctgcaaatttccgtgacgtgatttcttccccaatccttacgtgcgcgcttcaccagtcatttcccgctttatttttcacccttgcgctcaggcggaggagtggaaagcggcgacagcgggagagaaagcagaggtggtggttggacggttgaagtctcgagatgcagccaccacgatcatctgctatgaatgcacaaccacaagtacgttgtgacagccagctaatacgggaggtgttgtccttcggcggcgggatcccgcactggcagatggccacgaccagagaactagatctcgacgacggaagcgagctgcatccaattggtggggccttgttcaacgacgacttatgtgcaacaatggatgatatgtggtttttgatgttttctttgtccccccatacaccaatgaaaagcgacgtctggccctgagtctgtgcaactgtacaaggctggggtaaacagctgattcttcagttaacaggaaatggatacttttctagcatgatgagggatgacaacagtcaaagagaatttgatactcatagcaacacatgccctgaactacagtcaaaatcaatgtcagtttgtccagtagcccccaacgcaagaccgaacaataagaggtccaaaaatttcagtgataacgaagatgacattttagtttcggtgtggctcaatattagtttggatcatattgtgagcaaagataaaaaaggtggtcgatatttgtctcgtatatacgaatactttcatgaacacaacaagtgccagacaaagcgtacacttaattctctaatgcaccgatgggagacaattcagaaatgtgtcaacaagttttgtggatgtctaacacgaattaagttaagacgtcag

SEQ ID NO: 6539 - DNA, 1800 bp, Zea Mays
cactctgggtcctggtcttctcagcccattcccaccggccagtcggccacccaccgtgcctcgtcgtcgccgcagcccgcacctgcagccgccatgtggaggggcggcgccaccaccgccttcgtcgctagggccctccgctcgcgcctcctcctcgaccccatccaccacccggtcacgtcgctcgctcctatttcttcggcgcgtacctcttcctcttccacctcgtccactgccgcggcgaacaccatcgtggaagaagcggcggtggcggcggctgtatccgtttcgcagcataccggatccatctccgacgcgctacggcactatgggaagtgctaccgggagctctcgaaagtccgcctcagtgctcttgttgtggcaacttcgggggctggttatgtgcttggtagtggcaacatcgtggatattgctggactttgttgcacatgtgctggtacaatgatggttgcagcatctgcaaataccctcaaccagctgcccccccaaaacaactcagtattctctctgatcaataacaacgcctactttcaggtgttcgagataaaaaatgatgctaaaatgaaaaggacaatgcgacgtcccctgccatctggtcgcatcagtcctgcacatgctgcaatgtgggctacaagtgttggagttgcaggaacagctttgttggcctggaaggtttgtgcaggctaatggcttggcagctgggcttgcagcttctaaccttgttctgtacgcatttgtttatacgccgttgaagcaaatacaccctgttaatacatgggttggggcaatcgttggtgccattccaccacttttggggtgggcggcagcttcaactgaactgtcactaaatgccatgatactccctgccgcattgtactattggcaaatacctcattttatggctcttgcgtacttatgtcgaaacgattaccttgctggagggtatcgaatgttttcttttgctgatccaactggtaaaagaactgcatgggtgtcgctaagaaattgtctgtacatgctacctttgggtttatttgcatacaactggggcctcacatctgagtggtttagttttgaagcttcactcctaacattaggccttaccattggatctctatcatttgtgctgaaaccaagtccaaagactgcgaggagaatgttctatggtagcctgctgtatctccctgccttcatggctgggcttctgttgcatcggctgccaaatgaacaaaaggcgcacaacttggctgagaaaagtgaactggacggagttctgtacggggccgatctgcaggacaaagaaagagccacacagaaacgccaagacaggaatccttccagcatgcaatcacgccctccggttgcatatgcttctgtggctccattccctttcctaccggtgcccatatatgactcatgaaaagtttccctggttcttcctgcagcagtgggacagtcagagcaatgtattcatgcacttttggcttacatgaatttctgccaccaagagttctttggtgcgtctgttgttaaaattataggatagttttttaatggattgagctttttgcggctcacctaaaagtaaaaaaaaagtgctgtggacactcgttctgatgcctcgggtaacacggatatgctgatgtactcttgtgcttttcttgtaagattcgatgtccggaaacatgcaataattgaccgtagacagaagtaacatggtaatggacatttagggcgtgtttggtttgaggaatgaagtgatttatcttcttctcactt

SEQ ID NO: 6540 - DNA, 1847 bp, Zea Mays
cactctgggtcctggtcttctcagcccattcccaccggccagtcggccacccaccgtgcctcgtcgtcgccgcagcccgcacctgcagccgccatgtggaggggcggcgccaccaccgccttcgtcgctagggccctccgctcgcgcctcctcctcgaccccatccaccacccggtcacgtcgctcgctcctatttcttcggcgcgtacctcttcctcttccacctcgtccactgccgcggcgaacaccatcgtggaagaagcggcggtggcggcggctgtatccgtttcgcagcataccggatccatctccgacgcgctacggcactatgggaagtgctaccgggagctctcgaaagtccgcctcagtgaatcttgtgattcaggattcaaccttgcctactaattttgggccccttgtaactgatgactgaagatataatttctaatatcgatccaacattcgtatttagtgctcttgttgtggcaacttcgggggctggttatgtgcttggtagtggcaacatcgtggatattgctggactttgttgcacatgtgctggtacaatgatggttgcagcatctgcaaataccctcaaccaggtgttcgagataaaaaatgatgctaaaatgaaaaggacaatgcgacgtcccctgccatctggtcgcatcagtcctgcacatgctgcaatgtgggctacaagtgttggagttgcaggaacagctttgttggcctggaaggtttgtgcaggctaatggcttggcagctgggcttgcagcttctaaccttgttctgtacgcatttgtttatacgccgttgaagcaaatacaccctgttaatacatgggttggggcaatcgttggtgccattccaccacttttggggtgggcggcagcttcaactgaactgtcactaaatgccatgatactccctgccgcattgtactattggcaaatacctcattttatggctcttgcgtacttatgtcgaaacgattaccttgctggagggtatcgaatgttttcttttgctgatccaactggtaaaagaactgcatgggtgtcgctaagaaattgtctgtacatgctacctttgggtttatttgcatacaactggggcctcacatctgagtggtttagttttgaagcttcactcctaacattaggccttaccattggatctctatcatttgtgctgaaaccaagtccaaagactgcgaggagaatgttctatggtagcctgctgtatctccctgccttcatggctgggcttctgttgcatcggctgccaaatgaacaaaaggcgcacaacttggctgagaaaagtgaactggacggagttctgtacggggccgatctgcaggacaaagaaagagccacacagaaacgccaagacaggaatccttccagcatgcaatcacgccctccggttgcatatgcttctgtggctccattccctttcctaccggtgcccatatatgactcatgaaaagtttccctggttcttcctgcagcagtgggacagtcagagcaatgtattcatgcacttttggcttacatgaatttctgccaccaagagttctttggtgcgtctgttgttaaaattataggatagttttttaatggattgagctttttgcggctcacctaaaagtaaaaaaaaagtgctgtggacactcgttctgatgcctcgggtaacacggatatgctgatgtactcttgtgcttttcttgtaagattcgatgtccggaaacatgcaataattgaccgtagacagaagtaacatggtaatggacatttagggcgtgtttggtttgaggaatgaagtgatttatcttcttctcactt

SEQ ID NO: 6541 - DNA, 1727 bp, Zea Mays
gacggatcagagatgattacattgtggtgtggttagtctcatcgtattgtccatagtgtaaaattaaaaattatgttagtctcaagtcttctgctggttggctgctaatttctttctgctcatggatctttacaaatgtttatacttcataaccataatctcacaaaaagagttggaggatgctcagaaggctgtaggagagtttggaggtgacaaccgtgcaggaattgaaggtactttacataggatatctgctataaggagtaggaaaggaatggttgttggtttgacctgtcgagtcggccgagctgttactgggcatgttgacatggtccgtgatctcctaaattacaaagaaagtatcctatttttgggaagactatatggaaaaagttctattcaggaataggcctggggtcggcaagactactgttatgcgtgagattgcgcgtgttttagcagatgaatttcagaaaagagtgggcaggtaattgtggacacaagtaatgagattggtggggatggggatgttcctcatgctgcgattggtggagcaagaaggatgcaagtacctgaaccatcaatgcagcatagggtgatgattgaagcagttgaaaaccatatgcctgaggtggttattgtagatgagatcggaactgaagcagaagcacaagcttgtcgatcaattgcagaaaggggtgttatgcttattggcactgcccatggagaacgacttgcaaacatcattaagaacccaaccttatctgacttgattggaggtgtagaaactgttacccttggagacgatgaggctcgtgctcgacggagtcagaaaagtattctggagaggaaagctcctccaacattccctttccttatcgagatgagggagcggcattactgggtaacacatcggacagaaaggagcgtagatatgctactgcatggtaagaagccgctggttgaggttaggaaaagggatagcgagtttcaggttgtaattgaaagatgggcaacatatgatggcgatggactctgaacttgaaaccctgtcgtcataattgcttctatcaaagttcttaatttagtacttgatgtttctgtggacaagtgtgatctacactaccaagcctcttgttctgaggtcgtacgtggattgcatgggcgaacattcgactgacaagtgacaactatccgaagcctgttcttacactgaaggcagcccacgaagcaattttgacatttcagctactttttagcggtcgaaaattgatgtcaattctaatgtatatatattttcctgtaagagaaggaacctaatgtatgtcagtgcttctaaattgtatgagatgtgtacatatgcatatgcatatccttattgttgttaatatactcattcccccttttctttcttttttattttcccctttgatttttaaacattggtgaactgaggtcctctattttactatgtatgtgagtattcaatgttttctctaagtgttaatggtgcatgcaatattcttagttttacaaacgtttttttttataatcccaagttttttgctcttactcaacccccattacccccaaaggaaaaaaaaagtatgtttgagatgtcttggttttggatttaataattttttagctcattggccctgtaatttttgtacattgtctgacttgtttatatgttctctaattgttaactgcactatttttataag

SEQ ID NO: 6542 - DNA, 1942 bp, Zea Mays
aagcaaagcgttatccatcccgtccggacacgccaaccgctcgctcccttgcgcgcgactgcgctaccgccggcgccgccgcgtcggcattagcttgccgcgcgatggacatgtgtgccccacgccgcctgctcctcttctcactccccaccccgaagctctctccggagcatcctttgttcaggcaacggcgcaggggcaggacctggcccggcatcgctcgctgcgccactgaggttggcactggatggggaggcatcgtcgaggacgacctttctgagctcctgcagattctcccgagagatttgcgagataatctacagaatgagcctagaaaggaccaacttctggaggtcattctggatttgggaagacgaccagaggcacgattccttggtgactccggtggccaatatctacgggacagtgagatctcacaaaaagagttggaggatgctcagaaggctgtaggagagtttggaggtgacaaccgtgcaggaattgaaggtactttacataggatatctgctataaggagtaggaaaggaatggttgttggtttgacctgtcgagtcggccgagctgttactgggcatgttgacatggtccgtgatctcctaaattacaaagaaagtatcctatttttgggaaggcctggggtcggcaagactactgttatgcgtgagattgcgcgtgttttagcagatgaatttcagaaaagagtgggcaggtaattgtggacacaagtaatgagattggtggggatggggatgttcctcatgctgcgattggtggagcaagaaggatgcaagtacctgaaccatcaatgcagcatagggtgatgattgaagcagttgaaaaccatatgcctgaggtggttattgtagatgagatcggaactgaagcagaagcacaagcttgtcgatcaattgcagaaaggggtgttatgcttattggcactgcccatggagaacgacttgcaaacatcattaagaacccaaccttatctgacttgattggaggtgtagaaactgttacccttggagacgatgaggctcgtgctcgacggagtcagaaaagtattctggagaggaaagctcctccaacattccctttccttatcgagatgagggagcggcattactgggtaacacatcggacagaaaggagcgtagatatgctactgcatggttaggaaaagggatagcgagtttcaggttgtaattgaaagatgggcaacatatgatggcgatggactctgaacttgaaaccctgtcgtcataattgcttctatcaaagttcttaatttagtacttgatgtttctgtggacaagtgtgatctacactaccaagcctcttgttctgagtggattgcatgggcgaacattcgactgacaagtgacaactatccgaagcctgttcttacactgaaggcagcccacgaagcaattttgacatttcagctactttttagcggtcgaaaattgatgtcaattctaatgtatatatattttcctgtaagagaaggaacctaatgtatgtcagtgcttctaaattgtatgagatgtgtacatatgcatatgcatatccttattgttgttaatatactcattcccccttttctttcttttttattttcccctttgatttttaaacattggtgaactgaggtcctctattttactatgtatgtgagtattcaatgttttctctaagtgttaatggtgcatgcaatattcttagttttacaaacgtttttttttataatcccaagttttttgctcttactcaacccccattacccccaaaggaaaaaaaaagtatgtttgagatgtcttggttttggatttaataattttttagctcattggccctgtaatttttgtacattgtctgacttgtttatatgttctctaattgttaactgcactatttttataag

SEQ ID NO: 6543 - DNA, 2861 bp, Zea Mays
aagcaaagcgttatccatcccgtccggacacgccaaccgctcgctcccttgcgcgcgactgcgctaccgccggcgccgccgcgtcggcattagcttgccgcgcgatggacatgtgtgccccacgccgcctgctcctcttctcactccccaccccgaagctctctccggagcatcctttgttcaggcaacggcgcaggggcaggacctggcccggcatcgctcgctgcgccactgaggttggcactggatggggaggcatcgtcgaggacgacctttctgagctcctgcagattctcccgagagatttgcgagataatctacagaatgagcctagaaaggaccaacttctggaggtcattctggatttgggaagacgaccagaggcacgattccttggtgactccggtggccaatatctacgggacagtgagatctcacaaaaagagttggaggatgctcagaaggctgtaggagagtttggaggtgacaaccgtgcaggaattgaaggtactttacataggatatctgctataaggagtaggaaaggaatggttgttggtttgacctgtcgagtcggccgagctgttactgggcatgttgacatggtccgtgatctcctaaattacaaagaaagtatcctatttttgggaagactatatggaaaaagttctattcaggaataggcctggggtcggcaagactactgttatgcgtgagattgcgcgtgttttagcagatgaatttcagaaaagagtgggcaggtaattgtggacacaagtaatgagattggtggggatggggatgttcctcatgctgcgattggtggagcaagaaggatgcaagtacctgaaccatcaatgcagcatagggtgatgattgaagcagttgaaaaccatatgcctgaggtggttattgtagatgagatcggaactgaagcagaagcacaagcttgtcgatcaattgcagaaaggggtgttatgcttattggcactgcccatggagaacgacttgcaaacatcattaagaacccaaccttatctgacttgattggaggtgtagaaactgttacccttggagacgatgaggctcgtgctcgacggagtcagaaaagtattctggagaggaaagctcctccaacattccctttccttatcgagatgagggagcggcattactgggtaacacatcggacagaaaggagcgtagatatgctactgcatggtaagaagccgctggttgaggttaggaaaagggatagcgagtttcaggttgtaattgaaagatgggcaacatatgatggcgatggactctgaacttgaaaccctgtcgtcataattgcttctatcaaagttcttaatttagtacttgatgtttctgtggacaagtgtgatctacactaccaagcctcttgttctgaggtcgtacggtacagacttatcctaatccaaaaagtttacaatgttgttgttttcctggtgaaattactttgcccattttggtgagtatgcaatgcccaccgtgttggatcttctatgattgccaattttttaataccccgtttggatatagatcttggtgcacggaattggaaattggaatcaactttcctaaattctgttgttttcttgcacataagggtgtgtttgggagtgaggttttttcacagttttagaaaaatactacagtattctcaaatactgcaatattatatatagaatggtgtttggcaagctagctaaaatctttgttttttaaaactgaagtattgtaaataatgtagttgttttaaggtattctaagcttaggtctgaaccttagtttccaaaactgtagtattttaaactgtggtattgtcatgactaaaatatactatatattgtagtatttcaaaaactgtggtttacaaacactttgttcccaaacaaggtctaaaattgagatttagaatcagagaccaaattctttggtattggattataactggaagcttcctctcccaatataaagcatcaccccgctgtattgcgtggaattagacgacacaattctaaactctaatacagtgacatccaaacaatagaattggaattgtatctaatttcaatgctatgactgatttggtattgaaactagttcaattgctgccctccaatatcgacatccaaactgagcataactgaatttgtactttttgtggtggaaataggtcgtacctaatgtttgaagtttcactgttttttatttttggaggaaattatttctgacatggatggaaccttattacagtggattgcatgggcgaacattcgactgacaagtgacaactatccgaagcctgttcttacactgaaggcagcccacgaagcaattttgacatttcagctactttttagcggtcgaaaattgatgtcaattctaatgtatatatattttcctgtaagagaaggaacctaatgtatgtcagtgcttctaaattgtatgagatgtgtacatatgcatatgcatatccttattgttgttaatatactcattcccccttttctttcttttttattttcccctttgatttttaaacattggtgaactgaggtcctctattttactatgtatgtgagtattcaatgttttctctaagtgttaatggtgcatgcaatattcttagttttacaaacgtttttttttataatcccaagttttttgctcttactcaacccccattacccccaaaggaaaaaaaaagtatgtttgagatgtcttggttttggatttaataattttttagctcattggccctgtaatttttgtacattgtctgacttgtttatatgttctctaattgttaactgcactatttttataag

SEQ ID NO: 6544 - DNA, 1962 bp, Zea Mays
aagcaaagcgttatccatcccgtccggacacgccaaccgctcgctcccttgcgcgcgactgcgctaccgccggcgccgccgcgtcggcattagcttgccgcgcgatggacatgtgtgccccacgccgcctgctcctcttctcactccccaccccgaagctctctccggagcatcctttgttcaggcaacggcgcaggggcaggacctggcccggcatcgctcgctgcgccactgaggttggcactggatggggaggcatcgtcgaggacgacctttctgagctcctgcagattctcccgagagatttgcgagataatctacagaatgagcctagaaaggaccaacttctggaggtcattctggatttgggaagacgaccagaggcacgattccttggtgactccggtggccaatatctacgggacagtgagatctcacaaaaagagttggaggatgctcagaaggctgtaggagagtttggaggtgacaaccgtgcaggaattgaaggtactttacataggatatctgctataaggagtaggaaaggaatggttgttggtttgacctgtcgagtcggccgagctgttactgggcatgttgacatggtccgtgatctcctaaattacaaagaaagtatcctatttttgggaaggcctggggtcggcaagactactgttatgcgtgagattgcgcgtgttttagcagatgaatttcagaaaagagtgggcaggtaattgtggacacaagtaatgagattggtggggatggggatgttcctcatgctgcgattggtggagcaagaaggatgcaagtacctgaaccatcaatgcagcatagggtgatgattgaagcagttgaaaaccatatgcctgaggtggttattgtagatgagatcggaactgaagcagaagcacaagcttgtcgatcaattgcagaaaggggtgttatgcttattggcactgcccatggagaacgacttgcaaacatcattaagaacccaaccttatctgacttgattggaggtgtagaaactgttacccttggagacgatgaggctcgtgctcgacggagtcagaaaagtattctggagaggaaagctcctccaacattccctttccttatcgagatgagggagcggcattactgggtaacacatcggacagaaaggagcgtagatatgctactgcatggtaagaagccgctggttgaggttaggaaaagggatagcgagtttcaggttgtaattgaaagatgggcaacatatgatggcgatggactctgaacttgaaaccctgtcgtcataattgcttctatcaaagttcttaatttagtacttgatgtttctgtggacaagtgtgatctacactaccaagcctcttgttctgagtggattgcatgggcgaacattcgactgacaagtgacaactatccgaagcctgttcttacactgaaggcagcccacgaagcaattttgacatttcagctactttttagcggtcgaaaattgatgtcaattctaatgtatatatattttcctgtaagagaaggaacctaatgtatgtcagtgcttctaaattgtatgagatgtgtacatatgcatatgcatatccttattgttgttaatatactcattcccccttttctttcttttttattttcccctttgatttttaaacattggtgaactgaggtcctctattttactatgtatgtgagtattcaatgttttctctaagtgttaatggtgcatgcaatattcttagttttacaaacgtttttttttataatcccaagttttttgctcttactcaacccccattacccccaaaggaaaaaaaaagtatgtttgagatgtcttggttttggatttaataattttttagctcattggccctgtaatttttgtacattgtctgacttgtttatatgttctctaattgttaactgcactatttttataag

SEQ ID NO: 6545 - DNA, 2004 bp, Zea Mays
gtttagttgtgggaagaaaaagggaccgcgcggagtggcgaaagggtaagcaaagcgttatccatcccgtccggacacgccaaccgctcgctcccttgcgcgcgactgcgctaccgccggcgccgccgcgtcggcattagcttgccgcgcgatggacatgtgtgccccacgccgcctgctcctcttctcactccccaccccgaagctctctccggagcatcctttgttcaggcaacggcgcaggggcaggacctggcccggcatcgctcgctgcgccactgaggttggcactggatggggaggcatcgtcgaggacgacctttctgagctcctgcagattctcccgagagatttgcgagataatctacagaatgagcctagaaaggaccaacttctggaggtcattctggatttgggaagacgaccagaggcacgattccttggtgactccggtggccaatatctacgggacagtgagatctcacaaaaagagttggaggatgctcagaaggctgtaggagagtttggaggtgacaaccgtgcaggaattgaaggtactttacataggatatctgctataaggagtaggaaaggaatggttgttggtttgacctgtcgagtcggccgagctgttactgggcatgttgacatggtccgtgatctcctaaattacaaagaaagtatcctatttttgggaaggcctggggtcggcaagactactgttatgcgtgagattgcgcgtgttttagcagatgaatttcagaaaagagtggtaattgtggacacaagtaatgagattggtggggatggggatgttcctcatgctgcgattggtggagcaagaaggatgcaagtacctgaaccatcaatgcagcatagggtgatgattgaagcagttgaaaaccatatgcctgaggtggttattgtagatgagatcggaactgaagcagaagcacaagcttgtcgatcaattgcagaaaggggtgttatgcttattggcactgcccatggagaacgacttgcaaacatcattaagaacccaaccttatctgacttgattggaggtgtagaaactgttacccttggagacgatgaggctcgtgctcgacggagtcagaaaagtattctggagaggaaagctcctccaacattccctttccttatcgagatgagggagcggcattactgggtaacacatcggacagaaaggagcgtagatatgctactgcatggtaagaagccgctggttgaggttaggaaaagggatagcgagtttcaggttgtaattgaaagatgggcaacatatgatggcgatggactctgaacttgaaaccctgtcgtcataattgcttctatcaaagttcttaatttagtacttgatgtttctgtggacaagtgtgatctacactaccaagcctcttgttctgagtggattgcatgggcgaacattcgactgacaagtgacaactatccgaagcctgttcttacactgaaggcagcccacgaagcaattttgacatttcagctactttttagcggtcgaaaattgatgtcaattctaatgtatatatattttcctgtaagagaaggaacctaatgtatgtcagtgcttctaaattgtatgagatgtgtacatatgcatatgcatatccttattgttgttaatatactcattcccccttttctttcttttttattttcccctttgatttttaaacattggtgaactgaggtcctctattttactatgtatgtgagtattcaatgttttctctaagtgttaatggtgcatgcaatattcttagttttacaaacgtttttttttataatcccaagttttttgctcttactcaacccccattacccccaaaggaaaaaaaaagtatgtttgagatgtcttggttttggatttaataattttttagctcattggccctgtaatttttgtacattgtctgacttgtttatatgttctctaattgttaactgcactatttttataag

SEQ ID NO: 6546 - DNA, 2022 bp, Zea Mays
ctcaggtttagttgtgggaagaaaaagggaccgcgcggagtggcgaaagggtaagcaaagcgttatccatcccgtccggacacgccaaccgctcgctcccttgcgcgcgactgcgctaccgccggcgccgccgcgtcggcattagcttgccgcgcgatggacatgtgtgccccacgccgcctgctcctcttctcactccccaccccgaagctctctccggagcatcctttgttcaggcaacggcgcaggggcaggacctggcccggcatcgctcgctgcgccactgaggttggcactggatggggaggcatcgtcgaggacgacctttctgagctcctgcagattctcccgagagatttgcgagataatctacagaatgagcctagaaaggaccaacttctggaggtcattctggatttgggaagacgaccagaggcacgattccttggtgactccggtggccaatatctacgggacagtgagatctcacaaaaagagttggaggatgctcagaaggctgtaggagagtttggaggtgacaaccgtgcaggaattgaaggtactttacataggatatctgctataaggagtaggaaaggaatggttgttggtttgacctgtcgagtcggccgagctgttactgggcatgttgacatggtccgtgatctcctaaattacaaagaaagtatcctatttttgggaaggcctggggtcggcaagactactgttatgcgtgagattgcgcgtgttttagcagatgaatttcagaaaagagtgggcaggtaattgtggacacaagtaatgagattggtggggatggggatgttcctcatgctgcgattggtggagcaagaaggatgcaagtacctgaaccatcaatgcagcatagggtgatgattgaagcagttgaaaaccatatgcctgaggtggttattgtagatgagatcggaactgaagcagaagcacaagcttgtcgatcaattgcagaaaggggtgttatgcttattggcactgcccatggagaacgacttgcaaacatcattaagaacccaaccttatctgacttgattggaggtgtagaaactgttacccttggagacgatgaggctcgtgctcgacggagtcagaaaagtattctggagaggaaagctcctccaacattccctttccttatcgagatgagggagcggcattactgggtaacacatcggacagaaaggagcgtagatatgctactgcatggtaagaagccgctggttgaggttaggaaaagggatagcgagtttcaggttgtaattgaaagatgggcaacatatgatggcgatggactctgaacttgaaaccctgtcgtcataattgcttctatcaaagttcttaatttagtacttgatgtttctgtggacaagtgtgatctacactaccaagcctcttgttctgaggtcgtacgtggattgcatgggcgaacattcgactgacaagtgacaactatccgaagcctgttcttacactgaaggcagcccacgaagcaattttgacatttcagctactttttagcggtcgaaaattgatgtcaattctaatgtatatatattttcctgtaagagaaggaacctaatgtatgtcagtgcttctaaattgtatgagatgtgtacatatgcatatgcatatccttattgttgttaatatactcattcccccttttctttcttttttattttcccctttgatttttaaacattggtgaactgaggtcctctattttactatgtatgtgagtattcaatgttttctctaagtgttaatggtgcatgcaatattcttagttttacaaacgtttttttttataatcccaagttttttgctcttactcaacccccattacccccaaaggaaaaaaaaagtatgtttgagatgtcttggttttggatttaataattttttagctcattggccctgtaatttttgtacattgtctgacttgtttatatgttctctaattgttaactgcactatttttataag

SEQ ID NO: 6547 - DNA, 733 bp, Zea Mays
ctgcagtgggcacccactggtggctcgaaaccagctggattttctttccacttcggtgtgctggtcgacgtggtccttctctcctctcgtctccacagtccacacacaccgtgtgcggcggtagctgctgctgcccgtgcctaccgaagaagacaagtccaacactgttgttctgttccgtgattgcggaatttgcttcaccacaccttcatcagagagccgagacgacacgctcgagacccagcaaggcaagaagaacacgagagagacagcaggcaccaggcagggatcaatcatccgtccatggagaacctaaaggagggagggaagaagttcctgagctacttccggtgttgtatcaaggcctgaagaggtgctgctctagtgcctgcagtccctgtgtttttttttcgcagcagaacacttgtgagcaatcaggcctcggttttgttaagtaccccgtgtccaaaaacgtgtaatatatttgtccttatggatcagtcgttgggcctgtatgaagaacagaccagtttatggggtaagcaacgttctttttgtacacatacatcaccatcgatttgtccttgatacgatcaaggggcatggttcgaatgaattggttttgtaattatgatgggaaaatacgtacggaaagcacaaatgactcctggcacctttttctataggagcacacaattttttatatatagaagtgtggagacttctcagcgaa

SEQ ID NO: 6548 - DNA, 349 bp, Zea Mays
ctgcagtgggcacccactggtggctcgaaaccagctggattttctttccacttcggtgtgctggtcgacgtggtccttctctcctctcgtctccacagtccacacacaccgtgtgcggcggtagctgctgctgcccgtgcctaccgaagaagacaagtccaacactgttgttctgttccgtgattgcggaatttgcttcaccacaccttcatcagagagccgagacgacacgctcgagacccagcaaggcaagaagaacacgagagagacagcaggcaccaggcagggatcaatcatccgtccatggagaacctaaaggagggataacatttcgttccataatcttgag

SEQ ID NO: 6549 - DNA, 1914 bp, Zea Mays
gcatgtgcaggcgtatctggcaggtttgatctgactctggggctctcacatgccctcacttcattcatgtggctatgcggtcctattgctggcttagtggtccaaccgctggttggcctgtacagcgataggtgcacagcaagatggggaagacgcaggccatttatcctgataggatgcatgctcatctgccttgccgtcattgttgttggcttctcgtccgacatcggagctgctctaggggacacaaaggaacactgcagcctctaccacggccctcgttggcatgctgcgatcgtgtacgttctggggttttggctccttgacttctccaacaatactgtgcaaggtccagcgcgtgctatgatggctgatctgtgcggtcatcatgggcctagtgcagccaactcaatcttctgttcttggatggcgctgggaaacatcctaggctattcctctggctccacaaacaactggcacaagtggtttccgttccttatgacaaacgcgtgctgtgaagcctgcgcaaacctgaaaggcgcgtttctggtggctgtgacacgtttttatgtcttccaacaggtgttcctagtcatgtgcttgactataaccctgttcttcgccaaggaagtgccctacagaggaaaccagaacctccccacaaaggcaaacggcgaggtcgagactgaaccttccggcccactcgctgtgctcaagggcttcaagaacttgcccacggggatgccgtccgtgctcctcgtaactggactcacctggctctcttggttcccgttcatcctctacgacaccgactggatgggccgtgagatctaccacggcgaccccaagggtagcaacgctcagatctcggcgttcgacgaaggcgtcagagttggctcgttcgggctgctgctcaactcgatcgttctaggattcagctcgttcctgatcgagcccatgtgccggaaggtcgggccgagggtggtgtgggtgacgagcaacttcatggtctgcgtcgccatggcggccaccgcgctgatcagcttctggtcgctcaaggactaccacggatacgtgcaggacgccatcaccgccagcacgagcatcaaggccgtctgcctcgtcctcttcgcgttcctgggtgtccctctcgccatcctgtacagcgtcccgttcgcggtgacggcgcagctggcggccacgaagggcggcgggcaggggctgtgcaccggcgtgctcaacatctccatcgtcatccctcaggtgatcatcgcgctgggcgcgggcccgtgggacgcgctgttcggcaagggcaacatcccggcgttcggcgtggcgtcggggttcgccctcatcggcggcgtcgtgggcgtgttcctgctgcccaagatctccaagcgccagttccgcgccgtcagcgcgggcggccactgatcgcggccgccgcgccggagcacggcacggcggcacagcccagccgtgctagagctgtatgttttgaaagttgaaacagaataagaagcgggcgaaacgagaaaaccatgcatgtcatgtgtgtgcttttgttgtgtgtggggtggggcaagcgaggcgaggtgtgtggaggtgaagtgaaggtgagcatatccagcaccagctggtaccaaggtcgggtctctgtgctagtgctattagctagtgtaaggagcgagtaggtcagttaaggctggtgcgtcgtgagggctgtcttgtgtgtagctacagcagacggttcatcagaaggattattcgtgcagtatatacagtacaactagacaatgatgttgatgattggtctagagctagaggcctatagccctatactactgtgtattgtccgccgttttagttttttggtcccatcccatcaatgcaaccgccttgttttgctccaat

SEQ ID NO: 6550 - DNA, 1883 bp, Zea Mays
gcatgtgcaggcgtatctggcaggtttgatctgactctggggctctcacatgccctcacttcattcatgtggctatgcggtcctattgctggcttagtggtccaaccgctggttggcctgtacagcgataggtgcacagcaagatggggaagacgcaggccatttatcctgataggatgcatgctcatctgccttgccgtcattgttgttggcttctcgtccgacatcggagctgctctaggggacacaaaggaacactgcagcctctaccacggccctcgttggcatgctgcgatcgtgtacgttctggggttttggctccttgacttctccaacaatactgtgcaacgcgtgctatgatggctgatctgtgcggtcatcatgggcctagtgcagccaactcaatcttctgttcttggatggcgctgggaaacatcctaggctattcctctggctccacaaacaactggcacaagtggtttccgttccttatgacaaacgcgtgctgtgaagcctgcgcaaacctgaaaggcgcgtttctggtggctgtggtgttcctagtcatgtgcttgactataaccctgttcttcgccaaggaagtgccctacagaggaaaccagaacctccccacaaaggcaaacggcgaggtcgagactgaaccttccggcccactcgctgtgctcaagggcttcaagaacttgcccacggggatgccgtccgtgctcctcgtaactggactcacctggctctcttggttcccgttcatcctctacgacaccgactggatgggccgtgagatctaccacggcgaccccaagggtagcaacgctcagatctcggcgttcgacgaaggcgtcagagttggctcgttcgggctgctgctcaactcgatcgttctaggattcagctcgttcctgatcgagcccatgtgccggaaggtcgggccgagggtggtgtgggtgacgagcaacttcatggtctgcgtcgccatggcggccaccgcgctgatcagcttctggtcgctcaaggactaccacggatacgtgcaggacgccatcaccgccagcacgagcatcaaggccgtctgcctcgtcctcttcgcgttcctgggtgtccctctcgccatcctgtacagcgtcccgttcgcggtgacggcgcagctggcggccacgaagggcggcgggcaggggctgtgcaccggcgtgctcaacatctccatcgtcatccctcaggtgatcatcgcgctgggcgcgggcccgtgggacgcgctgttcggcaagggcaacatcccggcgttcggcgtggcgtcggggttcgccctcatcggcggcgtcgtgggcgtgttcctgctgcccaagatctccaagcgccagttccgcgccgtcagcgcgggcggccactgatcgcggccgccgcgccggagcacggcacggcggcacagcccagccgtgctagagctgtatgttttgaaagttgaaacagaataagaagcgggcgaaacgagaaaaccatgcatgtcatgtgtgtgcttttgttgtgtgtggggtggggcaagcgaggcgaggtgtgtggaggtgaagtgaaggtgagcatatccagcaccagctggtaccaaggtcgggtctctgtgctagtgctattagctagtgtaaggagcgagtaggtcagttaaggctggtgcgtcgtgagggctgtcttgtgtgtagctacagcagacggttcatcagaaggattattcgtgcagtatatacagtacaactagacaatgatgttgatgattggtctagagctagaggcctatagccctatactactgtgtattgtccgccgttttagttttttggtcccatcccatcaatgcaaccgccttgttttgctccaat

SEQ ID NO: 6551 - DNA, 211 bp, Zea Mays
gcaaaggcatctaaaatcatatagtctctattgaaacgatacaatctctataggaaaatagtgactcatgagtagctgaacaagattgatctcagtatgccgaaaaaattgtgaattagagtaatcaattatattatcttcattatttgcatataattatacttttgcaggtggtattaatggagaaagatcaaaaatagctgaaattgaa

SEQ ID NO: 6552 - DNA, 1406 bp, Zea Mays
ttatttccccccaaaacaaaccataaccggccaattctcacgcactcgccgcctaggagcgttcacgttgactgcgggcgacggctcgcttcctctcctccaccgcacctccaagaatccacccctgcctcactcgcatggttcactgtccgatgtctcgcgtccacacctgtcggctgccacagatctagccctgcctacagtgctagcaccaccatgcgtcccgttcacctcgtcgtccgcccctggcccttgcctcaccgacttgtggccgccgcggctccatgtgggacacggccatgcctgacgcctccaccgccatgattgagctaacgactccactccatgggatggtccacggtgggccatggcagctcgccggctccaacctccccctctagcctacagtgctccaccgtccggtcgctagtgctcctccatggaccacggctgacggttgcacgcaccgcctatcgcctagccatgctctggtgtgaaggacatccgcttctgcccctgcacatcccgcccttagtcgcgcacctcagcctgttccttggaccgacggctattgtcttgaggcgtatggtggccgcccacctcgtacccagtcaccagatctcaaggcttcaagctcttgtttattgtttcattgatggccatgcccaaaatcaagcgatcacatgctgcaagggttgtgggagcaataggtgaaaagaataaagtcatatatgaggatgtcttgtactattgttttcacatacgagatctttctaccaattagttttttttgtctacctcatgtatatataggattttgttattctaggctctaaaatagtgcattctggtgtaatgcagatgttacactgatattctaactgtatattgagctaggttcctacgtagttgtgtcattcaaagagcaattcttgttagttctttcatgtatcagattgttctaagttataactacctgaaatctttatcattttaagaaaagtaaagtcttactgctccttttgctttgttgtatcagacatgtctctaaatcttcggtgactttattttgctacttatccttagtgattgttcactccatcgctctgcctgttatagtactatgccttattctccatataattgtgtagttgtttttttctcaaattgatatgaattgtatattcaggctacatactacatgatcgatatatggttgaaaattaatgtttagtttatttttctatattgtggaacatgtgtaatgagcaacttattttcagtgtatggttagaaacaaaaaggtctgattgtcgttgatcactggatctataggcaggtcaatactgtcgtcaatttgtacctaatttcttgtcattcatttcataaaaacaggtagttttgat

SEQ ID NO: 6553 - DNA, 1038 bp, Zea Mays
ctctcatctaacctagtgcagcaccaacacaccaaatatgtcgagaatgacctttaatttatccgagagcgtgtagctgctggagctattcgtgttctccatgttccgacattctcttagtataccgatatcttcaccaaatgacacccgtcctttgtgttttttgatttttggtccaccgacgttcctattatgggggtgttaggcaggagattgattcccttccatccgtggcttgattgattcatgtgattgatttggttgccctcccggaccctataaacggggatgagggttgcctatatatttgtatccttgtacaacaggatgaatcaagtctacaattcccacatattcatttaccttcagtatcttcttcattcactatatctcaatattttgcacattcacttgtattttgatttaaccacagtccacaaccacgcgcggcgggggagattcggacgtcgctgtcggtgattcttgcggagggggagaaggtggcgccggcggacagtctggcggccgttgctgcttgggtgctgctgccatggcgcctagcgagcgaagacggcgaccggagtacaagtcacaggggctcggacagtcacgggttctgcagctccgaggagaaagtcagagcggggcactataatcattcactcggcaagatcagagcagacaacgacattacaagtgaaaggctccatttctgaacttgggaatacttgattctataagtgaaagctgtgttgttgtgtagactcgattctataagtgaaagttgtgttgttgtgtgtgtcatgatcgtaaaaagctccgattaaagtgtcctaaggttgcaatcgtgtttcagtgaaataaactgcaacagcaactgggataggtgaccttcaagtggatcctataaattctctgaactgcacttggatgcttcggtcatagccagatcagcgaaccataaccatgtctctcctgtaacgacatcaggatacccagggatggagcccaatttttttaggacagactaaactaaac

SEQ ID NO: 6554 - DNA, 1704 bp, Zea Mays
cacagtctcgtatctttggaatcacgatcagctgatgaaaatgcaaaatgtaggaatggattagcagggaaacaggagtattagaacgtaatggttacatgagactgctgacaatcagccgatgtccagttaattccggaaccgcgcagacggcagaaatcgctatgaagaagaataagggctgaagcaattggacaggctgctgcctctgtgcatagatagcatccttcataaatacgaggaagtccacttcacttgtatctttattcagtggactcagcaacccatcacggcgcagttatacacgaagttcccagatggccgcctggcaatcaaattccacacgggcggccgctcatctgggatccacgagttgagctcgatggtaccaccggtataggtcctcggacctccgatgacaatcaagcggtcaccgcacgctcggaaggcaagcccccacccattcattgacacggaccgctcaggcagttttccgagggtgatccacctgttgttcttcttgtcatacttcttgagatccttctcgccgtaatcggcggcgtagagctcgttgctgacaaccgcaataaggggaggagcaccggtcactccattgaggcctccagacatgttctcgattgtcctccaagaacccctcttcaagtcgtactcctccccgcaggtcagcactctgttgctgttggccacaccacctatcacgtagaacttgccatccatgaacaccccagaacacatcttcctcgccgtgttcatgctcgggaggggcgtccaggtatgtgtctcagagtcatacatctctgcagagctcagtatgttgccgacacaatcagtgcctccggcgacgaaggccttcccgccgacactcgttgacccgaacaggcaccgcggagagttcatcggatcagccctgctccatgagttggtcaggatgctgtatcggaagacgatacgcgccatcccgaacacaagcagctcagtgcccaccgcaagcgattccttgtcggagcacttgaagcattcatcaggcggcatcttgggcacttggatccaccgctcccggtatgggtcgtaggcatcccattcgagaacgttgcaggagaagtagacccaatgctcggccaccccgttctggcgccgcagccggtagatctccccgctgcggaccatggagcggaagtcccggctgagggaggccaccgagccgtagtcggaccgagatagccggaggaggcaattgagggtcaggtcacgaccgatcgaagtcatggggttgctcccggtgatccgctgctctccggaaccggttgcgtggcggttggagccgtggccctcgcagatgtccggcgtgtgcggctgcggagatggcggcttgctgcgcttgccgccgctgccagtttcgtccgggtcttcgacctcgacgtcatcttccggcgccgggcgcttgccgctgaggaccgcgtgggcgaggtactcccactccgcctccggctcgcaggagctcggcacggagcgtgacacaagtgacacgattgtgtgtgtgagccaggctgcggatgcaaccttctttcgcgttgcattaggcgtctcctgaaacaatgtggtggtgctgcaggagcatagtacatgttccacaccgaatacgtggcggcaccaaatccttgcacagattaaggggcgacaatc

SEQ ID NO: 6555 - DNA, 2326 bp, Zea Mays
cacagtctcgtatctttggaatcacgatcagctgatgaaaatgcaaaatgtaggaatggattagcagggaaacaggagtattagaacgtaatggttacatgagactgctgacaatcagccgatgtccagttaattccggaaccgcgcagacggcagaaatcgctatgaagaagaataagggctgaagcaattggacaggctgctgcctctgtgcatagatagcatccttcataaatacgaggaagtccacttcacttgtatctttattcagtggactcagcaacccatcacggcgcagttatacacgaagttcccagatggccgcctggcaatcaaattccacacgggcggccgctcatctgggatccacgagttgagctcgatggtaccaccggtataggtcctcggacctccgatgacaatcaagcggtcaccgcacgctcggaaggcaagcccccacccattcattgacacggaccgctcaggcagttttccgagggtgatccacctgttgttcttcttgtcatacttcttgagatccttctcgccgtaatcggcggcgtagagctcgttgctgacaaccgcaataaggggaggagcaccggtcactccattgaggcctccagacatgttctcgattgtcctccaagaacccctcttcaagtcgtactcctccccgcaggtcagcactctgttgctgttggccacaccacctatcacgtagaacttgccatccatgaacaccccagaacacatcttcctcgccgtgttcatgctcgggaggggcgtccaggtatgtgtctcagagtcatacatctctgcagagctcagtatgttgccgacacaatcagtgcctccggcgacgaaggccttcccgccgacactcgttgacccgaacaggcaccgcggagagttcatcggatcagccctgctccatgagttggtcaggatgctgtatcggaagacgatacgcgccatcccgaacacaagcagctcagtgcccaccgcaagcgattccttgtcggagcacttgaagcattcatcaggcggcatcttgggcacttggatccaccgctcccggtatgggtcgtaggcatcccattcgagaacgttgcaggagaagtagacccaatgctcggccaccccgttctggcgccgcagccggtagatctccccgctgcggaccatggagcggaagtcccggctgagggaggccaccgagccgtagtcggaccgagatagccggaggaggcaattgagggtcaggtcacgaccgatcgaagtcatggggttgctcccggtgatccgctgctctccggaaccggttgcgtggcggttggagccgtggccctcgcagatgtccggcgtgtgcggctgcggagatggcggcttgctgcgcttgccgccgctgccagtttcgtccgggtcttcgacctcgacgtcatcttccggcgccgggcgcttgccgctgaggaccgcgtgggcgaggtactcccactccgcctccggctcgcaggagctcggcacggagcgtgacacaaggcgacataatcgaatagaaaaaaaaataagcggggatgatatcaacgggaacaaagggatcaagaacaggtgaagacgtgagatctggggagcacgaacctcgtgaataaaacaggcacaaaaatctaatcttgcagcgcgaacccgaccgatctcaccaaatctgtgaagaagaaaacaaaaaaaaaaaacaaaatctctttctcagctcggcgataagtcggatgacaggaatccgggccagccaagcaagacgccaaaataaggaaaaggaggtcaccttaaaccaaatccatggcagattgcgggcaccaaatctgcgttcaaagatcgcgcactggagcccaatcagaggtcctggccgccactccacccccgagaaatcccctccggttcccggtcctcccctcgccccctaccgatgcgcgaggatttatacctgtagagctagatagatggatagacggatggctggctctatcttctgatgccacttggttacaactgccgcttctaatgcttctggcctctgctgcagcctctgctgtctccctcgacctccctctctcgtagcgtgctcctctgctcccccctctctctctttctctcgtgtagggcttggggaaatgggactctcccctccttcactcccgctttcgcttggcaagtggtggccggtggggaaggggcatgggaaccctatcgaatttctctctcctgctctgccctgcccctctctctcctccctttcgcttttgtgtgcgtccgtctgttttggctcgtc

SEQ ID NO: 6556 - DNA, 209 bp, Zea Mays
cgactttaggtcctcaatggccacccaagcagcaatctcctcccaaatccgtttggtggaccgccattccacgaatagatgtagccccgattctaggacagcctggcacaaagcacaatgtcgggtggctagcatttttgttccaattgtcatcacattgtctatagtaacattttctgcgtggtttttgttgtgaaaaaaaaaaaaaa

SEQ ID NO: 6557 - DNA, 1380 bp, Zea Mays
atctcgtccaagcttcctgtgccgtcttccgttccactcaaatctgctgtgaacacaggctagcaggtgaaagatcgatgtcgaacgctgccatcgcgatcggtaccatcatattcgtcattttcgtcgccgcgataattgcctgcgcctacaggcgggccgaggcatgcgccggcggcgtcgcgaggagctacgcggtggtgtcggaccaacagatccggcacgccaccatcgagaaattcctctcggagatcaggcacgagaagcccttcaggttcacgtcgcagcagctcgccgggttcacgggcaactacacgacccggctcggcgccggcggcttcggcacggtgtacaagggcgtgctccccaacggcctcgccgtggcggtcaaggtcttcgaccgcagcctcacgcagaggtcccaggaggagcagttcatggccgaggtgggaaccatcggccgcacgtaccacgtcaacctcgtcaggctcttcggcttctgcttcgacgacgtcgcgcgcgccctggtgtacgagtacatgggcaacggcgcgctcgacgcctacctcctgggccggggccgcggcgccggcctcccggcgctacgcgacatcgccgccggcgtcgccaggggcatccggtacctgcacgaggagtgccagcagaagatagtgcactacgacatcaagcccgggaacgtgctcctcgacgccgccctcacgcccaaggtcgccgacttcgggctcgcgcggctggtgaaccgcgccgacacgcacgtgtccgtctcctgcgtgcgcggcaccccgggcttcgccgcgccggagatgtggatgctgtcgggcgtcacggagaagtgcgacgtgtacagcttcggcatgctcctgctcgagatcgtcggccggcgccggaacttccacgaggaggcgtccgagagccagcagtggttccccacgctggcgtggaccaagtacgagagcggcgagctcgtggacctcgtcgcgtgcagcagcggcaccggcgcggatggtggtgcggccgccgcgccgggtgaggagaaagaacatgagctgcagcgcgacaaagagatagtggagaggatgtgcaaggttgcgttctggtgcgtgcagcagcagccggaagcgaggccgcccatgggtgcggtggtgaagatgctagaggcacctgcccagctgccgtgacgcgaaatggacccatggtatggcagtttgcacaccctgcttaactagtatccattcatccatattgtcctcaaccttttattgtcatcagtggatctgatcatttgttttgcaccgcaattaaataaataggttccttagggtgttagggtagtacaagtcttcccaaccagtgtttgag

SEQ ID NO: 6558 - DNA, 1080 bp, Zea Mays
gtgggttacccattcattcgtgcagtactgcagtgtgttcctagtcctccgctttgatgagaatgcgcattgtatcagtggcgccaaaatgggccacctctattagatcattttgcggttcatgtttcatcataaggaatgaacagtagtcgacaaatggaactccactacataaacactggatttccatacacaatcaccgagagcttcatggatttctttgagggtctcacttatgctcatgctgactttgctctcacggatggctttcaagatcagggtaatccatactgggcaatgatgcatacaaactcgtacaagtatggatactctggtcctgggaactattacagttatgctcatgtctatgacatagacgattacatgcgtagagcggatggtgggcgcagaatatgggataacactacacctgtaaacaatgttgattctgccaatgttgtcctgcagggtggtgaagctccccacacaacgacaaatactattaacaaggaatgcatccaacaggtacaccaaagtccaggtagtcctcaggttgtttggcaagataacattgagcctgataatatgacatatgaggaactgttggatttgggtgaggcagttggaacccagagccgtggtctctcccaagaacgcatttcatcgcttcctgtcacgaagtataagtgtgggtttttttcaaggaagaaaacacgccgtgagaggtgtgtgatttgccaaatggagtacaggagaggaaatttgcagatgacacttccatgcaagcatgtataccatgccagctgcgtgacaagatggcttggcataaacaaggtatgccctgtttgctttgctgaagttcctggcgaggatcctgaggcaatgagtcaacagttatgaggccactgggaagttgttgcactttgaagctgagtactgcccccaatgaatgcatgatgttgcttgaaggcagcttattgtccccactttataatgtgtattagcacgtatacaaatataggtattgtagatcagatgtatttagtgttgggtcagcgttttgtacgtaatcaatcagga

SEQ ID NO: 6559 - DNA, 947 bp, Zea Mays
tccgacctctacatctccatccgcggaagcagaccacctccaatccttctctttcacgcagtcattgcttgcctccttagcccaactgttggtaccagaggttcatgtttcatcataaggaatgaacagtagtcgacaaatggaactccactacataaacactggatttccatacacaatcaccgagagcttcatggatttctttgagggtctcacttatgctcatgctgactttgctctcacggatggctttcaagatcagggtaatccatactgggcaatgatgcatacaaactcgtacaagtatggatactctggtcctgggaactattacaggtggtgaagctccccacacaacgacaaatactattaacaaggaatgcatccaacaggtacaccaaagtccaggtagtcctcaggttgtttggcaagataacattgagcctgataatatgacatatgaggaactgttggatttgggtgaggcagttggaacccagagccgtggtctctcccaagaacgcatttcatcgcttcctgtcacgaagtataagtgtgggtttttttcaaggaagaaaacacgccgtgagaggtgtgtgatttgccaaatggagtacaggagaggaaatttgcagatgacacttccatgcaagcatgtataccatgccagctgcgtgacaagatggcttggcataaacaaggtatgccctgtttgctttgctgaagttcctggcgaggatcctgaggcaatgagtcaacagttatgaggccactgggaagttgttgcactttgaagctgagtactgcccccaatgaatgcatgatgttgcttgaaggcagcttattgtccccactttataatgtgtattagcacgtatacaaatataggtattgtagatcagatgtatttagtgttgggtcagcgttttgtacgtaatcaatcagga

SEQ ID NO: 6560 - DNA, 544 bp, Zea Mays
  misc_feature (1)..(2): n is a, c, g, or t
nntccgacctctacatctccatccgcggaagcagaccacctccaatccttctctttcacgcagtcattgcttgcctccttagcccaactgttggtaccagaggttcatgtttcatcataaggaatgaacagtagtcgacaaatggaactccactacataaacactggatttccatacacaatcaccgagagcttcatggatttctttgagggtctcacttatgctcatgctgactttgctctcacggatggctttcaagatcagggtaatccatactgggcaatgatgcatacaaactcgtacaagtatggatactctggtcctgggaactattacagttatgctcatgtctatgacatagacgattacatgcgtagagcggatggtgggcgcagaatatgggataacactacacctgtaaacaatgttgattctgccaatgttgtcctgcagggtggtgaagctccccacacaacgacaaatactattaacaaggaatacacatgtgatgccagagttttcatgagtaatgtttgcgatcaag

SEQ ID NO: 6561 - DNA, 3534 bp, Zea Mays
gtttaaatttcaaataagctaaactttttcttaatttttttctaatctcattcaatctatatgtaataggaataaccaaacaaagctctcataggatttaatcccacaacctagattccttaggaaaaataaaaagaggttaaacctcatgcaaaaattcctttgattggatgcacccatctcaaacaattattttaaactttttaatccccttatttttttctgtggtgtagccctttagttttgaattctgtagagttagaaaatacatgggttctattttcctgaaaaccggtgttccaaagaagccctagaattctagagcttgcaaaaggcaagacgcggtatccaattcccctctcgcgtacataaacgacggagaaaaggacacaacccagcccgccctaaaaccctcccaccatcatgtcgctctccacactcagccacccggccgccgccgccgccgggagcggaaaatcccttttcccggctggcccggcggcgcagtccgtacatttccccaaggcacggctccctgtccccgccgccgtctccgccgctactgcggctgttcacgcggaggatagggtttcgtcgctgactcaagtctccggcgtgctggggtcgcagtggggcgacgagggaaagggcaagctcgtcgacgtgctcgccccccgcttcgacatagtcgcgcgttgccaggggggagcgaacgctggacataccatctacaactcagaaggcaagaagtttgctctgcatcttgttccatctggtattctccatgaagggacactgtgtgttgttggcaatggagcagtgatccatgttccagggttctttggagaaattgatggtcttgagtccaatggagtccgctgcgatggaaggatactggtagccgaccgggcacatctgctgtttgatctgcaccaggctgtggatggacttagggaagcagagcttgaaaattcatttatagggacaactaagagaggcattggtccttgttactccagcaaggtaactcgaaatggactgcgggtttgtgatttacgacacatggacacttttggggataagcttgacatcttattcaaagacgctgcttcgagatttcaaggctttcagtacagcaaaagcttgctcaaggaagaggttgagagatacaagaagtttgctgatcgcttggagcccttcattgctgataccgtgcatgtgctaaatgaatctatcaagcagaagaagaaaatcctggtcgaaggcggccaagcaactatgctggatattgattttggcacttatccatttgtgacttcttctagcccttcagctggcgggatatgcacaggcctagggattgctccaagggcaattggcgacctgattggagtggtcaaagcttacacatctagagtcggctctggccctttcccaactgaactatttggagaggaaggtgatcgccttaggaaagctggaatggaatttggcacaacaacaggtcgcccaaggcgttgcggctggcttgacattgttgcgcttaagcacagctgccaaatcaatgggttctcatcacttaatctgaccaaactggatgttctgtccgggttgtcagaaattaaggtcaactatgaggttctgcctgggtggcaaagtgacatttcttctgttcgaagatacgatgaacttccccaagctgcccgcctttatgtggagaggatagaagaacttgttggtgttcccgtgcactacattggtgttggacctggcagagatgctctcatatacaagtaaaagcaactttatttggtccttggttgggcggaaaccaggctgggactcgggagcatttgcattttcttggcgtggtaacttttgatacggtgaagtcactgactcgtggagtgatgttgctcaataatcattaatcagaaccttgtcctaatacagccgctgagacatcagctaaggcgaataagggaaggatgagtcatttgcaccatgtttgaccaccaattgttaggtggtccatatattttgtacttattgtgagactttgtgctatggatctcaactgtataccttgctggtgcatggctttgggtttacatggttgaaaatgagattggtgtactaattgtctatgtttaaccttgtcaacgcactgaagctagcgaaaaattgttctgagacagcgatgggaaaatccgaaactgcatgcttttttttaaaaaaaaaggaactaaagaacagtaggcactattggtcacatattcattatgccaaactcattgtcacccatcagattatcagaatcgattacatgaacttggaagctaaaggttgtgcgcgagctagtgaaaggtggtgtcacgtgcagcatgcagatgggcaggatattcaacgttgcatggactcgtcgtcgtagtacaaactagacgtcccagacagggatgggcaggcaggttccgaactggtcgacctcatgcagatcgtccatctgaaaccctccgttggcgccgccgtgggctcccgcaatgtcgttgagatccgctgctagcgcgtcccagtcgaactcgccattgccaccgaagcagccagcgtcggcggcatcaccgtgaaggctgcctttggcagtggccgtgccgtcgtcgtcggtcttgagcacgccgatctgctgcaagaactccctgaggtcgagctggggcttgtccgcgccgggcgggaaggcgccgccgccctcgaacggctcggcgtcgtcgaccgtcgtcatggcggccgtggccaccgcctgctccaggtccaggtccagggcgtggaagcaggacatgggcggcggcagagccgccgcagccgcgtgggtggtgacggtggagcagggagacgtggaggccaccgggagatgatcggccggggcgagctgctgctggcgggcagcaggagaaacccgcggtgccggcggcggtggcttggcgggcgagccgttgttcttgagctcctgcagcctctggtggatgacgtgcacgttgtgctgcgcgttgaggttgagcaggccgtaggccgggacggcggcggcggcggcgcccctggcggaggccgggagccacctgatcctctggtgggcggcggcggcggagacgcggaggtgcggcaggttgaggaaggcgtcgggcccgtagagcctgcgcgcggcctcgtcgtaggcgagcgcggcctcctcggcggtggcgaaggagccgagccagaggcgggtgcgcttgttgggctcgcggatctcggccacccacttgccccacgtccgctggcgcacgccgcggtactcgcacgccgcgttctgcgggccgcccttcccacgcgtcgggcccttcttccacgcgcgcttccggccgtagctctccatgggatccgcgcggcgtggaggtggagcgtggggagctcaggagaactagctagggtaggaggagcgagggtttattttgaacgccaagcagaagagagcgaggtagccgcggtggggagtgtagtgaagtg

SEQ ID NO: 6562 - DNA, 3523 bp, Zea Mays
gtcttgttcgttagctctcaatttatatggattgagtgagattgggtgagtttaaatttcaaataagctaaactttttcttaatttttttctaatctcattcaatctatatgtaataggaataaccaaacaaagctctcataggatttaatcccacaacctagattccttaggaaaaataaaaagaggttaaacctcatgcaaaaattcctttgattggatgcacccatctcaaacaattattttaaactttttaatccccttatttttttctgtggtgtagccctttagttttgaattctgtagagttagaaaatacatgggttctattttcctgaaaaccggtgttccaaagaagccctagaattctagagcttgcaaaaggcaagacgcggtatccaattcccctctcgcgtacataaacgacggagaaaaggacacaacccagcccgccctaaaaccctcccaccatcatgtcgctctccacactcagccacccggccgccgccgccgccgggagcggaaaatcccttttcccggctggcccggcggcgcagtccgtacatttccccaaggcacggctccctgtccccgccgccgtctccgccgctactgcggctgttcacgcggaggatagggtttcgtcgctgactcaagtctccggcgtgctggggtcgcagtggggcgacgagggaaagggcaagctcgtcgacgtgctcgccccccgcttcgacatagtcgcgcgttgccaggggggagcgaacgctggacataccatctacaactcagaaggcaagaagtttgctctgcatcttgttccatctggtattctccatgaagggacactgtgtgttgttggcaatggagcagtgatccatgttccagggttctttggagaaattgatggcattggtccttgttactccagcaaggtaactcgaaatggactgcgggtttgtgatttacgacacatggacacttttggggataagcttgacatcttattcaaagacgctgcttcgagatttcaaggctttcagtacagcaaaagcttgctcaaggaagaggttgagagatacaagaagtttgctgatcgcttggagcccttcattgctgataccgtgcatgtgctaaatgaatctatcaagcagaagaagaaaatcctggtcgaaggcggccaagcaactatgctggatattgattttggcacttatccatttgtgacttcttctagcccttcagctggcgggatatgcacaggcctagggattgctccaagggcaattggcgacctgattggagtggtcaaagcttacacatctagagtcggctctggccctttcccaactgaactatttggagaggaaggtgatcgccttaggaaagctggaatggaatttggcacaacaacaggtcgcccaaggcgttgcggctggcttgacattgttgcgcttaagcacagctgccaaatcaatgggttctcatcacttaatctgaccaaactggatgttctgtccgggttgtcagaaattaaggtgggtgtttcttatacccagactgatggacagaagctgcaatccttccctggggatcttgatacccttgagcaagtacaggtcaactatgaggttctgcctgggtggcaaagtgacatttcttctgttcgaagatacgatgaacttccccaagctgcccgcctttatgtggagaggatagaagaacttgttggtgttcccgtgcactacattggtgttggacctggcagagatgctctcatatacaagtaaaagcaactttatttggtccttggttgggcggaaaccaggctgggactcgggagcatttgcattttcttggcgtggtaacttttgatacggtgaagtcactgactcgtggagtgatgttgctcaataatcattaatcagaaccttgtcctaatacagccgctgagacatcagctaaggcgaataagggaaggatgagtcatttgcaccatgtttgaccaccaattgttaggtggtccatatattttgtacttattgtgagactttgtgctatggatctcaactgtataccttgctggtgcatggctttgggtttacatggttgaaaatgagattggtgtactaattgtctatgtttaaccttgtcaacgcactgaagctagcgaaaaattgttctgagacagcgatgggaaaatccgaaactgcatgcttttttttaaaaaaaaaggaactaaagaacagtaggcactattggtcacatattcattatgccaaactcattgtcacccatcagattatcagaatcgattacatgaacttggaagctaaaggttgtgcgcgagctagtgaaaggtggtgtcacgtgcagcatgcagatgggcaggatattcaacgttgcatggactcgtcgtcgtagtacaaactagacgtcccagacagggatgggcaggcaggttccgaactggtcgacctcatgcagatcgtccatctgaaaccctccgttggcgccgccgtgggctcccgcaatgtcgttgagatccgctgctagcgcgtcccagtcgaactcgccattgccaccgaagcagccagcgtcggcggcatcaccgtgaaggctgcctttggcagtggccgtgccgtcgtcgtcggtcttgagcacgccgatctgctgcaagaactccctgaggtcgagctggggcttgtccgcgccgggcgggaaggcgccgccgccctcgaacggctcggcgtcgtcgaccgtcgtcatggcggccgtggccaccgcctgctccaggtccaggtccagggcgtggaagcaggacatgggcggcggcagagccgccgcagccgcgtgggtggtgacggtggagcagggagacgtggaggccaccgggagatgatcggccggggcgagctgctgctggcgggcagcaggagaaacccgcggtgccggcggcggtggcttggcgggcgagccgttgttcttgagctcctgcagcctctggtggatgacgtgcacgttgtgctgcgcgttgaggttgagcaggccgtaggccgggacggcggcggcggcggcgcccctggcggaggccgggagccacctgatcctctggtgggcggcggcggcggagacgcggaggtgcggcaggttgaggaaggcgtcgggcccgtagagcctgcgcgcggcctcgtcgtaggcgagcgcggcctcctcggcggtggcgaaggagccgagccagaggcgggtgcgcttgttgggctcgcggatctcggccacccacttgccccacgtccgctggcgcacgccgcggtactcgcacgccgcgttctgcgggccgcccttcccacgcgtcgggcccttcttccacgcgcgcttccggccgtagctctccatgggatccgcgcggcgtggaggtggagcgtggggagctcaggagaactagctagggtaggaggagcgagggtttattttgaacgccaagcagaagagagcgaggtagccgcggtggggagtgtagtgaagtg

SEQ ID NO: 6563 - DNA, 208 bp, Zea Mays
gtcaaatcctaaattttcaatggcttctaagaaagaccctgtccaaacagcaacaaacaagacatcatagtcagaaaactgcactgcaatgcagatttggatttccatagtggaacatatgatatcgccatccaaatacacaattcataccgaactttattctcgtgttgcacagaacatcgggatttggtgtacgaccacagcgata

SEQ ID NO: 6564 - DNA, 174 bp, Zea Mays
gagatacttgtatagctccacaatggatttgttaaaaacattgatccctaagaaaaaaaggtacagtgtatacctttccaagaaagcatatcccttgtgagtctttcctaccttggttaggaaggcccatttgagtagccagtctgcgaacctcatcctgcatgatacaggata

SEQ ID NO: 6565 - DNA, 1697 bp, Zea Mays
agagataggaaagggcccaacagctcaacagaaaagccaagcaaaggctgctgcatactggaaggccctctgtctgtgtgcgagcgcaagagaaagggagtcagagagagagagagagggaggagaccttgcagaggagcgaagcaagcaaggtgggaaagaggcagcagcaagggcggcgggctgccggaaggggaacatgctccctcctcatctcacagagaatggcgcggtgatgattcagtttggccatcagatgcctgattacgactccccggctacccagtcaaccagtgagacgagccatcaagaagcgtctggaatgagcgaagggagcctcaacgagcataataatgaccattcaggcaaccttgatgggtactcgaagagtgacgaaaacaagatgatgtcagcgttatccctgggcaatccggaaacagcttacgcacataatccgaagcctgaccgtactcagtccttctacgcaccttttcaggccatatcatacccatatgccgatccatactacggtggcgcggtggcagcagcttatggcccgcatgctatcgtaagtgatctccatgcgtccagcctgttgtttcactacttgctgccggtgctagatgatgccctttgtccactttgaagacactttgctaggcaatgcggtcagtactggtgctttctttttgtttttcctgtgcgttattgcgtttagtggtgttcttcatttgctagcacagcatgcctatcggctgagacagcacccagcagcattgccatcgatttaccccttcaactcattcgtctcgtcagatcttactcctgctatgttattgaagcataggcgttttttacgtttcacgcctgcatcattgccattctcctggtcctgggtaaagcggcttgttttttttcttcttctgataattacaaattaatcagagtctcgtattttgcctggtaaacaaatcgagcagatgcaccctcagctggttggcatggttccgtcctctcgagtgccactgccgatcgagccagccgctgaagagcccatctatgtcaacgcgaagcagtaccacgctattctccggaggagacagctccgtgcaaagctagaggcggaaaacaagctcgtgaaaagccgcaagccgtacctccacgagtctcggcacctgcacgcgatgaagagagctcggggaacaggcgggcggttcctgaacacgaagcagcagccggagtcccccggcagcggcggctcctcggacgcgcaacgcgtgcccgcgaccgcgagcggcggcctgttcacgaagcatgagcacagcctgccgcccggcggtcgccaccactatcacgcgagagggggcggtgagtagggagccccgacactggcaactcatccttggcttatcagcgattcgactcggctctccctcgtctgaaactgaactctctgcaactactgtaactgtaactaaactgggtgtgcccggattggcggtcgttctgttctactactagtacctgctacgcgtcgttgggttgggtctggactagagagcgtgctggttctttgatgaacttggctggacttgagggtgttgactagcgcgaagctgagttccatgtaaaacttttgcttcaagaccgatgactggcggcataataagtagcagtaataaccattcttctgtgtc

SEQ ID NO: 6566 - DNA, 2576 bp, Zea Mays
agagataggaaagggcccaacagctcaacagaaaagccaagcaaaggctgctgcatactggaaggccctctgtctgtgtgcgagcgcaagagaaagggagtcagagagagagagagagggaggagaccttgcagaggagcgaagcaagcaaggtgggaaagaggcagcagcaagggcggcgggctgccggaaggggaacatgctccctcctcatctcacaggcgcatttctgggtggaggtggccggtggggtaatggctccagcatgtgatccttgctaaggccttacagttacagcacactgcatgccggatttgtgttgctttatttatgttcctgcccgtgtaatcgttttgaactcaaggggagaactagtgacctactgatgagattaagatgcagcactgtttttgctagcgggaggcctatctgcagaactaactagtcatgtctgaggccctcagcacatatactctggttgcatgaaggattcttagaattcagagggcgctaccgagttgatgcatggtactgatacagcgctagcgctagcgctagctagcttactactagtacctttagagcatgtgcatgcccaagttacacatctcacctcgcgtgatcaattgagggcctactagcttactactgctgccttagtttcctttttcatgaatacagttacggtgggaaggtcaaattctgttgtgtattcatgcatcagctgtgctccttaaggcttgcagaccttaatacccagtacgtgtttcgaatctcgtatgtttatttctgggaactgacctgtgtttatatatgtttggacagtacgaactgaaaaacaagagtaaagaatttccgtgagatgagacgtacgtaaggataatccccaagacattgctcaatctgtttctctctctctctctctcttttcggcgagcagtttgtcctttttctttcaatttcttttactactacacccgttatcgaatatttgtcatccgctggctcatttataaactaaaacacgataaataaagaaggaaagaacggagagagtagtagtggtttagtttcatgcagctagaattctaacgccctcctggatccttgtgcagagaatggcgcggtgatgattcagtttggccatcagatgcctgattacgactccccggctacccagtcaaccagtgagacgagccatcaagaagcgtctggaatgagcgaagggagcctcaacgagcataataatgaccattcaggcaaccttgatgggtactcgaagagtgacgaaaacaagatgatgtcagcgttatccctgggcaatccggaaacagcttacgcacataatccgaagcctgaccgtactcagtccttcgccatatcatacccatatgccgatccatactacggtggcgcggtggcagcagcttatggcccgcatgctatcgtaagtgatctccatgcgtccagcctgttgtttcactacttgctgccggtgctagatgatgccctttgtccactttgaagacactttgctaggcaatgcggtcagtactggtgctttctttttgtttttcctgtgcgttattgcgtttagtggtgttcttcatttgctagcacagcatgcctatcggctgagacagcacccagcagcattgccatcgatttaccccttcaactcattcgtctcgtcagatcttactcctgctatgttattgaagcataggcgttttttacgtttcacgcctgcatcattgccattctcctggtcctgggtaaagcggcttgttttttttcttcttctgataattacaaattaatcagagtctcgtattttgcctggtaaacaaatcgagcagatgcaccctcagctggttggcatggttccgtcctctcgagtgccactgccgatcgagccagccgctgaagagcccatctatgtcaacgcgaagcagtaccacgctattctccggaggagacagctccgtgcaaagctagaggcggaaaacaagctcgtgaaaagccgcaagccgtacctccacgagtctcggcacctgcacgcgatgaagagagctcggggaacaggcgggcggttcctgaacacgaagcagcagccggagtcccccggcagcggcggctcctcggacgcgcaacgcgtgcccgcgaccgcgagcggcggcctgttcacgaagcatgagcacagcctgccgcccggcggtcgccaccactatcacgcgagagggggcggtgagtagggagccccgacactggcaactcatccttggcttatcagcgattcgactcggctctccctcgtctgaaactgaactctctgcaactactgtaactgtaactaaactgggtgtgcccggattggcggtcgttctgttctactactagtacctgctacgcgtcgttgggttgggtctggactagagagcgtgctggttctttgatgaacttggctggacttgagggtgttgactagcgcgaagctgagttccatgtaaaacttttgcttcaagaccgatgactggcggcataataagtagcagtaataaccattcttctgtgtc

SEQ ID NO: 6567 - DNA, 2231 bp, Zea Mays
agagataggaaagggcccaacagctcaacagaaaagccaagcaaaggctgctgcatactggaaggccctctgtctgtgtgcgagcgcaagagaaagggagtcagagagagagagagagggaggagaccttgcagaggagcgaagcaagcaaggtgggaaagaggcagcagcaagggcggcgggctgccggaaggggaacatgctccctcctcatctcacaggtcttccttcctgctcgctgacttgcctctctccaccctctctgatctgagctctacggctcttcctttccctgcggtgataccggagctctctgctcccacctcccagtaccagccgacctgtttttttttcgtttgtttgggggtgggtggatgtgggggagggatcgtttctcggttcttctggacgatttgtggtggatctggctggttccttggttgctcggctggtcttttgagttgatacggtgctgggatttgtaggcgcatttctgggtggaggtggccggtggggtaatggctccagcatgtgatccttgctaaggccttacagttacagcacactgcatgccggatttgtgttgctttatttatgttcctgcccgtgtaatcgttttgaactcaaggggagaactagtgacctactgatgagattaagatgcagcactgtttttgctagcgggaggcctatctgcagaactaactagtcatgtctgaggccctcagcacatatactctggttgcatgaaggattcttagaattcagagggcgctaccgagttgatgcatgtacgaactgaaaaacaagagtaaagaatttccgtgagatgagacgtacgtaaggataatccccaagacattgctcaatctgtttctctctctctctctctcttttcggcgagcagtttgtcctttttctttcaatttcttttactactacacccgttatcgaatatttgtcatccgctggctcatttataaactaaaacacgataaataaagaaggaaagaacggagagagtagtagtggtttagtttcatgcagctagaattctaacgccctcctggatccttgtgcagagaatggcgcggtgatgattcagtttggccatcagatgcctgattacgactccccggctacccagtcaaccagtgagacgagccatcaagaagcgtctggaatgagcgaagggagcctcaacgagcataataatgaccattcaggcaaccttgatgggtactcgaagagtgacgaaaacaagatgatgtcagcgttatccctgggcaatccggaaacagcttacgcacataatccgaagcctgaccgtactcagtccttcgccatatcatacccatatgccgatccatactacggtggcgcggtggcagcagcttatggcccgcatgctatcgtaagtgatctccatgcgtccagcctgttgtttcactacttgctgccggtgctagatgatgccctttgtccactttgaagacactttgctaggcaatgcgatgcaccctcagctggttggcatggttccgtcctctcgagtgccactgccgatcgagccagccgctgaagagcccatctatgtcaacgcgaagcagtaccacgctattctccggaggagacagctccgtgcaaagctagaggcggaaaacaagctcgtgaaaagccgcaagccgtacctccacgagtctcggcacctgcacgcgatgaagagagctcggggaacaggcgggcggttcctgaacacgaagcagcagccggagtcccccggcagcggcggctcctcggacgcgcaacgcgtgcccgcgaccgcgagcggcggcctgttcacgaagcatgagcacagcctgccgcccggcggtcgccaccactatcacgcgagagggggcggtgagtagggagccccgacactggcaactcatccttggcttatcagcgattcgactcggctctccctcgtctgaaactgaactctctgcaactactgtaactgtaactaaactgggtgtgcccggattggcggtcgttctgttctactactagtacctgctacgcgtcgttgggttgggtctggactagagagcgtgctggttctttgatgaacttggctggacttgagggtgttgactagcgcgaagctgagttccatgtaaaacttttgcttcaagaccgatgactggcggcataataagtagcagtaataaccattcttctgtgtc

SEQ ID NO: 6568 - DNA, 1972 bp, Zea Mays
agagataggaaagggcccaacagctcaacagaaaagccaagcaaaggctgctgcatactggaaggccctctgtctgtgtgcgagcgcaagagaaagggagtcagagagagagagagagggaggagaccttgcagaggagcgaagcaagcaaggtgggaaagaggcagcagcaagggcggcgggctgccggaaggggaacatgctccctcctcatctcacagtacgaactgaaaaacaagagtaaagaatttccgtgagatgagacgtacgtaaggataatccccaagacattgctcaatctgtttctctctctctctctctcttttcggcgagcagtttgtcctttttctttcaatttcttttactactacacccgttatcgaatatttgtcatccgctggctcatttataaactaaaacacgataaataaagaaggaaagaacggagagagtagtagtggtttagtttcatgcagctagaattctaacgccctcctggatccttgtgcagagaatggcgcggtgatgattcagtttggccatcagatgcctgattacgactccccggctacccagtcaaccagtgagacgagccatcaagaagcgtctggaatgagcgaagggagcctcaacgagcataataatgaccattcaggcaaccttgatgggtactcgaagagtgacgaaaacaagatgatgtcagcgttatccctgggcaatccggaaacagcttacgcacataatccgaagcctgaccgtactcagtccttcgccatatcatacccatatgccgatccatactacggtggcgcggtggcagcagcttatggcccgcatgctatcgtaagtgatctccatgcgtccagcctgttgtttcactacttgctgccggtgctagatgatgccctttgtccactttgaagacactttgctaggcaatgcggtcagtactggtgctttctttttgtttttcctgtgcgttattgcgtttagtggtgttcttcatttgctagcacagcatgcctatcggctgagacagcacccagcagcattgccatcgatttaccccttcaactcattcgtctcgtcagatcttactcctgctatgttattgaagcataggcgttttttacgtttcacgcctgcatcattgccattctcctggtcctgggtaaagcggcttgttttttttcttcttctgataattacaaattaatcagagtctcgtattttgcctggtaaacaaatcgagcagatgcaccctcagctggttggcatggttccgtcctctcgagtgccactgccgatcgagccagccgctgaagagcccatctatgtcaacgcgaagcagtaccacgctattctccggaggagacagctccgtgcaaagctagaggcggaaaacaagctcgtgaaaagccgcaagccgtacctccacgagtctcggcacctgcacgcgatgaagagagctcggggaacaggcgggcggttcctgaacacgaagcagcagccggagtcccccggcagcggcggctcctcggacgcgcaacgcgtgcccgcgaccgcgagcggcggcctgttcacgaagcatgagcacagcctgccgcccggcggtcgccaccactatcacgcgagagggggcggtgagtagggagccccgacactggcaactcatccttggcttatcagcgattcgactcggctctccctcgtctgaaactgaactctctgcaactactgtaactgtaactaaactgggtgtgcccggattggcggtcgttctgttctactactagtacctgctacgcgtcgttgggttgggtctggactagagagcgtgctggttctttgatgaacttggctggacttgagggtgttgactagcgcgaagctgagttccatgtaaaacttttgcttcaagaccgatgactggcggcataataagtagcagtaataaccattcttctgtgtc

SEQ ID NO: 6569 - DNA, 1560 bp, Zea Mays
agagataggaaagggcccaacagctcaacagaaaagccaagcaaaggctgctgcatactggaaggccctctgtctgtgtgcgagcgcaagagaaagggagtcagagagagagagagagggaggagaccttgcagaggagcgaagcaagcaaggtgggaaagaggcagcagcaagggcggcgggctgccggaaggggaacatgctccctcctcatctcacagtacgaactgaaaaacaagagtaaagaatttccgtgagatgagacgtacgtaaggataatccccaagacattgctcaatctgtttctctctctctctctctcttttcggcgagcagtttgtcctttttctttcaatttcttttactactacacccgttatcgaatatttgtcatccgctggctcatttataaactaaaacacgataaataaagaaggaaagaacggagagagtagtagtggtttagtttcatgcagctagaattctaacgccctcctggatccttgtgcagagaatggcgcggtgatgattcagtttggccatcagatgcctgattacgactccccggctacccagtcaaccagtgagacgagccatcaagaagcgtctggaatgagcgaagggagcctcaacgagcataataatgaccattcaggcaaccttgatgggtactcgaagagtgacgaaaacaagatgatgtcagcgttatccctgggcaatccggaaacagcttacgcacataatccgaagcctgaccgtactcagtccttcgccatatcatacccatatgccgatccatactacggtggcgcggtggcagcagcttatggcccgcatgctatcatgcaccctcagctggttggcatggttccgtcctctcgagtgccactgccgatcgagccagccgctgaagagcccatctatgtcaacgcgaagcagtaccacgctattctccggaggagacagctccgtgcaaagctagaggcggaaaacaagctcgtgaaaagccgcaagccgtacctccacgagtctcggcacctgcacgcgatgaagagagctcggggaacaggcgggcggttcctgaacacgaagcagcagccggagtcccccggcagcggcggctcctcggacgcgcaacgcgtgcccgcgaccgcgagcggcggcctgttcacgaagcatgagcacagcctgccgcccggcggtcgccaccactatcacgcgagagggggcggtgagtagggagccccgacactggcaactcatccttggcttatcagcgattcgactcggctctccctcgtctgaaactgaactctctgcaactactgtaactgtaactaaactgggtgtgcccggattggcggtcgttctgttctactactagtacctgctacgcgtcgttgggttgggtctggactagagagcgtgctggttctttgatgaacttggctggacttgagggtgttgactagcgcgaagctgagttccatgtaaaacttttgcttcaagaccgatgactggcggcataataagtagcagtaataaccattcttctgtgtc

SEQ ID NO: 6570 - DNA, 2182 bp, Zea Mays
agagataggaaagggcccaacagctcaacagaaaagccaagcaaaggctgctgcatactggaaggccctctgtctgtgtgcgagcgcaagagaaagggagtcagagagagagagagagggaggagaccttgcagaggagcgaagcaagcaaggtgggaaagaggcagcagcaagggcggcgggctgccggaaggggaacatgctccctcctcatctcacaggtcttccttcctgctcgctgacttgcctctctccaccctctctgatctgagctctacggctcttcctttccctgcggtgataccggagctctctgctcccacctcccagtaccagccgacctgtttttttttcgtttgtttgggggtgggtggatgtgggggagggatcgtttctcggttcttctggacgatttgtggtggatctggctggttccttggttgctcggctggtcttttgagttgatacggtgctgggatttgtaggcgcatttctgggtggaggtggccggtggggtaatggctccagcatgtgatccttgctaaggccttacagttacagcacactgcatgccggatttgtgttgctttatttatgttcctgcccgtgtaatcgttttgaactcaaggggagaactagtgacctactgatgagattaagatgcagcactgtttttgctagcgggaggcctatctgcagaactaactagtcatgtctgaggccctcagcacatatactctggttgcatgaaggattcttagaattcagagggcgctaccgagttgatgcatggtactgatacagcgctagcgctagcgctagctagcttactactagtacctttagagcatgtgcatgcccaagttacacatctcacctcgcgtgatcaattgagggcctactagcttactactgctgccttagtttcctttttcatgaatacagttacggtgggaaggtcaaattctgttgtgtattcatgcatcagctgtgctccttaaggcttgcagaccttaatacccagtacgtgtttcgaatctcgtatgtttatttctgggaactgacctgtgtttatatatgtttggacagtacgaactgaaaaacaagagtaaagaatttccgtgagatgagacagaatggcgcggtgatgattcagtttggccatcagatgcctgattacgactccccggctacccagtcaaccagtgagacgagccatcaagaagcgtctggaatgagcgaagggagcctcaacgagcataataatgaccattcaggcaaccttgatgggtactcgaagagtgacgaaaacaagatgatgtcagcgttatccctgggcaatccggaaacagcttacgcacataatccgaagcctgaccgtactcagtccttcgccatatcatacccatatgccgatccatactacggtggcgcggtggcagcagcttatggcccgcatgctatcatgcaccctcagctggttggcatggttccgtcctctcgagtgccactgccgatcgagccagccgctgaagagcccatctatgtcaacgcgaagcagtaccacgctattctccggaggagacagctccgtgcaaagctagaggcggaaaacaagctcgtgaaaagccgcaagccgtacctccacgagtctcggcacctgcacgcgatgaagagagctcggggaacaggcgggcggttcctgaacacgaagcagcagccggagtcccccggcagcggcggctcctcggacgcgcaacgcgtgcccgcgaccgcgagcggcggcctgttcacgaagcatgagcacagcctgccgcccggcggtcgccaccactatcacgcgagagggggcggtgagtagggagccccgacactggcaactcatccttggcttatcagcgattcgactcggctctccctcgtctgaaactgaactctctgcaactactgtaactgtaactaaactgggtgtgcccggattggcggtcgttctgttctactactagtacctgctacgcgtcgttgggttgggtctggactagagagcgtgctggttctttgatgaacttggctggacttgagggtgttgactagcgcgaagctgagttccatgtaaaacttttgcttcaagaccgatgactggcggcataataagtagcagtaataaccattcttctgtgtc

SEQ ID NO: 6571 - DNA, 2594 bp, Zea Mays
agagataggaaagggcccaacagctcaacagaaaagccaagcaaaggctgctgcatactggaaggccctctgtctgtgtgcgagcgcaagagaaagggagtcagagagagagagagagggaggagaccttgcagaggagcgaagcaagcaaggtgggaaagaggcagcagcaagggcggcgggctgccggaaggggaacatgctccctcctcatctcacaggtcttccttcctgctcgctgacttgcctctctccaccctctctgatctgagctctacggctcttcctttccctgcggtgataccggagctctctgctcccacctcccagtaccagccgacctgtttttttttcgtttgtttgggggtgggtggatgtgggggagggatcgtttctcggttcttctggacgatttgtggtggatctggctggttccttggttgctcggctggtcttttgagttgatacggtgctgggatttgtaggcgcatttctgggtggaggtggccggtggggtaatggctccagcatgtgatccttgctaaggccttacagttacagcacactgcatgccggatttgtgttgctttatttatgttcctgcccgtgtaatcgttttgaactcaaggggagaactagtgacctactgatgagattaagatgcagcactgtttttgctagcgggaggcctatctgcagaactaactagtcatgtctgaggccctcagcacatatactctggttgcatgaaggattcttagaattcagagggcgctaccgagttgatgcatggtactgatacagcgctagcgctagcgctagctagcttactactagtacctttagagcatgtgcatgcccaagttacacatctcacctcgcgtgatcaattgagggcctactagcttactactgctgccttagtttcctttttcatgaatacagttacggtgggaaggtcaaattctgttgtgtattcatgcatcagctgtgctccttaaggcttgcagaccttaatacccagtacgtgtttcgaatctcgtatgtttatttctgggaactgacctgtgtttatatatgtttggacagtacgaactgaaaaacaagagtaaagaatttccgtgagatgagacagaatggcgcggtgatgattcagtttggccatcagatgcctgattacgactccccggctacccagtcaaccagtgagacgagccatcaagaagcgtctggaatgagcgaagggagcctcaacgagcataataatgaccattcaggcaaccttgatgggtactcgaagagtgacgaaaacaagatgatgtcagcgttatccctgggcaatccggaaacagcttacgcacataatccgaagcctgaccgtactcagtccttcgccatatcatacccatatgccgatccatactacggtggcgcggtggcagcagcttatggcccgcatgctatcgtaagtgatctccatgcgtccagcctgttgtttcactacttgctgccggtgctagatgatgccctttgtccactttgaagacactttgctaggcaatgcggtcagtactggtgctttctttttgtttttcctgtgcgttattgcgtttagtggtgttcttcatttgctagcacagcatgcctatcggctgagacagcacccagcagcattgccatcgatttaccccttcaactcattcgtctcgtcagatcttactcctgctatgttattgaagcataggcgttttttacgtttcacgcctgcatcattgccattctcctggtcctgggtaaagcggcttgttttttttcttcttctgataattacaaattaatcagagtctcgtattttgcctggtaaacaaatcgagcagatgcaccctcagctggttggcatggttccgtcctctcgagtgccactgccgatcgagccagccgctgaagagcccatctatgtcaacgcgaagcagtaccacgctattctccggaggagacagctccgtgcaaagctagaggcggaaaacaagctcgtgaaaagccgcaagccgtacctccacgagtctcggcacctgcacgcgatgaagagagctcggggaacaggcgggcggttcctgaacacgaagcagcagccggagtcccccggcagcggcggctcctcggacgcgcaacgcgtgcccgcgaccgcgagcggcggcctgttcacgaagcatgagcacagcctgccgcccggcggtcgccaccactatcacgcgagagggggcggtgagtagggagccccgacactggcaactcatccttggcttatcagcgattcgactcggctctccctcgtctgaaactgaactctctgcaactactgtaactgtaactaaactgggtgtgcccggattggcggtcgttctgttctactactagtacctgctacgcgtcgttgggttgggtctggactagagagcgtgctggttctttgatgaacttggctggacttgagggtgttgactagcgcgaagctgagttccatgtaaaacttttgcttcaagaccgatgactggcggcataataagtagcagtaataaccattcttctgtgtc

SEQ ID NO: 6572 - DNA, 1730 bp, Zea Mays
agagataggaaagggcccaacagctcaacagaaaagccaagcaaaggctgctgcatactggaaggccctctgtctgtgtgcgagcgcaagagaaagggagtcagagagagagagagagggaggagaccttgcagaggagcgaagcaagcaaggtgggaaagaggcagcagcaagggcggcgggctgccggaaggggaacatgctccctcctcatctcacagtacgaactgaaaaacaagagtaaagaatttccgtgagatgagacgtacagaatggcgcggtgatgattcagtttggccatcagatgcctgattacgactccccggctacccagtcaaccagtgagacgagccatcaagaagcgtctggaatgagcgaagggagcctcaacgagcataataatgaccattcaggcaaccttgatgggtactcgaagagtgacgaaaacaagatgatgtcagcgttatccctgggcaatccggaaacagcttacgcacataatccgaagcctgaccgtactcagtccttcgccatatcatacccatatgccgatccatactacggtggcgcggtggcagcagcttatggcccgcatgctatcgtaagtgatctccatgcgtccagcctgttgtttcactacttgctgccggtgctagatgatgccctttgtccactttgaagacactttgctaggcaatgcggtcagtactggtgctttctttttgtttttcctgtgcgttattgcgtttagtggtgttcttcatttgctagcacagcatgcctatcggctgagacagcacccagcagcattgccatcgatttaccccttcaactcattcgtctcgtcagatcttactcctgctatgttattgaagcataggcgttttttacgtttcacgcctgcatcattgccattctcctggtcctgggtaaagcggcttgttttttttcttcttctgataattacaaattaatcagagtctcgtattttgcctggtaaacaaatcgagcagatgcaccctcagctggttggcatggttccgtcctctcgagtgccactgccgatcgagccagccgctgaagagcccatctatgtcaacgcgaagcagtaccacgctattctccggaggagacagctccgtgcaaagctagaggcggaaaacaagctcgtgaaaagccgcaagccgtacctccacgagtctcggcacctgcacgcgatgaagagagctcggggaacaggcgggcggttcctgaacacgaagcagcagccggagtcccccggcagcggcggctcctcggacgcgcaacgcgtgcccgcgaccgcgagcggcggcctgttcacgaagcatgagcacagcctgccgcccggcggtcgccaccactatcacgcgagagggggcggtgagtagggagccccgacactggcaactcatccttggcttatcagcgattcgactcggctctccctcgtctgaaactgaactctctgcaactactgtaactgtaactaaactgggtgtgcccggattggcggtcgttctgttctactactagtacctgctacgcgtcgttgggttgggtctggactagagagcgtgctggttctttgatgaacttggctggacttgagggtgttgactagcgcgaagctgagttccatgtaaaacttttgcttcaagaccgatgactggcggcataataagtagcagtaataaccattcttctgtgtc

SEQ ID NO: 6573 - DNA, 2840 bp, Zea Mays
agagataggaaagggcccaacagctcaacagaaaagccaagcaaaggctgctgcatactggaaggccctctgtctgtgtgcgagcgcaagagaaagggagtcagagagagagagagagggaggagaccttgcagaggagcgaagcaagcaaggtgggaaagaggcagcagcaagggcggcgggctgccggaaggggaacatgctccctcctcatctcacaggtcttccttcctgctcgctgacttgcctctctccaccctctctgatctgagctctacggctcttcctttccctgcggtgataccggagctctctgctcccacctcccagtaccagccgacctgtttttttttcgtttgtttgggggtgggtggatgtgggggagggatcgtttctcggttcttctggacgatttgtggtggatctggctggttccttggttgctcggctggtcttttgagttgatacggtgctgggatttgtaggcgcatttctgggtggaggtggccggtggggtaatggctccagcatgtgatccttgctaaggccttacagttacagcacactgcatgccggatttgtgttgctttatttatgttcctgcccgtgtaatcgttttgaactcaaggggagaactagtgacctactgatgagattaagatgcagcactgtttttgctagcgggaggcctatctgcagaactaactagtcatgtctgaggccctcagcacatatactctggttgcatgaaggattcttagaattcagagggcgctaccgagttgatgcatggtactgatacagcgctagcgctagcgctagctagcttactactagtacctttagagcatgtgcatgcccaagttacacatctcacctcgcgtgatcaattgagggcctactagcttactactgctgccttagtttcctttttcatgaatacagttacggtgggaaggtcaaattctgttgtgtattcatgcatcagctgtgctccttaaggcttgcagaccttaatacccagtacgtgtttcgaatctcgtatgtttatttctgggaactgacctgtgtttatatatgtttggacagtacgaactgaaaaacaagagtaaagaatttccgtgagatgagacgtacgtaaggataatccccaagacattgctcaatctgtttctctctctctctctctcttttcggcgagcagtttgtcctttttctttcaatttcttttactactacacccgttatcgaatatttgtcatccgctggctcatttataaactaaaacacgataaataaagaaggaaagaacggagagagtagtagtggtttagtttcatgcagctagaattctaacgccctcctggatccttgtgcagagaatggcgcggtgatgattcagtttggccatcagatgcctgattacgactccccggctacccagtcaaccagtgagacgagccatcaagaagcgtctggaatgagcgaagggagcctcaacgagcataataatgaccattcaggcaaccttgatgggtactcgaagagtgacgaaaacaagatgatgtcagcgttatccctgggcaatccggaaacagcttacgcacataatccgaagcctgaccgtactcagtccttcgccatatcatacccatatgccgatccatactacggtggcgcggtggcagcagcttatggcccgcatgctatcgtaagtgatctccatgcgtccagcctgttgtttcactacttgctgccggtgctagatgatgccctttgtccactttgaagacactttgctaggcaatgcggtcagtactggtgctttctttttgtttttcctgtgcgttattgcgtttagtggtgttcttcatttgctagcacagcatgcctatcggctgagacagcacccagcagcattgccatcgatttaccccttcaactcattcgtctcgtcagatcttactcctgctatgttattgaagcataggcgttttttacgtttcacgcctgcatcattgccattctcctggtcctgggtaaagcggcttgttttttttcttcttctgataattacaaattaatcagagtctcgtattttgcctggtaaacaaatcgagcagatgcaccctcagctggttggcatggttccgtcctctcgagtgccactgccgatcgagccagccgctgaagagcccatctatgtcaacgcgaagcagtaccacgctattctccggaggagacagctccgtgcaaagctagaggcggaaaacaagctcgtgaaaagccgcaagccgtacctccacgagtctcggcacctgcacgcgatgaagagagctcggggaacaggcgggcggttcctgaacacgaagcagcagccggagtcccccggcagcggcggctcctcggacgcgcaacgcgtgcccgcgaccgcgagcggcggcctgttcacgaagcatgagcacagcctgccgcccggcggtcgccaccactatcacgcgagagggggcggtgagtagggagccccgacactggcaactcatccttggcttatcagcgattcgactcggctctccctcgtctgaaactgaactctctgcaactactgtaactgtaactaaactgggtgtgcccggattggcggtcgttctgttctactactagtacctgctacgcgtcgttgggttgggtctggactagagagcgtgctggttctttgatgaacttggctggacttgagggtgttgactagcgcgaagctgagttccatgtaaaacttttgcttcaagaccgatgactggcggcataataagtagcagtaataaccattcttctgtgtc

SEQ ID NO: 6574 - DNA, 1743 bp, Zea Mays
ggcgcccgggggtgaggagagataggaaagggcccaacagctcaacagaaaagccaagcaaaggctgctgcatactggaaggccctctgtctgtgtgcgagcgcaagagaaagggagtcagagagagagagagagggaggagaccttgcagaggagcgaagcaagcaaggtgggaaagaggcagcagcaagggcggcgggctgccggaaggggaacatgctccctcctcatctcacagtacgaactgaaaaacaagagtaaagaatttccgtgagatgagacagaatggcgcggtgatgattcagtttggccatcagatgcctgattacgactccccggctacccagtcaaccagtgagacgagccatcaagaagcgtctggaatgagcgaagggagcctcaacgagcataataatgaccattcaggcaaccttgatgggtactcgaagagtgacgaaaacaagatgatgtcagcgttatccctgggcaatccggaaacagcttacgcacataatccgaagcctgaccgtactcagtccttcgccatatcatacccatatgccgatccatactacggtggcgcggtggcagcagcttatggcccgcatgctatcgtaagtgatctccatgcgtccagcctgttgtttcactacttgctgccggtgctagatgatgccctttgtccactttgaagacactttgctaggcaatgcggtcagtactggtgctttctttttgtttttcctgtgcgttattgcgtttagtggtgttcttcatttgctagcacagcatgcctatcggctgagacagcacccagcagcattgccatcgatttaccccttcaactcattcgtctcgtcagatcttactcctgctatgttattgaagcataggcgttttttacgtttcacgcctgcatcattgccattctcctggtcctgggtaaagcggcttgttttttttcttcttctgataattacaaattaatcagagtctcgtattttgcctggtaaacaaatcgagcagatgcaccctcagctggttggcatggttccgtcctctcgagtgccactgccgatcgagccagccgctgaagagcccatctatgtcaacgcgaagcagtaccacgctattctccggaggagacagctccgtgcaaagctagaggcggaaaacaagctcgtgaaaagccgcaagccgtacctccacgagtctcggcacctgcacgcgatgaagagagctcggggaacaggcgggcggttcctgaacacgaagcagcagccggagtcccccggcagcggcggctcctcggacgcgcaacgcgtgcccgcgaccgcgagcggcggcctgttcacgaagcatgagcacagcctgccgcccggcggtcgccaccactatcacgcgagagggggcggtgagtagggagccccgacactggcaactcatccttggcttatcagcgattcgactcggctctccctcgtctgaaactgaactctctgcaactactgtaactgtaactaaactgggtgtgcccggattggcggtcgttctgttctactactagtacctgctacgcgtcgttgggttgggtctggactagagagcgtgctggttctttgatgaacttggctggacttgagggtgttgactagcgcgaagctgagttccatgtaaaacttttgcttcaagaccgatgactggcggcataataagtagcagtaataaccattcttctgtgtc

SEQ ID NO: 6575 - DNA, 554 bp, Zea Mays
aaaaaaagccgtacctccacgagtctcggcacctgcacgcgatgaagagagctcggggaacaggcgggcggttcctgaacacgaagcagcagccggagtcccccggcagcggcggctcctcggacgcgcaacgcgtgcccgcgaccgcgagcggcggcctgttcacgaagcatgagcacagcctgccgcccggcggtcgccaccactatcacgcgagagggggcggtgagtagggagccccgacactggcaactcatccttggcttatcagcgattcgactcggctctccctcgtctgaaactgaactctctgcaactactgtaactgtaactaaactgggtgtgcccggattggcggtcgttctgttctactactagtacctgctacgcgtcgttgggttgggtctggactagagagcgtgctggttctttgatgaacttggctggacttgagggtgttgactagcgcgaagctgagttccatgtaaaacttttgcttcaagaccgatgactggcggcataataagtagcagtaataaccattcttctgtgtc

SEQ ID NO: 6576 - DNA, 1654 bp, Zea Mays
agagataggaaagggcccaacagctcaacagaaaagccaagcaaaggctgctgcatactggaaggccctctgtctgtgtgcgagcgcaagagaaagggagtcagagagagagagagagggaggagaccttgcagaggagcgaagcaagcaaggtgggaaagaggcagcagcaagggcggcgggctgccggaaggggaacatgctccctcctcatctcacaggtcttccttcctgctcgctgacttgcctctctccaccctctctgatctgagctctacggctcttcctttccctgcggtgataccggagctctctgctcccacctcccagtaccagccgacctgtttttttttcgtttgtttgggggtgggtggatgtgggggagggatcgtttctcggttcttctggacgatttgtggtggatctggctggttccttggttgctcggctggtcttttgagttgatacggtgctgggatttgtaggcgcatttctgggtggaggtggccggtggggtaatggctccagcatgtgatccttgctaaggccttacagttacagcacactgcatgccggatttgtgttgctttatttatgttcctgcccgtgtaatcgttttgaactcaaggggagaactagtgacctactgatgagattaagatgcagcactgtttttgctagcgggaggcctatctgcagaactaactagtcatgtctgaggccctcagcacatatactctggttgcatgaaggattcttagaattcagagggcgctaccgagttgatgcatggtactgatacagcgctagcgctagcgctagctagcttactactagtacctttagagcatgtgcatgcccaagttacacatctcacctcgcgtgatcaattgagggcctactagcttactactgctgccttagtttcctttttcatgaatacagttacggtgggaaggtcaaattctgttgtgtattcatgcatcagctgtgctccttaaggcttgcagaccttaatacccagtacgtgtttcgaatctcgtatgtttatttctgggaactgacctgtgtttatatatgtttggacagtacgaactgaaaaacaagagtaaagaatttccgtgagatgagacgtacgtaaggataatccccaagacattgctcaatctgtttctctctctctctctctcttttcggcgagcagtttgtcctttttctttcaatttcttttactactacacccgttatcgaatatttgtcatccgctggctcatttataaactaaaacacgataaataaagaaggaaagaacggagagagtagtagtggtttagtttcatgcagctagaattctaacgccctcctggatccttgtgcagagaatggcgcggtgatgattcagtttggccatcagatgcctgattacgactccccggctacccagtcaaccagtgagacgagccatcaagaagcgtctggaatgagcgaagggagcctcaacgagcataataatgaccattcaggcaaccttgatgggtactcgaagagtgacgaaaacaagatgatgtcagcgttatccctgggcaatccggaaacagcttacgcacataatccgaagcctgaccgtactcagtccttctacgcaccttttcag

SEQ ID NO: 6577 - DNA, 1563 bp, Zea Mays
atggccctggccgggtgagctcatacgaaacaaaggcagaattgacaaaccctttctccaacgtcacgtcaaattttgactctgctgcgtgcttggttcgttcaatcttcaaaatggcttagctggaggtggcggccagcgtttcccgagaacaatgacatgaagccaacgcaaatttacacgacgttgccgcatgccctgccatggcgcaggcgcctggcgcagcaacaagaccctgctgcgaagccgcggcccaaggcatgcctgcctgggcgaaccgcgaacggagagaaagcgagaggtccctgcactgcacactccgacgaagcggtcggtagacgatgcttcgacaatccgacctacggtacatgtcctttgctaacttggctacacaaggacgaggtcaaggtagaggaaaccaaggaggacgctcacctggagggcactcaagctatggacacggtcgaggccatggtcgtagccagtaagacaccggttagagaagagattagtataggtgtcaaatctataataagcccaatcatcgagcttctgagtgctgctacccgtatgatgaggattatcaaccagaagatcgatctggtatggagacataggagccataaatcatatcactggagaacttaacaagctaactaccgaagataagtagcaagatcaggattgggtacatgcagctaatggtatagggatgaaaataaatcatgttggtggtttatctattttttctttagtttgatctctttagctcaaagatgttctgcttgtggcatgtgcttcgttctgcacataagatgtacaaagacaatactgtattctttgcatatattccttattggttctttatcaaggatcgggacacatgggaaatgattcttgaagaaatacgagagaatggtctctatccaattcagtcgatgcacatattcagaacaagacaacagcaggagcagtgaaccttcctggtctccttgctctccgcctggcccttcaatgccgccgtttgtgatggctcatccaatgtctgctctgtttgcctcgccggcctcaagggcctattgcctgtagcgtggatccatttcggattcggctagaagttggatgagagagaactagcaacggatgtggggactgggcagcacctcgtaatgctttgctccctctctcaggtccatctgctacggtcctccgggatcgagctgcaccggcggtcgacgcacggggacgggctcaaacaaaaacaatgtgggagtggcgctaggcgagctcaagtggcgacctcgacgcacggctgctggctgctgcgtgtgctatagtagatccctgcagctgtatggaagaggtggtgccctaaacagaagaagggaatcttggaaggacactctgagttggagccttggaggcatagcggaacgaaacgattgcaaagatggcgtgccggttcggactgcaaccggcatgcagggtgaggtcggccccaggcccccatccgaggcgagagagtggatgggccgagaaaaaggatgggccgcccagacgtag

SEQ ID NO: 6578 - DNA, 3094 bp, Zea Mays
gttgccacctacacagcactccccccgtagccatatatagcttgctcgcataaacgtcaaaaaggagactcttttggccctcttccggcaccggcaccggcaccggcaccagcgccaatctagctagtcagtttagcttcgctccttcgcttgcttgcaagtaacagcctctctcgtgtccaaaaagaaagtctttctctggaaaggagagaaggatcatcatcaccaggatcaagaaagaactcgtcgattccttaccccttccgtcttcttctgatctcagctctatccactagctaggagatggacatgaacaacgggtggcttggcttctccttgtctccttcggcagcgagcaggggcggctacggctacggcgacggaggcggcggagcgagcgcgagcgcgtgcggggatggagagggctcttgcccctcgcctgccgcggctgcctcgcctctccctctcgtggccatgccgctcgatgactctctgcactatagctctgctccagattggaggcacggcgcagcagaagccaaagggcccaagctcgaggacttcatgagcatcacttgcagcaacaagagcagtggccgcagcctctacgacagctgcggccaccacgacgacgagcaggccagcaagtaccacgaggtccacggcatccaccccctctcgtgcgggtcgtactaccacggctgcatcagcagcggcggcggcggcggaggcggcattggcctggggatcaacatgaacgcgccgccctgcaccggcgggttcccggaccaccagcaccaccagttcgtgccgtcgtcgcaccacggccagtacttcctgggcgccccagccgcaagcgcgggcccgccagcaggcgcagcaatgccgatgtacaacgccggcggcggcagcgttgtcggcggctccatgtccatctccggcatcaagtcctggctccgggaggccatgtacgtgcctccggagcgaccggcggcggctgcgctgtcgctcgccgtgacggatgacgtcccgccggccgagccgccgcagctgctgccggcgccgttgccggtgcaccgcaagcccgcgcagacgttcgggcagcggacgtcgcagttccgtggcgtcaccaggcacagatggaccgggcggtacgaggctcacctgtgggacaacacttgcaggaaggaaggccagactaggaaagggaggcaagtctacctaggcggctatgacagggaggagaaggctgcgagggcttatgacctggcagctctcaagtactggggcccctcgactcacataaatttcccgctgagccactacgagaaggagctggaggagatgaagcacatgtcgaggcaggagttcattgcacacctgagaaggtactgcatgatagcagttcttatttacaccgcatgcatgctgcactaagagtttatgtgcatgggaacaaacacaattgcattacagcgtactgctgctaccactagtagtagagagaatttggtttgaatgcatgcatgcatgcatggaatctttcacgtgccaatttcagaagagccctgtgcccctgagctgaggcatcactagaaacaaaagctggctgcctgcgcactgttgtttctgaatcccccttttttttgttcacatgcatccaaaactgtatcaaaaacatctgcccaacgcggcaacgccggccgcttacgaaagttgttgctgccaaatttatattcctgcaggaacagcagcggcttctcgaggggagcatccatgtacagaggagtgacaaggtgccgtgctgcaagtctgctcgcccatttttgcaccccacctgctgccttttccaacaccccaaaacttctagccatctcacatccgagtctgggcacagctctgtgcctctctctgttgggagttctgagttttctgaactcacacgcacgcacacgcatccgcctgctgcttgtgtataaagtataaaccttttcttgtcctctgcttgttccccatgcaaacgtttgcaggcatcaccagcacgggagatggcaggccaggattgggagggtcgctggcaataaggacctgtaccttggcacattcagcacgcaggaggaagcggcggaggcgtacgacatcgcggcgatcaagttccgtggcctcaacgcggtgaccaacttcgacatcagcaagtacgacgtgaagcgcatctgcgccagcacccacctcatcggcggcggcgacgcgtgcaggcgctccccgacgcggccgccggacgcggcgccggcgctcgcaggtggcgccgaccgctcgtcggacgcgccgggcgaccaagccgcgtccgacaactcggacacctccgacggccaccgcggcgcccacctgctgcacggcctccagtacggccaccccatgaaactggaggccggggagggaagcagctggatggcggcggcggcggcagcgcggccggtgcccggcgtgcatcagctaccgatgttcgcgctgtggaacgactgttgattgtggcaatggcaacctggttggtagagtacgtagtagttagtgaagaaatgcatgtcattgcacctgcatgcgcatgcgcgagcacgaggtgtaataactttcggcagtagaagtggcggtgaagaagtggacgacacggcctggggaaggacatgcatggcgtactgcctccctgcaagcgagatgcatgcatgttgcacacgctcgccgtttcttcgcaagatggcgacaattttgccgcaatatgtaatgtaatggttccacatgcatgcatgttattcttcaatgaaacaccccactagtagttatctgatttttgtgatgacgttggcaaactaagctcgccagctttttgcggagtagtgatacaaaaacttacatgcatggtcggtgggtgtagtagattgatctaataataaagtgttcatattagtgcaagaatttggaaaaatgatgcatatgcggactaaattttggtagagtgcaaaaatggctgctttcaattttttgtaggatctcttggttttacctagcccaatcattctccatcattgttatctaactt

SEQ ID NO: 6579 - DNA, 2813 bp, Zea Mays
gttgccacctacacagcactccccccgtagccatatatagcttgctcgcataaacgtcaaaaaggagactcttttggccctcttccggcaccggcaccggcaccggcaccagcgccaatctagctagtcagtttagcttcgctccttcgcttgcttgcaagtaacagcctctctcgtgtccaaaaagaaagtctttctctggaaaggagagaaggatcatcatcaccaggatcaagaaagaactcgtcgattccttaccccttccgtcttcttctgatctcagctctatccactagctaggagatggacatgaacaacgggtggcttggcttctccttgtctccttcggcagcgagcaggggcggctacggctacggcgacggaggcggcggagcgagcgcgagcgcgtgcggggatggagagggctcttgcccctcgcctgccgcggctgcctcgcctctccctctcgtggccatgccgctcgatgactctctgcactatagctctgctccagattggaggcacggcgcagcagaagccaaagggcccaagctcgaggacttcatgagcatcacttgcagcaacaagagcagtggccgcagcctctacgacagctgcggccaccacgacgacgagcaggccagcaagtaccacgaggtccacggcatccaccccctctcgtgcgggtcgtactaccacggctgcatcagcagcggcggcggcggcggaggcggcattggcctggggatcaacatgaacgcgccgccctgcaccggcgggttcccggaccaccagcaccaccagttcgtgccgtcgtcgcaccacggccagtacttcctgggcgccccagccgcaagcgcgggcccgccagcaggcgcagcaatgccgatgtacaacgccggcggcggcagcgttgtcggcggctccatgtccatctccggcatcaagtcctggctccgggaggccatgtacgtgcctccggagcgaccggcggcggctgcgctgtcgctcgccgtgacggatgacgtcccgccggccgagccgccgcagctgctgccggcgccgttgccggtgcaccgcaagcccgcgcagacgttcgggcagcggacgtcgcagttccgtggcgtcaccaggcacagatggaccgggcggtacgaggctcacctgtgggacaacacttgcaggaaggaaggccagactaggaaagggaggcaagtctacctaggtgagctactgcaagcctcctcctagctgtttgttgctccacatgctcaccaccatgtctttgctatgactgtggctgctctaggcggctatgacagggaggagaaggctgcgagggcttatgacctggcagctctcaagtactggggcccctcgactcacataaatttcccggtacgtttactgatggctcccttcgtccccttctcacggcgaccttaatttactactaactccatgcatgaaattaagaaaaagggccctgtagctcaacgtagggggccggcgcaggcctcgttcttcactattcatcgtccatgcgctctttattcttgcatttgatgaatggctggtacacgtttcctgatccactgacctccgatctaaataatgcccgtagctgagccactacgagaaggagctggaggagatgaagcacatgtcgaggcaggagttcattgcacacctgagaaggaacagcagcggcttctcgaggggagcatccatgtacagaggagtgacaaggcatcaccagcacgggagatggcaggccaggattgggagggtcgctggcaataaggacctgtaccttggcacattcagcacgcaggaggaagcggcggaggcgtacgacatcgcggcgatcaagttccgtggcctcaacgcggtgaccaacttcgacatcagcaagtacgacgtgaagcgcatctgcgccagcacccacctcatcggcggcggcgacgcgtgcaggcgctccccgacgcggccgccggacgcggcgccggcgctcgcaggtggcgccgaccgctcgtcggacgcgccgggcgaccaagccgcgtccgacaactcggacacctccgacggccaccgcggcgcccacctgctgcacggcctccagtacggccaccccatgaaactggaggccggggagggaagcagctggatggcggcggcggcggcagcgcggccggtgcccggcgtgcatcagctaccgatgttcgcgctgtggaacgactgttgattgtggcaatggcaacctggttggtagagtacgtagtagttagtgaagaaatgcatgtcattgcacctgcatgcgcatgcgcgagcacgaggtgtaataactttcggcagtagaagtggcggtgaagaagtggacgacacggcctggggaaggacatgcatggcgtactgcctccctgcaagcgagatgcatgcatgttgcacacgctcgccgtttcttcgcaagatggcgacaattttgccgcaatatgtaatgtaatggttccacatgcatgcatgttattcttcaatgaaacaccccactagtagttatctgatttttgtgatgacgttggcaaactaagctcgccagctttttgcggagtagtgatacaaaaacttacatgcatggtcggtgggtgtagtagattgatctaataataaagtgttcatattagtgcaagaatttggaaaaatgatgcatatgcggactaaattttggtagagtgcaaaaatggctgctttcaattttttgtaggatctcttggttttacctagcccaatcattctccatcattgttatctaactt

SEQ ID NO: 6580 - DNA, 2678 bp, Zea Mays
gttgccacctacacagcactccccccgtagccatatatagcttgctcgcataaacgtcaaaaaggagactcttttggccctcttccggcaccggcaccggcaccggcaccagcgccaatctagctagtcagtttagcttcgctccttcgcttgcttgcaagtaacagcctctctcgtgtccaaaaagaaagtctttctctggaaaggagagaaggatcatcatcaccaggatcaagaaagaactcgtcgattccttaccccttccgtcttcttctgatctcagctctatccactagctaggagatggacatgaacaacgggtggcttggcttctccttgtctccttcggcagcgagcaggggcggctacggctacggcgacggaggcggcggagcgagcgcgagcgcgtgcggggatggagagggctcttgcccctcgcctgccgcggctgcctcgcctctccctctcgtggccatgccgctcgatgactctctgcactatagctctgctccagattggaggcacggcgcagcagaagccaaagggcccaagctcgaggacttcatgagcatcacttgcagcaacaagagcagtggccgcagcctctacgacagctgcggccaccacgacgacgagcaggccagcaagtaccacgaggtccacggcatccaccccctctcgtgcgggtcgtactaccacggctgcatcagcagcggcggcggcggcggaggcggcattggcctggggatcaacatgaacgcgccgccctgcaccggcgggttcccggaccaccagcaccaccagttcgtgccgtcgtcgcaccacggccagtacttcctgggcgccccagccgcaagcgcgggcccgccagcaggcgcagcaatgccgatgtacaacgccggcggcggcagcgttgtcggcggctccatgtccatctccggcatcaagtcctggctccgggaggccatgtacgtgcctccggagcgaccggcggcggctgcgctgtcgctcgccgtgacggatgacgtcccgccggccgagccgccgcagctgctgccggcgccgttgccggtgcaccgcaagcccgcgcagacgttcgggcagcggacgtcgcagttccgtggcgtcaccaggcacagatggaccgggcggtacgaggctcacctgtgggacaacacttgcaggaaggaaggccagactaggaaagggaggcaagtctacctaggcggctatgacagggaggagaaggctgcgagggcttatgacctggcagctctcaagtactggggcccctcgactcacataaatttcccggtacgtttactgatggctcccttcgtccccttctcacggcgaccttaatttactactaactccatgcatgaaattaagaaaaagggccctgtagctcaacgtagggggccggcgcaggcctcgttcttcactattcatcgtccatgcgctctttattcttgcatttgatgaatggctggtacacgtttcctgatccactgacctccgatctaaataatgcccgtagctgagccactacgagaaggagctggaggagatgaagcacatgtcgaggcaggagttcattgcacacctgagaaggcatcaccagcacgggagatggcaggccaggattgggagggtcgctggcaataaggacctgtaccttggcacattcagcacgcaggaggaagcggcggaggcgtacgacatcgcggcgatcaagttccgtggcctcaacgcggtgaccaacttcgacatcagcaagtacgacgtgaagcgcatctgcgccagcacccacctcatcggcggcggcgacgcgtgcaggcgctccccgacgcggccgccggacgcggcgccggcgctcgcaggtggcgccgaccgctcgtcggacgcgccgggcgaccaagccgcgtccgacaactcggacacctccgacggccaccgcggcgcccacctgctgcacggcctccagtacggccaccccatgaaactggaggccggggagggaagcagctggatggcggcggcggcggcagcgcggccggtgcccggcgtgcatcagctaccgatgttcgcgctgtggaacgactgttgattgtggcaatggcaacctggttggtagagtacgtagtagttagtgaagaaatgcatgtcattgcacctgcatgcgcatgcgcgagcacgaggtgtaataactttcggcagtagaagtggcggtgaagaagtggacgacacggcctggggaaggacatgcatggcgtactgcctccctgcaagcgagatgcatgcatgttgcacacgctcgccgtttcttcgcaagatggcgacaattttgccgcaatatgtaatgtaatggttccacatgcatgcatgttattcttcaatgaaacaccccactagtagttatctgatttttgtgatgacgttggcaaactaagctcgccagctttttgcggagtagtgatacaaaaacttacatgcatggtcggtgggtgtagtagattgatctaataataaagtgttcatattagtgcaagaatttggaaaaatgatgcatatgcggactaaattttggtagagtgcaaaaatggctgctttcaattttttgtaggatctcttggttttacctagcccaatcattctccatcattgttatctaactt

SEQ ID NO: 6581 - DNA, 2456 bp, Zea Mays
gttgccacctacacagcactccccccgtagccatatatagcttgctcgcataaacgtcaaaaaggagactcttttggccctcttccggcaccggcaccggcaccggcaccagcgccaatctagctagtcagtttagcttcgctccttcgcttgcttgcaagtaacagcctctctcgtgtccaaaaagaaagtctttctctggaaaggagagaaggatcatcatcaccaggatcaagaaagaactcgtcgattccttaccccttccgtcttcttctgatctcagctctatccactagctaggagatggacatgaacaacgggtggcttggcttctccttgtctccttcggcagcgagcaggggcggctacggctacggcgacggaggcggcggagcgagcgcgagcgcgtgcggggatggagagggctcttgcccctcgcctgccgcggctgcctcgcctctccctctcgtggccatgccgctcgatgactctctgcactatagctctgctccagattggaggcacggcgcagcagaagccaaagggcccaagctcgaggacttcatgagcatcacttgcagcaacaagagcagtggccgcagcctctacgacagctgcggccaccacgacgacgagcaggccagcaagtaccacgaggtccacggcatccaccccctctcgtgcgggtcgtactaccacggctgcatcagcagcggcggcggcggcggaggcggcattggcctggggatcaacatgaacgcgccgccctgcaccggcgggttcccggaccaccagcaccaccagttcgtgccgtcgtcgcaccacggccagtacttcctgggcgccccagccgcaagcgcgggcccgccagcaggcgcagcaatgccgatgtacaacgccggcggcggcagcgttgtcggcggctccatgtccatctccggcatcaagtcctggctccgggaggccatgtacgtgcctccggagcgaccggcggcggctgcgctgtcgctcgccgtgacggatgacgtcccgccggccgagccgccgcagctgctgccggcgccgttgccggtgcaccgcaagcccgcgcagacgttcgggcagcggacgtcgcagttccgtggcgtcaccaggcacagatggaccgggcggtacgaggctcacctgtgggacaacacttgcaggaaggaaggccagactaggaaagggaggcaaggcagtctacctaggcggctatgacagggaggagaaggctgcgagggcttatgacctggcagctctcaagtactggggcccctcgactcacataaatttcccgctgagccactacgagaaggagctggaggagatgaagcacatgtcgaggcaggagttcattgcacacctgagaaggcatcaccagcacgggagatggcaggccaggattgggagggtcgctggcaataaggacctgtaccttggcacattcagcacgcaggaggaagcggcggaggcgtacgacatcgcggcgatcaagttccgtggcctcaacgcggtgaccaacttcgacatcagcaagtacgacgtgaagcgcatctgcgccagcacccacctcatcggcggcggcgacgcgtgcaggcgctccccgacgcggccgccggacgcggcgccggcgctcgcaggtggcgccgaccgctcgtcggacgcgccgggcgaccaagccgcgtccgacaactcggacacctccgacggccaccgcggcgcccacctgctgcacggcctccagtacggccaccccatgaaactggaggccggggagggaagcagctggatggcggcggcggcggcagcgcggccggtgcccggcgtgcatcagctaccgatgttcgcgctgtggaacgactgttgattgtggcaatggcaacctggttggtagagtacgtagtagttagtgaagaaatgcatgtcattgcacctgcatgcgcatgcgcgagcacgaggtgtaataactttcggcagtagaagtggcggtgaagaagtggacgacacggcctggggaaggacatgcatggcgtactgcctccctgcaagcgagatgcatgcatgttgcacacgctcgccgtttcttcgcaagatggcgacaattttgccgcaatatgtaatgtaatggttccacatgcatgcatgttattcttcaatgaaacaccccactagtagttatctgatttttgtgatgacgttggcaaactaagctcgccagctttttgcggagtagtgatacaaaaacttacatgcatggtcggtgggtgtagtagattgatctaataataaagtgttcatattagtgcaagaatttggaaaaatgatgcatatgcggactaaattttggtagagtgcaaaaatggctgctttcaattttttgtaggatctcttggttttacctagcccaatcattctccatcattgttatctaactt

SEQ ID NO: 6582 - DNA, 2457 bp, Zea Mays
gttgccacctacacagcactccccccgtagccatatatagcttgctcgcataaacgtcaaaaaggagactcttttggccctcttccggcaccggcaccggcaccggcaccagcgccaatctagctagtcagtttagcttcgctccttcgcttgcttgcaagtaacagcctctctcgtgtccaaaaagaaagtctttctctggaaaggagagaaggatcatcatcaccaggatcaagaaagaactcgtcgattccttaccccttccgtcttcttctgatctcagctctatccactagctaggagatggacatgaacaacgggtggcttggcttctccttgtctccttcggcagcgagcaggggcggctacggctacggcgacggaggcggcggagcgagcgcgagcgcgtgcggggatggagagggctcttgcccctcgcctgccgcggctgcctcgcctctccctctcgtggccatgccgctcgatgactctctgcactatagctctgctccagattggaggcacggcgcagcagaagccaaagggcccaagctcgaggacttcatgagcatcacttgcagcaacaagagcagtggccgcagcctctacgacagctgcggccaccacgacgacgagcaggccagcaagtaccacgaggtccacggcatccaccccctctcgtgcgggtcgtactaccacggctgcatcagcagcggcggcggcggcggaggcggcattggcctggggatcaacatgaacgcgccgccctgcaccggcgggttcccggaccaccagcaccaccagttcgtgccgtcgtcgcaccacggccagtacttcctgggcgccccagccgcaagcgcgggcccgccagcaggcgcagcaatgccgatgtacaacgccggcggcggcagcgttgtcggcggctccatgtccatctccggcatcaagtcctggctccgggaggccatgtacgtgcctccggagcgaccggcggcggctgcgctgtcgctcgccgtgacggatgacgtcccgccggccgagccgccgcagctgctgccggcgccgttgccggtgcaccgcaagcccgcgcagacgttcgggcagcggacgtcgcagttccgtggcgtcaccaggcacagatggaccgggcggtacgaggctcacctgtgggacaacacttgcaggaaggaaggccagactaggaaagggaggcaagagcagtctacctaggcggctatgacagggaggagaaggctgcgagggcttatgacctggcagctctcaagtactggggcccctcgactcacataaatttcccgctgagccactacgagaaggagctggaggagatgaagcacatgtcgaggcaggagttcattgcacacctgagaaggcatcaccagcacgggagatggcaggccaggattgggagggtcgctggcaataaggacctgtaccttggcacattcagcacgcaggaggaagcggcggaggcgtacgacatcgcggcgatcaagttccgtggcctcaacgcggtgaccaacttcgacatcagcaagtacgacgtgaagcgcatctgcgccagcacccacctcatcggcggcggcgacgcgtgcaggcgctccccgacgcggccgccggacgcggcgccggcgctcgcaggtggcgccgaccgctcgtcggacgcgccgggcgaccaagccgcgtccgacaactcggacacctccgacggccaccgcggcgcccacctgctgcacggcctccagtacggccaccccatgaaactggaggccggggagggaagcagctggatggcggcggcggcggcagcgcggccggtgcccggcgtgcatcagctaccgatgttcgcgctgtggaacgactgttgattgtggcaatggcaacctggttggtagagtacgtagtagttagtgaagaaatgcatgtcattgcacctgcatgcgcatgcgcgagcacgaggtgtaataactttcggcagtagaagtggcggtgaagaagtggacgacacggcctggggaaggacatgcatggcgtactgcctccctgcaagcgagatgcatgcatgttgcacacgctcgccgtttcttcgcaagatggcgacaattttgccgcaatatgtaatgtaatggttccacatgcatgcatgttattcttcaatgaaacaccccactagtagttatctgatttttgtgatgacgttggcaaactaagctcgccagctttttgcggagtagtgatacaaaaacttacatgcatggtcggtgggtgtagtagattgatctaataataaagtgttcatattagtgcaagaatttggaaaaatgatgcatatgcggactaaattttggtagagtgcaaaaatggctgctttcaattttttgtaggatctcttggttttacctagcccaatcattctccatcattgttatctaactt

SEQ ID NO: 6583 - DNA, 2489 bp, Zea Mays
aacgcttcttgggctgcttgcagctcgcattcatatcgttgccacctacacagcactccccccgtagccatatatagcttgctcgcataaacgtcaaaaaggagactcttttggccctcttccggcaccggcaccggcaccggcaccagcgccaatctagctagtcagtttagcttcgctccttcgcttgcttgcaagtaacagcctctctcgtgtccaaaaagaaagtctttctctggaaaggagagaaggatcatcatcaccaggatcaagaaagaactcgtcgattccttaccccttccgtcttcttctgatctcagctctatccactagctaggagatggacatgaacaacgggtggcttggcttctccttgtctccttcggcagcgagcaggggcggctacggctacggcgacggaggcggcggagcgagcgcgagcgcgtgcggggatggagagggctcttgcccctcgcctgccgcggctgcctcgcctctccctctcgtggccatgccgctcgatgactctctgcactatagctctgctccagattggaggcacggcgcagcagaagccaaagggcccaagctcgaggacttcatgagcatcacttgcagcaacaagagcagtggccgcagcctctacgacagctgcggccaccacgacgacgagcaggccagcaagtaccacgaggtccacggcatccaccccctctcgtgcgggtcgtactaccacggctgcatcagcagcggcggcggcggcggaggcggcattggcctggggatcaacatgaacgcgccgccctgcaccggcgggttcccggaccaccagcaccaccagttcgtgccgtcgtcgcaccacggccagtacttcctgggcgccccagccgcaagcgcgggcccgccagcaggcgcagcaatgccgatgtacaacgccggcggcggcagcgttgtcggcggctccatgtccatctccggcatcaagtcctggctccgggaggccatgtacgtgcctccggagcgaccggcggcggctgcgctgtcgctcgccgtgacggatgacgtcccgccggccgagccgccgcagctgctgccggcgccgttgccggtgcaccgcaagcccgcgcagacgttcgggcagcggacgtcgcagttccgtggcgtcaccaggcacagatggaccgggcggtacgaggctcacctgtgggacaacacttgcaggaaggaaggccagactaggaaagggaggcaagtctacctaggcggctatgacagggaggagaaggctgcgagggcttatgacctggcagctctcaagtactggggcccctcgactcacataaatttcccgctgagccactacgagaaggagctggaggagatgaagcacatgtcgaggcaggagttcattgcacacctgagaaggcatcaccagcacgggagatggcaggccaggattgggagggtcgctggcaataaggacctgtaccttggcacattcagcacgcaggaggaagcggcggaggcgtacgacatcgcggcgatcaagttccgtggcctcaacgcggtgaccaacttcgacatcagcaagtacgacgtgaagcgcatctgcgccagcacccacctcatcggcggcggcgacgcgtgcaggcgctccccgacgcggccgccggacgcggcgccggcgctcgcaggtggcgccgaccgctcgtcggacgcgccgggcgaccaagccgcgtccgacaactcggacacctccgacggccaccgcggcgcccacctgctgcacggcctccagtacggccaccccatgaaactggaggccggggagggaagcagctggatggcggcggcggcggcagcgcggccggtgcccggcgtgcatcagctaccgatgttcgcgctgtggaacgactgttgattgtggcaatggcaacctggttggtagagtacgtagtagttagtgaagaaatgcatgtcattgcacctgcatgcgcatgcgcgagcacgaggtgtaataactttcggcagtagaagtggcggtgaagaagtggacgacacggcctggggaaggacatgcatggcgtactgcctccctgcaagcgagatgcatgcatgttgcacacgctcgccgtttcttcgcaagatggcgacaattttgccgcaatatgtaatgtaatggttccacatgcatgcatgttattcttcaatgaaacaccccactagtagttatctgatttttgtgatgacgttggcaaactaagctcgccagctttttgcggagtagtgatacaaaaacttacatgcatggtcggtgggtgtagtagattgatctaataataaagtgttcatattagtgcaagaatttggaaaaatgatgcatatgcggactaaattttggtagagtgcaaaaatggctgctttcaattttttgtaggatctcttggttttacctagcccaatcattctccatcattgttatctaactt

SEQ ID NO: 6584 - DNA, 2622 bp, Zea Mays
gttgcacagttgcactgcacaccgaaaccttttgttttgcatgggctcttctcgtcaagcgagtcgtcacctacgtatgctaaacgcttcttgggctgcttgcagctcgcattcatatcgttgccacctacacagcactccccccgtagccatatatagcttgctcgcataaacgtcaaaaaggagactcttttggccctcttccggcaccggcaccggcaccggcaccagcgccaatctagctagtcagtttagcttcgctccttcgcttgcttgcaagtaacagcctctctcgtgtccaaaaagaaagtctttctctggaaaggagagaaggatcatcatcaccaggatcaagaaagaactcgtcgattccttaccccttccgtcttcttctgatctcagctctatccactagctaggagatggacatgaacaacgggtggcttggcttctccttgtctccttcggcagcgagcaggggcggctacggctacggcgacggaggcggcggagcgagcgcgagcgcgtgcggggatggagagggctcttgcccctcgcctgccgcggctgcctcgcctctccctctcgtggccatgccgctcgatgactctctgcactatagctctgctccagattggaggcacggcgcagcagaagccaaagggcccaagctcgaggacttcatgagcatcacttgcagcaacaagagcagtggccgcagcctctacgacagctgcggccaccacgacgacgagcaggccagcaagtaccacgaggtccacggcatccaccccctctcgtgcgggtcgtactaccacggctgcatcagcagcggcggcggcggcggaggcggcattggcctggggatcaacatgaacgcgccgccctgcaccggcgggttcccggaccaccagcaccaccagttcgtgccgtcgtcgcaccacggccagtacttcctgggcgccccagccgcaagcgcgggcccgccagcaggcgcagcaatgccgatgtacaacgccggcggcggcagcgttgtcggcggctccatgtccatctccggcatcaagtcctggctccgggaggccatgtacgtgcctccggagcgaccggcggcggctgcgctgtcgctcgccgtgacggatgacgtcccgccggccgagccgccgcagctgctgccggcgccgttgccggtgcaccgcaagcccgcgcagacgttcgggcagcggacgtcgcagttccgtggcgtcaccaggcacagatggaccgggcggtacgaggctcacctgtgggacaacacttgcaggaaggaaggccagactaggaaagggaggcaagtctacctaggcggctatgacagggaggagaaggctgcgagggcttatgacctggcagctctcaagtactggggcccctcgactcacataaatttcccgctgagccactacgagaaggagctggaggagatgaagcacatgtcgaggcaggagttcattgcacacctgagaaggaacagcagcggcttctcgaggggagcatccatgtacagaggagtgacaaggcatcaccagcacgggagatggcaggccaggattgggagggtcgctggcaataaggacctgtaccttggcacattcagcacgcaggaggaagcggcggaggcgtacgacatcgcggcgatcaagttccgtggcctcaacgcggtgaccaacttcgacatcagcaagtacgacgtgaagcgcatctgcgccagcacccacctcatcggcggcggcgacgcgtgcaggcgctccccgacgcggccgccggacgcggcgccggcgctcgcaggtggcgccgaccgctcgtcggacgcgccgggcgaccaagccgcgtccgacaactcggacacctccgacggccaccgcggcgcccacctgctgcacggcctccagtacggccaccccatgaaactggaggccggggagggaagcagctggatggcggcggcggcggcagcgcggccggtgcccggcgtgcatcagctaccgatgttcgcgctgtggaacgactgttgattgtggcaatggcaacctggttggtagagtacgtagtagttagtgaagaaatgcatgtcattgcacctgcatgcgcatgcgcgagcacgaggtgtaataactttcggcagtagaagtggcggtgaagaagtggacgacacggcctggggaaggacatgcatggcgtactgcctccctgcaagcgagatgcatgcatgttgcacacgctcgccgtttcttcgcaagatggcgacaattttgccgcaatatgtaatgtaatggttccacatgcatgcatgttattcttcaatgaaacaccccactagtagttatctgatttttgtgatgacgttggcaaactaagctcgccagctttttgcggagtagtgatacaaaaacttacatgcatggtcggtgggtgtagtagattgatctaataataaagtgttcatattagtgcaagaatttggaaaaatgatgcatatgcggactaaattttggtagagtgcaaaaatggctgctttcaattttttgtaggatctcttggttttacctagcccaatcattctccatcattgttatctaactt

SEQ ID NO: 6585 - DNA, 869 bp, Zea Mays
caccaagagagaagaaccgcagtcccgctccttccctgccggctgccgctgccccgtctctgtctccaactccgaatatgtcgtcctcgcccctccccaccacctccggcggggctcacatcttcccgtctccgcctcgaccgcgccaccgccggtgctcccaagtaatcgtcgccgccgccgctccgccccgttcctacggcgtcggtcgccgcgccgtctccctagccggcgtcgccgcctggcttgccactaccgtcggccgggcagacgcggccagtccatttgacaagaagaagctggagcctttggagacctacgttccggctgtcctgctgaccattgaccaattcgttgatctagagaaatccttagaatttgagaaaccaaggtatgacgagagcagatcattacttcgctctggaccggcatcatctttaagagtcaacattcgggcagtggcacaatatgcttctagtaatggtcaaggcaaggctgcatcagatgctgtggacgagtgcttacgagcactggaagatctcgactcactactactacatgcatcacggaatgatccgtcagcatccgttgaaaccatgaggagcaagatcagtgttgcccttgcagcattagacaatctcttgcaaacggtgccatctgcagtactggataaaggaaaggcgattgctgatgcataccgaactccagtagatgattatgtagagggctgaaacagttggaggatattctttaaggctgaattttgttaggttctatatcatgtatacctgtttggattactaaattcctcgaactgtacatcccaatttataattcgttttgcttttttttatgaagtttgattggct

SEQ ID NO: 6586 - DNA, 1207 bp, Zea Mays
caccaagagagaagaaccgcagtcccgctccttccctgccggctgccgctgccccgtctctgtctccaactccgaatatgtcgtcctcgcccctccccaccacctccggcggggctcacatcttcccgtctccgcctcgaccgcgccaccgccggtgctcccaagtaatcgtcgccgccgccgctccgccccgttcctacggcgtcggtcgccgcgccgtctccctagccggcgtcgccgcctggcttgccactaccgtcggccgggcagacgcggccagtccatttgacaagtacgtcaagaggaagaagctggagcctttggagacctacgttccggctgtcctgctgaccattgaccaattcgttgatctaggtaatgcacgagtaggatgatcagtatcccacggtatcaacttatctgtcgcctcagcaaccttgagctgatgcaaaataaagtgtataatcttttgcaccatcatcagcaagtatgaattgtgtttatccttaagagtcccaattaccattaattaatacttcaatttggcattcatagcatctgcctgcctctcatggcgtccatagctaactagaagtggaagtacatttgttttaatgtttctgcctttgttgttttttttaatatggctgtcaattttttagcggtccatgagagatccttccatatatggttcattgcagagaaatccttagaatttgagaaaccaaggtatgacgagagcagatcattacttcgctctggaccggcatcatctttaagagtcaacattcgggcagtggcacaatatgcttctagtaatggtcaaggcaaggctgcatcagatgctgtggacgagtgcttacgagcactggaagatctcgactcactactactacatgcatcacggaatgatccgtcagcatccgttgaaaccatgaggagcaagatcagtgttgcccttgcagcattagacaatctcttgcaaacggtgccatctgcagtactggataaaggaaaggcgattgctgatgcataccgaactccagtagatgattatgtagagggctgaaacagttggaggatattctttaaggctgaattttgttaggttctatatcatgtatacctgtttggattactaaattcctcgaactgtacatcccaatttataattcgttttgcttttttttatgaagtttgattggct

SEQ ID NO: 6587 - DNA, 1770 bp, Zea Mays
acatagtgctaacagaacccgacgggattcaggttgacgacgtgacggcggaacccccttcgacccctgctccacggggagacgtggagatgatgaccgaggacgagaaggagaaggccagattgtttctgcctgatttgaggcgaagccccacttctagttcgcggggtccggctgtggaggagatgacttcgaatgaatctgttagcagtaatagcatctcaaactttaaatggggtgcaaccaataggcggtctcggacgcagtttagaggacaaggagacactgagatttcggctccagccttaattggaagctcagacaaagggatttctggcctctctgctggcacctcaaaggagaagaaaggcactgaagaaactcgtagtgcacagaacacaggagatttagggcttattagttcttcatcaagtccagtaacaagcgcacaacggccactcccaagctccagcgtaggctcaaactcaagagaatcaaaaaagagggataccgctttgcatccactgattttcaaggaagctggccttccagataatactttgttgacttacaagttgaagaacggagaggcactactgcaagggtataagcagggagcaggtattgtctgcaattgttgcaatcaagaggtttccccttcggaatttgaaaaacacgctggcatggggaaaagacgacaaccgtatcaaaacatttatacatcacaaggattaacactccatgatgttgctctgcaactgcatcatttgaatttgaattcaaatggatttagcaatgctagtgtttccagcttcagtgactacccaaaccttacttcttcaggttgtggcaaagaaccttctgtcagtggacctattgtccccctgaaacggactttacaagaaagagtggtccaaacagagagttgctatttctgtgggtatggccacacagagcttggaaaaattgatccaaacatgattgtcttctgtaaccagtgtgagagaccatgccacgtgaaatgttacaatagtagagttgtaaaaaagaaggtgcctctggaaattttgaaagactacttgtgttttcacttcttgtgctgccaagaatgtcagtcacttcgtgtccgtctagaaggaatggagaagtgtgaagagattgccttccttggacggataagatccaatatttgttggcggcttttaagtagcgctgacgcaagtagggatgttaaactctacttgtctcaggtcatcgacatcttcaaatacgcatgttgtgtctgctgcgattctgaaagtgcgcgtggaacatgctgcagaactggtccttattgctactcgtagcgagtgcagaaaaaagggctacttcagacttctcctagagtcaatcgagacaaatttgagagcctgtaatgtaagccttcttatggcacctgttgaccctgaaatggcacaaatctggtcagataaactcgggttcaccattttatcagccgatgagaagaagtccatgctggagtcgcaccctttggtgatgttcaagaacctagtcttggtgcagaaaccacttgcttgagccaatttaattaatgtttgattatactactcttttcatcctgaaatataattcgttttaggctaaacatacattcattatttaaattatgagtgtagtttgtatgcatgtctatatttcatggttattttttcttaaacacgaaggagagctgtgcatcattaaattaagagaagaaaacagtctaaaatg

SEQ ID NO: 6588 - DNA, 1890 bp, Zea Mays
caacctccttaatgccctaggataagcattaaggaggttgacgacgtgacggcggaacccccttcgacccctgctccacggggagacgtggagatgatgaccgaggacgagaaggagaaggccagattgtttctgcctgatttgaggcgaagccccacttctagttcgcggggtccggctgtggaggagatgacttcgaatgaatctgttagcagtaatagcatctcaaactttaaatggggtgcaaccaataggcggtctcggacgcagtttagaggacaaggagacactgagatttcggctccagccttaattggaagctcagacaaagggatttctggcctctctgctggcacctcaaaggagaagaaaggcactgaagaaactcgtagtgcacagaacacaggagatttagggcttattagttcttcatcaagtccagtaacaagcgcacaacggccactcccaagctccagcgtaggctcaaactcaagagaatcaaaaaagagggataccgctttgcatccactgattttcaaggaagctggccttccagataatactttgttgacttacaagttgaagaacggagaggcactactgcaagggtataagcagggagcaggtattgtctgcaattgttgcaatcaagaggtttccccttcggaatttgaaaaacacgctggcatggggaaaagacgacaaccgtatcaaaacatttatacatcacaaggattaacactccatgatgttgctctgcaactgcatcatttgaatttgaattcaaatggatttagcaatgctagtgtttccagcttcagtgactacccaaaccttacttcttcaggttgtggcaaagaaccttctgtcagtggacctattgtccccctgaaacggactttacaagaaagagtggtccaaacagagagttgctatttctgtgggtatggccacacagagcttggaaaaattgatccaaacatgattgtcttctgtaaccagtgtgagagaccatgccacgtgaaatgttacaatagtagagttgtaaaaaagaaggtgcctctggaaattttgaaagactacttgtgttttcacttcttgtgctgccaagaatgtcagtcacttcgtgtccgtctagaaggaatggagaagtgtgaagagattgccttccttggacggataagatccaatatttgttggcggcttttaagtagcgctgacgcaagtagggatgttaaactctacttgtctcaggtcatcgacatcttcaaagatgcatttttggaatctactgatgcgcacagtgacatctcagatatggtttatggaaaaaatagagaaggagagaaggattttcgaggaatgtattgtgtagtgttaactgcaagtacgcatgttgtgtctgctgcgattctgaaagtgcgcgtggaacatgctgcagaactggtccttattgctactcgtagcgagtgcagaaaaaagggctacttcagacttctcctagagtcaatcgagacaaatttgagagcctgtaatgtaagccttcttatggcacctgttgaccctgaaatggcacaaatctggtcagataaactcgggttcaccattttatcagccgatgagaagaagtccatgctggagtcgcaccctttggtgatgttcaagaacctagtcttggtgcagaaaccacttgcttgagccaatttaattaatgtttgattatactactcttttcatcctgaaatataattcgttttaggctaaacatacattcattatttaaattatgagtgtagtttgtatgcatgtctatatttcatggttattttttcttaaacacgaaggagagctgtgcatcattaaattaagagaagaaaacagtctaaaatg

SEQ ID NO: 6589 - DNA, 3212 bp, Zea Mays
cgccctctccacaggaacccgcgacggattttatcgatggctttaataacccacttaggcagatccagtgccatcatatgatagataacagtagcagtgagaacaaattgcacctgggtagctctgccagcatgggtcatcaggtattcaggtcagctttccaagccggtaagaggtcagccaccttgtcaatgagaggtcattactctaaaatgctgccctctccatttatgtttcccatcatttaatcaattgaaagtgtgactggtgtccgctgttctaaagttctgtagccaaagtttgtcatgtcctcaatggatgctttaacaagacacaattcacaaaattcgctacaatgccttgtgtcacttcttcaactttgatgttccagatggcccgctaaagattagagcaacatgtactggaccatcatcaacaatagctaagatagtccgcatggttgaggatgcccaagcacgtgaagctcctgttcaaaggctcgcagattccatcgcaggaccatttgtgtatactgttatgacgttggctgcaacaaccttttccttctggtattacattggcacacacttatttcctgaggttcttctgaatgatattgctggtccggatggggattcattacttttgagtataaagcttgctgtggatgtattagttgtttcctgtccttgtgcacttggattagctacacctacagctatcttaataggaacttccctaggtgctaaaagagggttactggttagaggaggtgatgttttagagcgtttggctggaatagatactcttgtgcttgataaaacagggacgcttacagaaggaaaaccagtagtgacttctattgcttctctggcatatgaggagacagaggtccttcgtcttgctgctgcagtggagaaaacagcattgcacccaattgcaaatgctataatgaacaaggctgaactactcaagttggatattccgatcacaagtggtcagcttacatcgcctggatttggttgtttggctgaagtagatgggagtttagttgcagtgggcactttggattgggtgcatgatcgttttgaaactaaagcatcgccaactgaactgagagaccttagaaaccggctggagtttatgttgtcaagtgaagcatcatcatcaaaccagtcgaagtcaattgcttatgttggccgtgagggagaaggaattataggtgctattgctatatcagatattttacgagaagatgcaaacttaactgtggagaggttgcagcaggaaagcattacaacgttcctgctgtcaggggataggggagaagcagtgacaagcattgggaggaccattggaatcaggaatgaaaacataaagtcttccctgactccgcaagacaaagcaagcattatatcaactttgcaagcgaagggacacagagttgcaatggttggtgatggaataaacgatgccccgtctttagcagccgcagatgttggaatagccatgcgaactcattcaaaagagaacgctgcctctgatgcagcttcagttgttctactaggcaacagactttctcaggtggtagatgcgctatccctgtcgaaggcaacgatggcaaaagttcaccaaaatttggcctgggcagtggcatataacatagtagccattccaattgccgctggagtgctgctgccacaatatgatttcgccatgacaccatctctctcaggggggttgatggcccttagctcaatctttgttgtcagcaattctttgcttctgcagctgcatgggtcgtttcagaacacagaaaaacggcagggtgatctgagctcaagattaaactgaattgttgggtttagtttgacccagccgaaggacagtggtattgaattatagagggttctgatactggttttccagctccggctaattgaactgagtcagaactataagtagcaagctattcgtgtcagtagtagcatgttcctgtactgtttgtcaacccaactatagtagcaagtatgacccagaaggacaataatctaccacggccttcaaaaacattgtaaattagtaatggtactgctgtaagcctgtaaacaaagttaaggcgtatgactatcgttcatggtctagcaatgtgcaacaagctataagcttcatttcacacaggtatgggaagttcagtcaacagaactagtcgaatagcaagcagtacacatagcaactatggccacactataatggcaatcatacccctgaacaatagcatagctaggagattactggcgattcttctacttctacttctacttccatgtgttggttgttctaggcttctagcactcttcgtatccatcgttgttggcccagtgcaccttcttgccgctgctgctccgcatcaccttctcgtcgacggccttcaccccggcctccgcagctgccgccgactcggcctgcacacgcgccatcttcctccctcgctttctcgccgcggccgccttctccgtctcggcctcctggtactccctcgcccaacgccggctcagcacgcatgttgcagctagcgcgacggcctgcgccatgaacatggccagcagcagtagctcctcgaggaacgccagcacgaactgctcccggcgatccctggcggagccgaggaggcggaggctgtggtcgtggcggaggaagaaggccagggaggccagtgcgtggccggacagcgcggcgagcgcgagcgccgtgctcgcggcgaggcagaggtgggtgagctgcgcgtggagcgctgcgagtgcggagagcagggtggtggcgtgcacggagacgagcgcccagccgaagggcgtcggccgcgggcggaggaggaagaccgggccgagcgcggcggcggcgaggacgaggagggagaggttgaggagccagaccagtaggttgggaagagaggagcatctccgtaggctcgagttctcggtggcggacgccattgctttactgggtgcttgtgttctcagtgcgacagtgatcgtgtgagtctgatctgttgctgaatgctgagttcagaggagcggggaagtgcgtggcgcgtggggtaaggtttatacagagtgggaagactgaccgttgagcagagcaacggctaagtcggcgccgggagtgtggagcctatgattactgtctcctagtcctagttcaccgtgctcgag

SEQ ID NO: 6590 - DNA, 3892 bp, Zea Mays
gggggctggggagagcgcgcgcaagtggagggagatggcggccaggaaggaggaactcctggtgcggagccggggccgagtcgcgttcgcgtggacgctcgtcgcgctctgctgcggctcgcacgcgtcccacatcctgcactcgctcggtatccatgtcggccacggaacgtttttggatctgttgcataatccttatgtgaaatgtggcattgctacaactgctttgtttgggcctggaagagatatactctttgatggttttagagcattcaagcaaggttccccgaacatgaactctctagtaggatttggatctgcagctgcatttactatcagtgctgtgtccttgctgaaccctgactgggagtggaattcaaccttttttgatgaaccggtcatgcttcttggatttgtacttcttggacgatctcttgaagaaagtgcaaggcttaaggcatccagcgatatgaatgagctcatttcactgttatcacctcagtcgaggttaattgttacttcctcaagtgacaacccttctgcggacagtagtttgaattctgatgcgatcacagtcgaggttcctgttgatgatgtccgtgttggagactcaatattggtcctgccgggagagactatacctgtagatggtaatgtcattgaaggatcaagttttgttgacgaatcaatgcttactggagagtccttgcctgtagccaaggagactgggcttcctgtattttcaggaactgtgaactgggatggcccgctaaagattagagcaacatgtactggaccatcatcaacaatagctaagatagtccgcatggttgaggatgcccaagcacgtgaagctcctgttcaaaggctcgcagattccatcgcaggaccatttgtgtatactgttatgacgttggctgcaacaaccttttccttctggtgtgctcttgtttttttatttcttctatgaaaatcttatgactaaaaatattgcctttttatccctcacccccttcccaaggtattacattggcacacacttatttcctgaggttcttctgaatgatattgctggtccggatggggattcattacttttgagtataaagcttgctgtggatgtattagtaagtgaccctgctatagttttttctttaacagaagaaaaaactcagcatttcaatctaggttttggaattttttcaaattgactggtttcacagttgatcaattaacatgtacccttaatatggtgtggtaattgcacatgcaaaacctgaaatctcattcaaaagctctttcgcaaaaccacgtttgaagcgtttattttgactaattctgtgaactttactcctgcaggttgtttcctgtccttgtgcacttggattagctacacctacagctatcttaataggaacttccctaggtgctaaaagagggttactggttagaggaggtgatgttttagagcgtttggctggaatagatactcttgtgcttgataaaggacgcttacagaaggaaaaccagtagtgacttctattgcttctctggcatatgaggagacagaggtccttcgtcttgctgctgcagtggagaaaacagcattgcacccaattgcaaatgctataatgaacaaggctgaactactcaagttggatattccgatcacaagtggtcagcttacatcgcctggatttggttgtttggctgaagtagatgggagtttagttgcagtgggcactttggattgggtgcatgatcgttttgaaactaaagcatcgccaactgaactgagagaccttagaaaccggctggagtttatgttgtcaagtgaagcatcatcatcaaaccagtcgaagtcaattgcttatgttggccgtgagggagaaggaattataggtgctattgctatatcagatattttacgagaagatgcaaacttaactgtggagaggttgcagcaggaaagcattacaacgttcctgctgtcaggggataggggagaagcagtgacaagcattgggaggaccattggaatcaggaatgaaaacataaagtcttccctgactccgcaagacaaagcaagcattatatcaactttgcaagcgaagggacacagagttgcaatggttggtgatggaataaacgatgccccgtctttagcagccgcagatgttggaatagccatgcgaactcattcaaaagagaacgctgcctctgatgcagcttcagttgttctactaggcaacagactttctcaggtggtagatgcgctatccctgtcgaaggcaacgatggcaaaagttcaccaaaatttggcctgggcagtggcatataacatagtagccattccaattgccgctggagtgctgctgccacaatatgatttcgccatgacaccatctctctcaggggggttgatggcccttagctcaatctttgttgtcagcaattctttgcttctgcagctgcatgggtcgtttcagaacacagaaaaacggcagggtgatctgagctcaagattaaactgaattgttgggtttagtttgacccagccgaaggacagtggtattgaattatagagggttctgatactggttttccagctccggctaattgaactgagtcagaactataagtagcaagctattcgtgtcagtagtagcatgttcctgtactgtttgtcaacccaactatagtagcaagtatgacccagaaggacaataatctaccacggccttcaaaaacattgtaaattagtaatggtactgctgtaagcctgtaaacaaagttaaggcgtatgactatcgttcatggtctagcaatgtgcaacaagctataagcttcatttcacacaggtatgggaagttcagtcaacagaactagtcgaatagcaagcagtacacatagcaactatggccacactataatggcaatcatacccctgaacaatagcatagctaggagattactggcgattcttctacttctacttctacttccatgtgttggttgttctaggcttctagcactcttcgtatccatcgttgttggcccagtgcaccttcttgccgctgctgctccgcatcaccttctcgtcgacggccttcaccccggcctccgcagctgccgccgactcggcctgcacacgcgccatcttcctccctcgctttctcgccgcggccgccttctccgtctcggcctcctggtactccctcgcccaacgccggctcagcacgcatgttgcagctagcgcgacggcctgcgccatgaacatggccagcagcagtagctcctcgaggaacgccagcacgaactgctcccggcgatccctggcggagccgaggaggcggaggctgtggtcgtggcggaggaagaaggccagggaggccagtgcgtggccggacagcgcggcgagcgcgagcgccgtgctcgcggcgaggcagaggtgggtgagctgcgcgtggagcgctgcgagtgcggagagcagggtggtggcgtgcacggagacgagcgcccagccgaagggcgtcggccgcgggcggaggaggaagaccgggccgagcgcggcggcggcgaggacgaggagggagaggttgaggagccagaccagtaggttgggaagagaggagcatctccgtaggctcgagttctcggtggcggacgccattgctttactgggtgcttgtgttctcagtgcgacagtgatcgtgtgagtctgatctgttgctgaatgctgagttcagaggagcggggaagtgcgtggcgcgtggggtaaggtttatacagagtgggaagactgaccgttgagcagagcaacggctaagtcggcgccgggagtgtggagcctatgattactgtctcctagtcctagttcaccgtgctcgag

SEQ ID NO: 6591 - DNA, 3509 bp, Zea Mays
gggggctggggagagcgcgcgcaagtggagggagatggcggccaggaaggaggaactcctggtgcggagccggggccgagtcgcgttcgcgtggacgctcgtcgcgctctgctgcggctcgcacgcgtcccacatcctgcactcgctcggtatccatgtcggccacggaacgtttttggatctgttgcataatccttatgtgaaatgtggcattgctacaactgctttgtttgggcctggaagagatatactctttgatggttttagagcattcaagcaaggttccccgaacatgaactctctagtaggatttggatctgcagctgcatttactatcagtgctgtgtccttgctgaaccctgactgggagtggaattcaaccttttttgatgaaccgcatgcaggtcatgcttcttggatttgtacttcttggacgatctcttgaagaaagtgcaaggcttaaggcatccagcgatatgaatgagctcatttcactgttatcacctcagtcgaggttaattgttacttcctcaagtgacaacccttctgcggacagtagtttgaattctgatgcgatcacagtcgaggttcctgttgatgatgtccgtgttggagactcaatattggtcctgccgggagagactatacctgtagatggtaatgtcattgaaggatcaagttttgttgacgaatcaatgcttactggagagtccttgcctgtagccaaggagactgggcttcctgtattttcaggaactgtgaactgggatggcccgctaaagattagagcaacatgtactggaccatcatcaacaatagctaagatagtccgcatggttgaggatgcccaagcacgtgaagctcctgttcaaaggctcgcagattccatcgcaggaccatttgtgtatactgttatgacgttggctgcaacaaccttttccttctggtattacattggcacacacttatttcctgaggttcttctgaatgatattgctggtccggatggggattcattacttttgagtataaagcttgctgtggatgtattagttgtttcctgtccttgtgcacttggattagctacacctacagctatcttaataggaacttccctagacagggacgcttacagaaggaaaaccagtagtgacttctattgcttctctggcatatgaggagacagaggtccttcgtcttgctgctgcagtggagaaaacagcattgcacccaattgcaaatgctataatgaacaaggctgaactactcaagttggatattccgatcacaagtggtcagcttacatcgcctggatttggttgtttggctgaagtagatgggagtttagttgcagtgggcactttggattgggtgcatgatcgttttgaaactaaagcatcgccaactgaactgagagaccttagaaaccggctggagtttatgttgtcaagtgaagcatcatcatcaaaccagtcgaagtcaattgcttatgttggccgtgagggagaaggaattataggtgctattgctatatcagatattttacgagaagatgcaaacttaactgtggagaggttgcagcaggaaagcattacaacgttcctgctgtcaggggataggggagaagcagtgacaagcattgggaggaccattggaatcaggaatgaaaacataaagtcttccctgactccgcaagacaaagcaagcattatatcaactttgcaagcgaagggacacagagttgcaatggttggtgatggaataaacgatgccccgtctttagcagccgcagatgttggaatagccatgcgaactcattcaaaagagaacgctgcctctgatgcagcttcagttgttctactaggcaacagactttctcaggtggtagatgcgctatccctgtcgaaggcaacgatggcaaaagttcaccaaaatttggcctgggcagtggcatataacatagtagccattccaattgccgctggagtgctgctgccacaatatgatttcgccatgacaccatctctctcaggggggttgatggcccttagctcaatctttgttgtcagcaattctttgcttctgcagctgcatgggtcgtttcagaacacagaaaaacggcagggtgatctgagctcaagattaaactgaattgttgggtttagtttgacccagccgaaggacagtggtattgaattatagagggttctgatactggttttccagctccggctaattgaactgagtcagaactataagtagcaagctattcgtgtcagtagtagcatgttcctgtactgtttgtcaacccaactatagtagcaagtatgacccagaaggacaataatctaccacggccttcaaaaacattgtaaattagtaatggtactgctgtaagcctgtaaacaaagttaaggcgtatgactatcgttcatggtctagcaatgtgcaacaagctataagcttcatttcacacaggtatgggaagttcagtcaacagaactagtcgaatagcaagcagtacacatagcaactatggccacactataatggcaatcatacccctgaacaatagcatagctaggagattactggcgattcttctacttctacttctacttccatgtgttggttgttctaggcttctagcactcttcgtatccatcgttgttggcccagtgcaccttcttgccgctgctgctccgcatcaccttctcgtcgacggccttcaccccggcctccgcagctgccgccgactcggcctgcacacgcgccatcttcctccctcgctttctcgccgcggccgccttctccgtctcggcctcctggtactccctcgcccaacgccggctcagcacgcatgttgcagctagcgcgacggcctgcgccatgaacatggccagcagcagtagctcctcgaggaacgccagcacgaactgctcccggcgatccctggcggagccgaggaggcggaggctgtggtcgtggcggaggaagaaggccagggaggccagtgcgtggccggacagcgcggcgagcgcgagcgccgtgctcgcggcgaggcagaggtgggtgagctgcgcgtggagcgctgcgagtgcggagagcagggtggtggcgtgcacggagacgagcgcccagccgaagggcgtcggccgcgggcggaggaggaagaccgggccgagcgcggcggcggcgaggacgaggagggagaggttgaggagccagaccagtaggttgggaagagaggagcatctccgtaggctcgagttctcggtggcggacgccattgctttactgggtgcttgtgttctcagtgcgacagtgatcgtgtgagtctgatctgttgctgaatgctgagttcagaggagcggggaagtgcgtggcgcgtggggtaaggtttatacagagtgggaagactgaccgttgagcagagcaacggctaagtcggcgccgggagtgtggagcctatgattactgtctcctagtcctagttcaccgtgctcgag

SEQ ID NO: 6592 - DNA, 3572 bp, Zea Mays
gggggctggggagagcgcgcgcaagtggagggagatggcggccaggaaggaggaactcctggtgcggagccggggccgagtcgcgttcgcgtggacgctcgtcgcgctctgctgcggctcgcacgcgtcccacatcctgcactcgctcggtatccatgtcggccacggaacgtttttggatctgttgcataatccttatgtgaaatgtggcattgctacaactgctttgtttgggcctggaagagatatactctttgatggttttagagcattcaagcaaggttccccgaacatgaactctctagtaggatttggatctgcagctgcatttactatcagtgctgtgtccttgctgaaccctgactgggagtggaattcaaccttttttgatgaaccgcatgcaggtcatgcttcttggatttgtacttcttggacgatctcttgaagaaagtgcaaggcttaaggcatccagcgatatgaatgagctcatttcactgttatcacctcagtcgaggttaattgttacttcctcaagtgacaacccttctgcggacagtagtttgaattctgatgcgatcacagtcgaggttcctgttgatgatgtccgtgttggagactcaatattggtcctgccgggagagactatacctgtagatggtaatgtcattgaaggatcaagttttgttgacgaatcaatgcttactggagagtccttgcctgtagccaaggagactgggcttcctgtattttcaggaactgtgaactgggatggcccgctaaagattagagcaacatgtactggaccatcatcaacaatagctaagatagtccgcatggttgaggatgcccaagcacgtgaagctcctgttcaaaggctcgcagattccatcgcaggaccatttgtgtatactgttatgacgttggctgcaacaaccttttccttctggttgtttcctgtccttgtgcacttggattagctacacctacagctatcttaataggaacttccctaggtgctaaaagagggttactggttagaggaggtgatgttttagagcgtttggctggaatagatactcttgtgcttgataaagtgcgtgtttcttttatcattttttcatggtaaagtactattcccattgttgcgtttttttcattagaaacaatgtattccgattctagacagggacgcttacagaaggaaaaccagtagtgacttctattgcttctctggcatatgaggagacagaggtccttcgtcttgctgctgcagtggagaaaacagcattgcacccaattgcaaatgctataatgaacaaggctgaactactcaagttggatattccgatcacaagtggtcagcttacatcgcctggatttggttgtttggctgaagtagatgggagtttagttgcagtgggcactttggattgggtgcatgatcgttttgaaactaaagcatcgccaactgaactgagagaccttagaaaccggctggagtttatgttgtcaagtgaagcatcatcatcaaaccagtcgaagtcaattgcttatgttggccgtgagggagaaggaattataggtgctattgctatatcagatattttacgagaagatgcaaacttaactgtggagaggttgcagcaggaaagcattacaacgttcctgctgtcaggggataggggagaagcagtgacaagcattgggaggaccattggaatcaggaatgaaaacataaagtcttccctgactccgcaagacaaagcaagcattatatcaactttgcaagcgaagggacacagagttgcaatggttggtgatggaataaacgatgccccgtctttagcagccgcagatgttggaatagccatgcgaactcattcaaaagagaacgctgcctctgatgcagcttcagttgttctactaggcaacagactttctcaggtggtagatgcgctatccctgtcgaaggcaacgatggcaaaagttcaccaaaatttggcctgggcagtggcatataacatagtagccattccaattgccgctggagtgctgctgccacaatatgatttcgccatgacaccatctctctcaggggggttgatggcccttagctcaatctttgttgtcagcaattctttgcttctgcagctgcatgggtcgtttcagaacacagaaaaacggcagggtgatctgagctcaagattaaactgaattgttgggtttagtttgacccagccgaaggacagtggtattgaattatagagggttctgatactggttttccagctccggctaattgaactgagtcagaactataagtagcaagctattcgtgtcagtagtagcatgttcctgtactgtttgtcaacccaactatagtagcaagtatgacccagaaggacaataatctaccacggccttcaaaaacattgtaaattagtaatggtactgctgtaagcctgtaaacaaagttaaggcgtatgactatcgttcatggtctagcaatgtgcaacaagctataagcttcatttcacacaggtatgggaagttcagtcaacagaactagtcgaatagcaagcagtacacatagcaactatggccacactataatggcaatcatacccctgaacaatagcatagctaggagattactggcgattcttctacttctacttctacttccatgtgttggttgttctaggcttctagcactcttcgtatccatcgttgttggcccagtgcaccttcttgccgctgctgctccgcatcaccttctcgtcgacggccttcaccccggcctccgcagctgccgccgactcggcctgcacacgcgccatcttcctccctcgctttctcgccgcggccgccttctccgtctcggcctcctggtactccctcgcccaacgccggctcagcacgcatgttgcagctagcgcgacggcctgcgccatgaacatggccagcagcagtagctcctcgaggaacgccagcacgaactgctcccggcgatccctggcggagccgaggaggcggaggctgtggtcgtggcggaggaagaaggccagggaggccagtgcgtggccggacagcgcggcgagcgcgagcgccgtgctcgcggcgaggcagaggtgggtgagctgcgcgtggagcgctgcgagtgcggagagcagggtggtggcgtgcacggagacgagcgcccagccgaagggcgtcggccgcgggcggaggaggaagaccgggccgagcgcggcggcggcgaggacgaggagggagaggttgaggagccagaccagtaggttgggaagagaggagcatctccgtaggctcgagttctcggtggcggacgccattgctttactgggtgcttgtgttctcagtgcgacagtgatcgtgtgagtctgatctgttgctgaatgctgagttcagaggagcggggaagtgcgtggcgcgtggggtaaggtttatacagagtgggaagactgaccgttgagcagagcaacggctaagtcggcgccgggagtgtggagcctatgattactgtctcctagtcctagttcaccgtgctcgag

SEQ ID NO: 6593 - DNA, 3582 bp, Zea Mays
gggggctggggagagcgcgcgcaagtggagggagatggcggccaggaaggaggaactcctggtgcggagccggggccgagtcgcgttcgcgtggacgctcgtcgcgctctgctgcggctcgcacgcgtcccacatcctgcactcgctcggtatccatgtcggccacggaacgtttttggatctgttgcataatccttatgtgaaatgtggcattgctacaactgctttgtttgggcctggaagagatatactctttgatggttttagagcattcaagcaaggttccccgaacatgaactctctagtaggatttggatctgcagctgcatttactatcagtgctgtgtccttgctgaaccctgactgggagtggaattcaaccttttttgatgaaccggtcatgcttcttggatttgtacttcttggacgatctcttgaagaaagtgcaaggcttaaggcatccagcgatatgaatgagctcatttcactgttatcacctcagtcgaggttaattgttacttcctcaagtgacaacccttctgcggacagtagtttgaattctgatgcgatcacagtcgaggttcctgttgatgatgtccgtgttggagactcaatattggtcctgccgggagagactatacctgtagatggtaatgtcattgaaggatcaagttttgttgacgaatcaatgcttactggagagtccttgcctgtagccaaggagactgggcttcctgtattttcaggaactgtgaactgggatggcccgctaaagattagagcaacatgtactggaccatcatcaacaatagctaagatagtccgcatggttgaggatgcccaagcacgtgaagctcctgttcaaaggctcgcagattccatcgcaggaccatttgtgtatactgttatgacgttggctgcaacaaccttttccttctggtattacattggcacacacttatttcctgaggttcttctgaatgatattgctggtccggatggggattcattacttttgagtataaagcttgctgtggatgtattagttgtttcctgtccttgtgcacttggattagctacacctacagctatcttaataggaacttccctaggtgctaaaagagggttactggttagaggaggtgatgttttagagcgtttggctggaatagatactcttgtgcttgataaaacagggacgcttacagaaggaaaaccagtagtgacttctattgcttctctggcatatgaggagacagaggtccttcgtcttgctgctgcagtggagaaaacagcattgcacccaattgcaaatgctataatgaacaaggctgaactactcaagttggatattccgatcacaagtggtcagcttacatcgcctggatttggttgtttggctgaagtagatgggagtttagttgcagtgggcactttggattgggtgcatgatcgttttgaaactaaagcatcgccaactgaactgagagaccttagaaaccggctggagtttatgttgtcaagtgaagcatcatcatcaaaccagtcgaagtcaattgcttatgttggccgtgagggagaaggaattataggtgctattgctatatcagatattttacgagaagatgcaaacttaactgtggagaggttgcagcaggaaagcattacaacgttcctgctgtcaggggataggggagaagcagtgacaagcattgggaggaccattggaatcaggaatgaaaacataaagtcttccctgactccgcaagacaaagcaagcattatatcaactttgcaagcgaagggacacagagttgcaatggttggtgatggaataaacgatgccccgtctttagcagccgcagatgttggaatagccatgcgaactcattcaaaagagaacgctgcctctgatgcagcttcagttgttctactaggcaacagactttctcaggtggtagatgcgctatccctgtcgaaggcaacgatggcaaaagttcaccaaaatttggcctgggcagtggcatataacatagtagccattccaattgccgctggagtgctgctgccacaatatgatttcgccatgacaccatctctctcaggggggttgatggcccttagctcaatctttgttgtcagcaattctttgcttctgcagctgcatgggtcgtttcagaacacagaaaaacggcagggtgatctgagctcaagattaaactgaattgttgggtttagtttgacccagccgaaggacagtggtattgaattatagagggttctgatactggttttccagctccggctaattgaactgagtcagaactataagtagcaagctattcgtgtcagtagtagcatgttcctgtactgtttgtcaacccaactatagtagcaagtatgacccagaaggacaataatctaccacggccttcaaaaacattgtaaattagtaatggtactgctgtaagcctgtaaacaaagttaaggcgtatgactatcgttcatggtctagcaatgtgcaacaagctataagcttcatttcacacaggtatgggaagttcagtcaacagaactagtcgaatagcaagcagtacacatagcaactatggccacactataatggcaatcatacccctgaacaatagcatagctaggagattactggcgattcttctacttctacttctacttccatgtgttggttgttctaggcttctagcactcttcgtatccatcgttgttggcccagtgcaccttcttgccgctgctgctccgcatcaccttctcgtcgacggccttcaccccggcctccgcagctgccgccgactcggcctgcacacgcgccatcttcctccctcgctttctcgccgcggccgccttctccgtctcggcctcctggtactccctcgcccaacgccggctcagcacgcatgttgcagctagcgcgacggcctgcgccatgaacatggccagcagcagtagctcctcgaggaacgccagcacgaactgctcccggcgatccctggcggagccgaggaggcggaggctgtggtcgtggcggaggaagaaggccagggaggccagtgcgtggccggacagcgcggcgagcgcgagcgccgtgctcgcggcgaggcagaggtgggtgagctgcgcgtggagcgctgcgagtgcggagagcagggtggtggcgtgcacggagacgagcgcccagccgaagggcgtcggccgcgggcggaggaggaagaccgggccgagcgcggcggcggcgaggacgaggagggagaggttgaggagccagaccagtaggttgggaagagaggagcatctccgtaggctcgagttctcggtggcggacgccattgctttactgggtgcttgtgttctcagtgcgacagtgatcgtgtgagtctgatctgttgctgaatgctgagttcagaggagcggggaagtgcgtggcgcgtggggtaaggtttatacagagtgggaagactgaccgttgagcagagcaacggctaagtcggcgccgggagtgtggagcctatgattactgtctcctagtcctagttcaccgtgctcgag

SEQ ID NO: 6594 - DNA, 3589 bp, Zea Mays
gggggctggggagagcgcgcgcaagtggagggagatggcggccaggaaggaggaactcctggtgcggagccggggccgagtcgcgttcgcgtggacgctcgtcgcgctctgctgcggctcgcacgcgtcccacatcctgcactcgctcggtatccatgtcggccacggaacgtttttggatctgttgcataatccttatgtgaaatgtggcattgctacaactgctttgtttgggcctggaagagatatactctttgatggttttagagcattcaagcaaggttccccgaacatgaactctctagtaggatttggatctgcagctgcatttactatcagtgctgtgtccttgctgaaccctgactgggagtggaattcaaccttttttgatgaaccgcatgcaggtcatgcttcttggatttgtacttcttggacgatctcttgaagaaagtgcaaggcttaaggcatccagcgatatgaatgagctcatttcactgttatcacctcagtcgaggttaattgttacttcctcaagtgacaacccttctgcggacagtagtttgaattctgatgcgatcacagtcgaggttcctgttgatgatgtccgtgttggagactcaatattggtcctgccgggagagactatacctgtagatggtaatgtcattgaaggatcaagttttgttgacgaatcaatgcttactggagagtccttgcctgtagccaaggagactgggcttcctgtattttcaggaactgtgaactgggatggcccgctaaagattagagcaacatgtactggaccatcatcaacaatagctaagatagtccgcatggttgaggatgcccaagcacgtgaagctcctgttcaaaggctcgcagattccatcgcaggaccatttgtgtatactgttatgacgttggctgcaacaaccttttccttctggtattacattggcacacacttatttcctgaggttcttctgaatgatattgctggtccggatggggattcattacttttgagtataaagcttgctgtggatgtattagttgtttcctgtccttgtgcacttggattagctacacctacagctatcttaataggaacttccctaggtgctaaaagagggttactggttagaggaggtgatgttttagagcgtttggctggaatagatactcttgtgcttgataaaacagggacgcttacagaaggaaaaccagtagtgacttctattgcttctctggcatatgaggagacagaggtccttcgtcttgctgctgcagtggagaaaacagcattgcacccaattgcaaatgctataatgaacaaggctgaactactcaagttggatattccgatcacaagtggtcagcttacatcgcctggatttggttgtttggctgaagtagatgggagtttagttgcagtgggcactttggattgggtgcatgatcgttttgaaactaaagcatcgccaactgaactgagagaccttagaaaccggctggagtttatgttgtcaagtgaagcatcatcatcaaaccagtcgaagtcaattgcttatgttggccgtgagggagaaggaattataggtgctattgctatatcagatattttacgagaagatgcaaacttaactgtggagaggttgcagcaggaaagcattacaacgttcctgctgtcaggggataggggagaagcagtgacaagcattgggaggaccattggaatcaggaatgaaaacataaagtcttccctgactccgcaagacaaagcaagcattatatcaactttgcaagcgaagggacacagagttgcaatggttggtgatggaataaacgatgccccgtctttagcagccgcagatgttggaatagccatgcgaactcattcaaaagagaacgctgcctctgatgcagcttcagttgttctactaggcaacagactttctcaggtggtagatgcgctatccctgtcgaaggcaacgatggcaaaagttcaccaaaatttggcctgggcagtggcatataacatagtagccattccaattgccgctggagtgctgctgccacaatatgatttcgccatgacaccatctctctcaggggggttgatggcccttagctcaatctttgttgtcagcaattctttgcttctgcagctgcatgggtcgtttcagaacacagaaaaacggcagggtgatctgagctcaagattaaactgaattgttgggtttagtttgacccagccgaaggacagtggtattgaattatagagggttctgatactggttttccagctccggctaattgaactgagtcagaactataagtagcaagctattcgtgtcagtagtagcatgttcctgtactgtttgtcaacccaactatagtagcaagtatgacccagaaggacaataatctaccacggccttcaaaaacattgtaaattagtaatggtactgctgtaagcctgtaaacaaagttaaggcgtatgactatcgttcatggtctagcaatgtgcaacaagctataagcttcatttcacacaggtatgggaagttcagtcaacagaactagtcgaatagcaagcagtacacatagcaactatggccacactataatggcaatcatacccctgaacaatagcatagctaggagattactggcgattcttctacttctacttctacttccatgtgttggttgttctaggcttctagcactcttcgtatccatcgttgttggcccagtgcaccttcttgccgctgctgctccgcatcaccttctcgtcgacggccttcaccccggcctccgcagctgccgccgactcggcctgcacacgcgccatcttcctccctcgctttctcgccgcggccgccttctccgtctcggcctcctggtactccctcgcccaacgccggctcagcacgcatgttgcagctagcgcgacggcctgcgccatgaacatggccagcagcagtagctcctcgaggaacgccagcacgaactgctcccggcgatccctggcggagccgaggaggcggaggctgtggtcgtggcggaggaagaaggccagggaggccagtgcgtggccggacagcgcggcgagcgcgagcgccgtgctcgcggcgaggcagaggtgggtgagctgcgcgtggagcgctgcgagtgcggagagcagggtggtggcgtgcacggagacgagcgcccagccgaagggcgtcggccgcgggcggaggaggaagaccgggccgagcgcggcggcggcgaggacgaggagggagaggttgaggagccagaccagtaggttgggaagagaggagcatctccgtaggctcgagttctcggtggcggacgccattgctttactgggtgcttgtgttctcagtgcgacagtgatcgtgtgagtctgatctgttgctgaatgctgagttcagaggagcggggaagtgcgtggcgcgtggggtaaggtttatacagagtgggaagactgaccgttgagcagagcaacggctaagtcggcgccgggagtgtggagcctatgattactgtctcctagtcctagttcaccgtgctcgag

SEQ ID NO: 6595 - DNA, 3560 bp, Zea Mays
gggggctggggagagcgcgcgcaagtggagggagatggcggccaggaaggaggaactcctggtgcggagccggggccgagtcgcgttcgcgtggacgctcgtcgcgctctgctgcggctcgcacgcgtcccacatcctgcactcgctcggtatccatgtcggccacggaacgtttttggatctgttgcataatccttatgtgaaatgtggcattgctacaactgctttgtttgggcctggaagagagcattcaagcaaggttccccgaacatgaactctctagtaggatttggatctgcagctgcatttactatcagtgctgtgtccttgctgaaccctgactgggagtggaattcaaccttttttgatgaaccggtcatgcttcttggatttgtacttcttggacgatctcttgaagaaagtgcaaggcttaaggcatccagcgatatgaatgagctcatttcactgttatcacctcagtcgaggttaattgttacttcctcaagtgacaacccttctgcggacagtagtttgaattctgatgcgatcacagtcgaggttcctgttgatgatgtccgtgttggagactcaatattggtcctgccgggagagactatacctgtagatggtaatgtcattgaaggatcaagttttgttgacgaatcaatgcttactggagagtccttgcctgtagccaaggagactgggcttcctgtattttcaggaactgtgaactgggatggcccgctaaagattagagcaacatgtactggaccatcatcaacaatagctaagatagtccgcatggttgaggatgcccaagcacgtgaagctcctgttcaaaggctcgcagattccatcgcaggaccatttgtgtatactgttatgacgttggctgcaacaaccttttccttctggtattacattggcacacacttatttcctgaggttcttctgaatgatattgctggtccggatggggattcattacttttgagtataaagcttgctgtggatgtattagttgtttcctgtccttgtgcacttggattagctacacctacagctatcttaataggaacttccctaggtgctaaaagagggttactggttagaggaggtgatgttttagagcgtttggctggaatagatactcttgtgcttgataaaacagggacgcttacagaaggaaaaccagtagtgacttctattgcttctctggcatatgaggagacagaggtccttcgtcttgctgctgcagtggagaaaacagcattgcacccaattgcaaatgctataatgaacaaggctgaactactcaagttggatattccgatcacaagtggtcagcttacatcgcctggatttggttgtttggctgaagtagatgggagtttagttgcagtgggcactttggattgggtgcatgatcgttttgaaactaaagcatcgccaactgaactgagagaccttagaaaccggctggagtttatgttgtcaagtgaagcatcatcatcaaaccagtcgaagtcaattgcttatgttggccgtgagggagaaggaattataggtgctattgctatatcagatattttacgagaagatgcaaacttaactgtggagaggttgcagcaggaaagcattacaacgttcctgctgtcaggggataggggagaagcagtgacaagcattgggaggaccattggaatcaggaatgaaaacataaagtcttccctgactccgcaagacaaagcaagcattatatcaactttgcaagcgaagggacacagagttgcaatggttggtgatggaataaacgatgccccgtctttagcagccgcagatgttggaatagccatgcgaactcattcaaaagagaacgctgcctctgatgcagcttcagttgttctactaggcaacagactttctcaggtggtagatgcgctatccctgtcgaaggcaacgatggcaaaagttcaccaaaatttggcctgggcagtggcatataacatagtagccattccaattgccgctggagtgctgctgccacaatatgatttcgccatgacaccatctctctcaggggggttgatggcccttagctcaatctttgttgtcagcaattctttgcttctgcagctgcatgggtcgtttcagaacacagaaaaacggcagggtgatctgagctcaagattaaactgaattgttgggtttagtttgacccagccgaaggacagtggtattgaattatagagggttctgatactggttttccagctccggctaattgaactgagtcagaactataagtagcaagctattcgtgtcagtagtagcatgttcctgtactgtttgtcaacccaactatagtagcaagtatgacccagaaggacaataatctaccacggccttcaaaaacattgtaaattagtaatggtactgctgtaagcctgtaaacaaagttaaggcgtatgactatcgttcatggtctagcaatgtgcaacaagctataagcttcatttcacacaggtatgggaagttcagtcaacagaactagtcgaatagcaagcagtacacatagcaactatggccacactataatggcaatcatacccctgaacaatagcatagctaggagattactggcgattcttctacttctacttctacttccatgtgttggttgttctaggcttctagcactcttcgtatccatcgttgttggcccagtgcaccttcttgccgctgctgctccgcatcaccttctcgtcgacggccttcaccccggcctccgcagctgccgccgactcggcctgcacacgcgccatcttcctccctcgctttctcgccgcggccgccttctccgtctcggcctcctggtactccctcgcccaacgccggctcagcacgcatgttgcagctagcgcgacggcctgcgccatgaacatggccagcagcagtagctcctcgaggaacgccagcacgaactgctcccggcgatccctggcggagccgaggaggcggaggctgtggtcgtggcggaggaagaaggccagggaggccagtgcgtggccggacagcgcggcgagcgcgagcgccgtgctcgcggcgaggcagaggtgggtgagctgcgcgtggagcgctgcgagtgcggagagcagggtggtggcgtgcacggagacgagcgcccagccgaagggcgtcggccgcgggcggaggaggaagaccgggccgagcgcggcggcggcgaggacgaggagggagaggttgaggagccagaccagtaggttgggaagagaggagcatctccgtaggctcgagttctcggtggcggacgccattgctttactgggtgcttgtgttctcagtgcgacagtgatcgtgtgagtctgatctgttgctgaatgctgagttcagaggagcggggaagtgcgtggcgcgtggggtaaggtttatacagagtgggaagactgaccgttgagcagagcaacggctaagtcggcgccgggagtgtggagcctatgattactgtctcctagtcctagttcaccgtgctcgag

SEQ ID NO: 6596 - DNA, 3489 bp, Zea Mays
gggggctggggagagcgcgcgcaagtggagggagatggcggccaggaaggaggaactcctggtgcggagccggggccgagtcgcgttcgcgtggacgctcgtcgcgctctgctgcggctcgcacgcgtcccacatcctgcactcgctcggtatccatgtcggccacggaacgtttttggatctgttgcataatccttatgtgaaatgtggcattgctacaactgctttgtttgggcctggaagagatatactctttgatggttttagagcattcaagcaaggttccccgaacatgaactctctagtcatgcttcttggatttgtacttcttggacgatctcttgaagaaagtgcaaggcttaaggcatccagcgatatgaatgagctcatttcactgttatcacctcagtcgaggttaattgttacttcctcaagtgacaacccttctgcggacagtagtttgaattctgatgcgatcacagtcgaggttcctgttgatgatgtccgtgttggagactcaatattggtcctgccgggagagactatacctgtagatggtaatgtcattgaaggatcaagttttgttgacgaatcaatgcttactggagagtccttgcctgtagccaaggagactgggcttcctgtattttcaggaactgtgaactgggatggcccgctaaagattagagcaacatgtactggaccatcatcaacaatagctaagatagtccgcatggttgaggatgcccaagcacgtgaagctcctgttcaaaggctcgcagattccatcgcaggaccatttgtgtatactgttatgacgttggctgcaacaaccttttccttctggtattacattggcacacacttatttcctgaggttcttctgaatgatattgctggtccggatggggattcattacttttgagtataaagcttgctgtggatgtattagttgtttcctgtccttgtgcacttggattagctacacctacagctatcttaataggaacttccctaggtgctaaaagagggttactggttagaggaggtgatgttttagagcgtttggctggaatagatactcttgtgcttgataaaacagggacgcttacagaaggaaaaccagtagtgacttctattgcttctctggcatatgaggagacagaggtccttcgtcttgctgctgcagtggagaaaacagcattgcacccaattgcaaatgctataatgaacaaggctgaactactcaagttggatattccgatcacaagtggtcagcttacatcgcctggatttggttgtttggctgaagtagatgggagtttagttgcagtgggcactttggattgggtgcatgatcgttttgaaactaaagcatcgccaactgaactgagagaccttagaaaccggctggagtttatgttgtcaagtgaagcatcatcatcaaaccagtcgaagtcaattgcttatgttggccgtgagggagaaggaattataggtgctattgctatatcagatattttacgagaagatgcaaacttaactgtggagaggttgcagcaggaaagcattacaacgttcctgctgtcaggggataggggagaagcagtgacaagcattgggaggaccattggaatcaggaatgaaaacataaagtcttccctgactccgcaagacaaagcaagcattatatcaactttgcaagcgaagggacacagagttgcaatggttggtgatggaataaacgatgccccgtctttagcagccgcagatgttggaatagccatgcgaactcattcaaaagagaacgctgcctctgatgcagcttcagttgttctactaggcaacagactttctcaggtggtagatgcgctatccctgtcgaaggcaacgatggcaaaagttcaccaaaatttggcctgggcagtggcatataacatagtagccattccaattgccgctggagtgctgctgccacaatatgatttcgccatgacaccatctctctcaggggggttgatggcccttagctcaatctttgttgtcagcaattctttgcttctgcagctgcatgggtcgtttcagaacacagaaaaacggcagggtgatctgagctcaagattaaactgaattgttgggtttagtttgacccagccgaaggacagtggtattgaattatagagggttctgatactggttttccagctccggctaattgaactgagtcagaactataagtagcaagctattcgtgtcagtagtagcatgttcctgtactgtttgtcaacccaactatagtagcaagtatgacccagaaggacaataatctaccacggccttcaaaaacattgtaaattagtaatggtactgctgtaagcctgtaaacaaagttaaggcgtatgactatcgttcatggtctagcaatgtgcaacaagctataagcttcatttcacacaggtatgggaagttcagtcaacagaactagtcgaatagcaagcagtacacatagcaactatggccacactataatggcaatcatacccctgaacaatagcatagctaggagattactggcgattcttctacttctacttctacttccatgtgttggttgttctaggcttctagcactcttcgtatccatcgttgttggcccagtgcaccttcttgccgctgctgctccgcatcaccttctcgtcgacggccttcaccccggcctccgcagctgccgccgactcggcctgcacacgcgccatcttcctccctcgctttctcgccgcggccgccttctccgtctcggcctcctggtactccctcgcccaacgccggctcagcacgcatgttgcagctagcgcgacggcctgcgccatgaacatggccagcagcagtagctcctcgaggaacgccagcacgaactgctcccggcgatccctggcggagccgaggaggcggaggctgtggtcgtggcggaggaagaaggccagggaggccagtgcgtggccggacagcgcggcgagcgcgagcgccgtgctcgcggcgaggcagaggtgggtgagctgcgcgtggagcgctgcgagtgcggagagcagggtggtggcgtgcacggagacgagcgcccagccgaagggcgtcggccgcgggcggaggaggaagaccgggccgagcgcggcggcggcgaggacgaggagggagaggttgaggagccagaccagtaggttgggaagagaggagcatctccgtaggctcgagttctcggtggcggacgccattgctttactgggtgcttgtgttctcagtgcgacagtgatcgtgtgagtctgatctgttgctgaatgctgagttcagaggagcggggaagtgcgtggcgcgtggggtaaggtttatacagagtgggaagactgaccgttgagcagagcaacggctaagtcggcgccgggagtgtggagcctatgattactgtctcctagtcctagttcaccgtgctcgag

SEQ ID NO: 6597 - DNA, 3814 bp, Zea Mays
gggggctggggagagcgcgcgcaagtggagggagatggcggccaggaaggaggaactcctggtgcggagccggggccgagtcgcgttcgcgtggacgctcgtcgcgctctgctgcggctcgcacgcgtcccacatcctgcactcgctcggtatccatgtcggccacggaacgtttttggatctgttgcataatccttatgtgaaatgtggcattgctacaactgctttgtttgggcctggaagagatatactctttgatggttttagagcattcaagcaaggttccccgaacatgaactctctagtaggatttggatctgcagctgcatttactatcagtgctgtgtccttgctgaaccctgactgggagtggaattcaaccttttttgatgaaccggtcatgcttcttggatttgtacttcttggacgatctcttgaagaaagtgcaaggcttaaggcatccagcgatatgaatgagctcatttcactgttatcacctcagtcgaggttaattgttacttcctcaagtgacaacccttctgcggacagtagtttgaattctgatgcgatcacagtcgaggttcctgttgatgatgtccgtgttggagactcaatattggtcctgccgggagagactatacctgtagatggtaatgtcattgaaggatcaagttttgttgacgaatcaatgcttactggagagtccttgcctgtagccaaggagactgggcttcctgtattttcaggaactgtgaactgggatggcccgctaaagattagagcaacatgtactggaccatcatcaacaatagctaagatagtccgcatggttgaggatgcccaagcacgtgaagctcctgttcaaaggctcgcagattccatcgcaggaccatttgtgtatactgttatgacgttggctgcaacaaccttttccttctggtattacattggcacacacttatttcctgaggttcttctgaatgatattgctggtccggatggggattcattacttttgagtataaagcttgctgtggatgtattagtaagtgaccctgctatagttttttctttaacagaagaaaaaactcagcatttcaatctaggttttggaattttttcaaattgactggtttcacagttgatcaattaacatgtacccttaatatggtgtggtaattgcacatgcaaaacctgaaatctcattcaaaagctctttcgcaaaaccacgtttgaagcgtttattttgactaattctgtgaactttactcctgcaggttgtttcctgtccttgtgcacttggattagctacacctacagctatcttaataggaacttccctaggtgctaaaagagggttactggttagaggaggtgatgttttagagcgtttggctggaatagatactcttgtgcttgataaaacagggacgcttacagaaggaaaaccagtagtgacttctattgcttctctggcatatgaggagacagaggtccttcgtcttgctgctgcagtggagaaaacagcattgcacccaattgcaaatgctataatgaacaaggctgaactactcaagttggatattccgatcacaagtggtcagcttacatcgcctggatttggttgtttggctgaagtagatgggagtttagttgcagtgggcactttggattgggtgcatgatcgttttgaaactaaagcatcgccaactgaactgagagaccttagaaaccggctggagtttatgttgtcaagtgaagcatcatcatcaaaccagtcgaagtcaattgcttatgttggccgtgagggagaaggaattataggtgctattgctatatcagatattttacgagaagatgcaaacttaactgtggagaggttgcagcaggaaagcattacaacgttcctgctgtcaggggataggggagaagcagtgacaagcattgggaggaccattggaatcaggaatgaaaacataaagtcttccctgactccgcaagacaaagcaagcattatatcaactttgcaagcgaagggacacagagttgcaatggttggtgatggaataaacgatgccccgtctttagcagccgcagatgttggaatagccatgcgaactcattcaaaagagaacgctgcctctgatgcagcttcagttgttctactaggcaacagactttctcaggtggtagatgcgctatccctgtcgaaggcaacgatggcaaaagttcaccaaaatttggcctgggcagtggcatataacatagtagccattccaattgccgctggagtgctgctgccacaatatgatttcgccatgacaccatctctctcaggggggttgatggcccttagctcaatctttgttgtcagcaattctttgcttctgcagctgcatgggtcgtttcagaacacagaaaaacggcagggtgatctgagctcaagattaaactgaattgttgggtttagtttgacccagccgaaggacagtggtattgaattatagagggttctgatactggttttccagctccggctaattgaactgagtcagaactataagtagcaagctattcgtgtcagtagtagcatgttcctgtactgtttgtcaacccaactatagtagcaagtatgacccagaaggacaataatctaccacggccttcaaaaacattgtaaattagtaatggtactgctgtaagcctgtaaacaaagttaaggcgtatgactatcgttcatggtctagcaatgtgcaacaagctataagcttcatttcacacaggtatgggaagttcagtcaacagaactagtcgaatagcaagcagtacacatagcaactatggccacactataatggcaatcatacccctgaacaatagcatagctaggagattactggcgattcttctacttctacttctacttccatgtgttggttgttctaggcttctagcactcttcgtatccatcgttgttggcccagtgcaccttcttgccgctgctgctccgcatcaccttctcgtcgacggccttcaccccggcctccgcagctgccgccgactcggcctgcacacgcgccatcttcctccctcgctttctcgccgcggccgccttctccgtctcggcctcctggtactccctcgcccaacgccggctcagcacgcatgttgcagctagcgcgacggcctgcgccatgaacatggccagcagcagtagctcctcgaggaacgccagcacgaactgctcccggcgatccctggcggagccgaggaggcggaggctgtggtcgtggcggaggaagaaggccagggaggccagtgcgtggccggacagcgcggcgagcgcgagcgccgtgctcgcggcgaggcagaggtgggtgagctgcgcgtggagcgctgcgagtgcggagagcagggtggtggcgtgcacggagacgagcgcccagccgaagggcgtcggccgcgggcggaggaggaagaccgggccgagcgcggcggcggcgaggacgaggagggagaggttgaggagccagaccagtaggttgggaagagaggagcatctccgtaggctcgagttctcggtggcggacgccattgctttactgggtgcttgtgttctcagtgcgacagtgatcgtgtgagtctgatctgttgctgaatgctgagttcagaggagcggggaagtgcgtggcgcgtggggtaaggtttatacagagtgggaagactgaccgttgagcagagcaacggctaagtcggcgccgggagtgtggagcctatgattactgtctcctagtcctagttcaccgtgctcgag

SEQ ID NO: 6598 - DNA, 475 bp, Zea Mays
gtgcgggttccccgccacggcgcgccgagggggagcggccgcgggggctggggagagcgcgcgcaagtggagggagatggcggccaggaaggaggaactcctggtgcggagccggggccgagtcgcgttcgcgtggacgctcgtcgcgctctgctgcggctcgcacgcgtcccacatcctgcactcgctcggtatccatgtcggccacggaacgtttttggatctgttgcataatccttatgtgaaatgtggcattgctacaactgctttgtttgggcctggaagagatatactctttgatggttttagagcattcaagcaaggttccccgaacatgaactctctagtaggatttggatctgcagctgcatttactatcagtgctgtgtccttgctgaaccctgactgggagtggaattcaaccttttttgatgaaccgtgtcaattcccagaacatgggaacttgatctttttt

SEQ ID NO: 6599 - DNA, 1709 bp, Zea Mays
gtgcctttccttctcgctttcactggtaccaggtggcgaccatacagcacggaactccagttcaccgctgcctttcttctactgttcaccccgcgtgcgctcgctcactcgctctctcccctctggctctgagtggcgctagtgggcgaccgccgccgcgtccctccgtcaggtgcccaggtgtagcctcgtcagcccctccgtcaggtcttcgtcggccccctcgccgacgagcacccaccaggcatgagagcgcgcttctagaataatgtctgtgcttacctgcgtgattgaaagcatgggctcatcctgtagcagatcccattctttcgacgaggctgaagcagctgaaaatgcaaagtctgcagacattgaccggaggattttgcaagaaacaaaagccgaacaacacatccacaagctcttacttctcggtgctggagaatcggggaagtctacaatatttaaacaaatattatatgagggagctaaagagttagcccaagtggaaccagattcttcaaaatatgtcttatctccagataatcaggagattggagaaaaactatcagaaattggtgccagattggaatacccatcgttgaacaaagaacgtgtacaggatgtaagaaaactatggcaagatccagccattcaggaaacttattcacgtgggagtattctgcaagtcccagactgtgcacagtacttcatggaaaatttggacaaattatctgaagaagattatgtaccgacaaaggaggatgtgcttcatgcaagagtacggacaaatggtgtggtagaaactcagtttagccctctaggagagagcaaaagaggcggagaggtctataggctgtacgatgtaggaggccagagaaacgagagaaggaaatggatccatcttttcgaaggtgttaatgctgtaatattctgtgctgccattagcgagtatgatcagatgttatttgaggatgagacaaagaacagaatgatggagactaaagaactctttgattgggtgctaaagcaaagatgttttgagaaaacctcattcatgttatttcttaacaaatttgacatatttgagagaaaaatacaaaaggtccctttaagcgtgtgcgagtggtttaaagattaccagcccactgcacctggcaaacaggaggtggaacacgcctacgagtttgtaaaaaagaagtttgaggagctctacttccaaagcagcaagcctgaccgtgtcgaccgagtgttcaagatctacagaacaacagccctggatcagaaacttgtaaagaagacattcaagctgatcgacgagagcatgaggcgttccagagaaggaacttgatcgaggatgtggtgttataagccacaagacaagtaactaggatggtgtgaggagcagaaagtttacagtgtcgcggctttggccgattgtgattctttttacatgaggaacatttgttgatctttttgccccaccacaagccagtaaaagtatctgttttgcgctggtcttggggaggtttgggtcgtctccatttccccccaatgttaggacaaaatgtacttaccatcttttggagctctgcctgtttggcctcacaatatcaagttcattcgttgttgtctatgcagcatgcctattcacgaattgtctgaatttgttaaccaacaacagatgaaagttcgattggtactctctc

SEQ ID NO: 6600 - DNA, 1668 bp, Zea Mays
gtgcctttccttctcgctttcactggtaccaggtggcgaccatacagcacggaactccagttcaccgctgcctttcttctactgttcaccccgcgtgcgctcgctcactcgctctctcccctctggctctgagtggcgctagtgggcgaccgccgccgcgtccctccgtcaggtgcccaggtgtagcctcgtcagcccctccgtcaggtcttcgtcggccccctcgccgacgagcacccaccagcagatcccattctttcgacgaggctgaagcagctgaaaatgcaaagtctgcagacattgaccggaggattttgcaagaaacaaaagccgaacaacacatccacaagctcttacttctcggtgctggagaatcggggaagtctacaatatttaaacaaataaagcttcttttccaaactggctttgacgaggcagagcttaggagctacacatcagtcatccatgctaatgtgtatcagacaattaaaatattatatgagggagctaaagagttagcccaagtggaaccagattcttcaaaatatgtcttatctccagataatcaggagattggagaaaaactatcagaaattggtgccagattggaatacccatcgttgaacaaagaacgtgtacaggatgtaagaaaactatggcaagatccagccattcaggaaacttattcacgtgggagtattctgcaagtcccagactgtgcacagtacttcatggaaaatttggacaaattatctgaagaagattatgtaccgacaaaggaggatgtgcttcatgcaagagtacggacaaatggtgtggtagaaactcagtttagccctctaggagagagcaaaagaggcggagaggtctataggctgtacgatgtaggaggccagagaaacgagagaaggaaatggatccatcttttcgaaggtgttaatgctgtaatattctgtgctgccattagcgagtatgatcagatgttatttgaggatgagacaaagaacagaatgatggagactaaagaactctttgattgggtgctaaagcaaagatgttttgaggtccctttaagcgtgtgcgagtggtttaaagattaccagcccactgcacctggcaaacaggaggtggaacacgcctacgagtttgtaaaaaagaagtttgaggagctctacttccaaagcagcaagcctgaccgtgtcgaccgagtgttcaagatctacagaacaacagccctggatcagaaacttgtaaagaagacattcaagctgatcgacgagagcatgaggcgttccagagaaggaacttgatcgaggatgtggtgttataagccacaagacaagtaactaggatggtgtgaggagcagaaagtttacagtgtcgcggctttggccgattgtgattctttttacatgaggaacatttgttgatctttttgccccaccacaagccagtaaaagtatctgttttgcgctggtcttggggaggtttgggtcgtctccatttccccccaatgttaggacaaaatgtacttaccatcttttggagctctgcctgtttggcctcacaatatcaagttcattcgttgttgtctatgcagcatgcctattcacgaattgtctgaatttgttaaccaacaacagatgaaagttcgattggtactctctc

SEQ ID NO: 6601 - DNA, 1825 bp, Zea Mays
cgagaacgtgcctttccttctcgctttcactggtaccaggtggcgaccatacagcacggaactccagttcaccgctgcctttcttctactgttcaccccgcgtgcgctcgctcactcgctctctcccctctggctctgagtggcgctagtgggcgaccgccgccgcgtccctccgtcaggtgcccaggtgtagcctcgtcagcccctccgtcaggtcttcgtcggccccctcgccgacgagcacccaccaggcatgagagcgcgcttctagaataatgtctgtgcttacctgcgtgattgaaagcatgggctcatcctgtagcagatcccattctttcgacgaggctgaagcagctgaaaatgcaaagtctgcagacattgaccggaggattttgcaagaaacaaaagccgaacaacacatccacaagctcttacttctcggtgctggagaatcggggaagtctacaatatttaaacaaataaagcttcttttccaaactggctttgacgaggcagagcttaggagctacacatcagtcatccatgctaatgtgtatcagacaattaaagtatgctatactaaaaaggatattatatgagggagctaaagagttagcccaagtggaaccagattcttcaaaatatgtcttatctccagataatcaggagattggagaaaaactatcagaaattggtgccagattggaatacccatcgttgaacaaagaacgtgtacaggatgtaagaaaactatggcaagatccagccattcaggaaacttattcacgtgggagtattctgcaagtcccagactgtgcacagtacttcatggaaaatttggacaaattatctgaagaagattatgtaccgacaaaggaggatgtgcttcatgcaagagtacggacaaatggtgtggtagaaactcagtttagccctctaggagagagcaaaagaggcggagaggtctataggctgtacgatgtaggaggccagagaaacgagagaaggaaatggatccatcttttcgaaggtgttaatgctgtaatattctgtgctgccattagcgagtatgatcagatgttatttgaggatgagacaaagaacagaatgatggagactaaagaactctttgattgggtgctaaagcaaagatgttttgagaaaacctcattcatgttatttcttaacaaatttgacatatttgagagaaaaatacaaaaggtccctttaagcgtgtgcgagtggtttaaagattaccagcccactgcacctggcaaacaggaggtggaacacgcctacgagtttgtaaaaaagaagtttgaggagctctacttccaaagcagcaagcctgaccgtgtcgaccgagtgttcaagatctacagaacaacagccctggatcagaaacttgtaaagaagacattcaagctgatcgacgagagcatgaggcgttccagagaaggaacttgatcgaggatgtggtgttataagccacaagacaagtaactaggatggtgtgaggagcagaaagtttacagtgtcgcggctttggccgattgtgattctttttacatgaggaacatttgttgatctttttgccccaccacaagccagtaaaagtatctgttttgcgctggtcttggggaggtttgggtcgtctccatttccccccaatgttaggacaaaatgtacttaccatcttttggagctctgcctgtttggcctcacaatatcaagttcattcgttgttgtctatgcagcatgcctattcacgaattgtctgaatttgttaaccaacaacagatgaaagttcgattggtactctctc

SEQ ID NO: 6602 - DNA, 1812 bp, Zea Mays
cacccagaaaaaaaaacacctcctcgttccattctcgtccgtttctcgaccaaacacgctctctctcggcagcgatgcgagaacgtgcctttccttctcgctttcactggtaccaggtggcgaccatacagcacggaactccagttcaccgctgcctttcttctactgttcaccccgcgtgcgctcgctcactcgctctctcccctctggctctgagtggcgctagtgggcgaccgccgccgcgtccctccgtcaggtgcccaggtgtagcctcgtcagcccctccgtcaggtcttcgtcggccccctcgccgacgagcacccaccagcagatcccattctttcgacgaggctgaagcagctgaaaatgcaaagtctgcagacattgaccggaggattttgcaagaaacaaaagccgaacaacacatccacaagctcttacttctcggtgctggagaatcggggaagtctacaatatttaaacaaataaagcttcttttccaaactggctttgacgaggcagagcttaggagctacacatcagtcatccatgctaatgtgtatcagacaattaaaatattatatgagggagctaaagagttagcccaagtggaaccagattcttcaaaatatgtcttatctccagataatcaggagattggagaaaaactatcagaaattggtgccagattggaatacccatcgttgaacaaagaacgtgtacaggatgtaagaaaactatggcaagatccagccattcaggaaacttattcacgtgggagtattctgcaagtcccagactgtgcacagtacttcatggaaaatttggacaaattatctgaagaagattatgtaccgacaaaggaggatgtgcttcatgcaagagtacggacaaatggtgtggtagaaactcagtttagccctctaggagagagcaaaagaggcggagaggtctataggctgtacgatgtaggaggccagagaaacgagagaaggaaatggatccatcttttcgaaggtgttaatgctgtaatattctgtgctgccattagcgagtatgatcagatgttatttgaggatgagacaaagaacagaatgatggagactaaagaactctttgattgggtgctaaagcaaagatgttttgagaaaacctcattcatgttatttcttaacaaatttgacatatttgagagaaaaatacaaaaggtccctttaagcgtgtgcgagtggtttaaagattaccagcccactgcacctggcaaacaggaggtggaacacgcctacgagtttgtaaaaaagaagtttgaggagctctacttccaaagcagcaagcctgaccgtgtcgaccgagtgttcaagatctacagaacaacagccctggatcagaaacttgtaaagaagacattcaagctgatcgacgagagcatgaggcgttccagagaaggaacttgatcgaggatgtggtgttataagccacaagacaagtaactaggatggtgtgaggagcagaaagtttacagtgtcgcggctttggccgattgtgattctttttacatgaggaacatttgttgatctttttgccccaccacaagccagtaaaagtatctgttttgcgctggtcttggggaggtttgggtcgtctccatttccccccaatgttaggacaaaatgtacttaccatcttttggagctctgcctgtttggcctcacaatatcaagttcattcgttgttgtctatgcagcatgcctattcacgaattgtctgaatttgttaaccaacaacagatgaaagttcgattggtactctctc

SEQ ID NO: 6603 - DNA, 2076 bp, Zea Mays
gccattatgtcctatgtttggcaagcagaatatatgtgtttcattttttttgtctggttaaagagtaaaatattctttgtttggttagagatgcatatgattagggagggaacgagggggagagtcctcccgtccaaaagagcgctcctatccgattattttggtggaaaaaacattctaattatttatgatacatttttacctatagactttatgagccgttttatttctgttccattaaaaactaaacacccagaaaaaaaaacacctcctcgttccattctcgtccgtttctcgaccaaacacgctctctctcggcagcgatgcgagaacgtgcctttccttctcgctttcactggtaccaggtggcgaccatacagcacggaactccagttcaccgctgcctttcttctactgttcaccccgcgtgcgctcgctcactcgctctctcccctctggctctgagtggcgctagtgggcgaccgccgccgcgtccctccgtcaggtgcccaggtgtagcctcgtcagcccctccgtcaggtcttcgtcggccccctcgccgacgagcacccaccagccaggcatgagagcgcgcttctagaataatgtctgtgcttacctgcgtgattgaaagcatgggctcatcctgtagcagatcccattctttcgacgaggctgaagcagctgaaaatgcaaagtctgcagacattgaccggaggattttgcaagaaacaaaagccgaacaacacatccacaagctcttacttctcggtgctggagaatcggggaagtctacaatatttaaacaaataaagcttcttttccaaactggctttgacgaggcagagcttaggagctacacatcagtcatccatgctaatgtgtatcagacaattaaaatattatatgagggagctaaagagttagcccaagtggaaccagattcttcaaaatatgtcttatctccagataatcaggagattggagaaaaactatcagaaattggtgccagattggaatacccatcgttgaacaaagaacgtgtacaggatgtaagaaaactatggcaagatccagccattcaggaaacttattcacgtgggagtattctgcaagtcccagactgtgcacagtacttcatggaaaatttggacaaattatctgaagaagattatgtaccgacaaaggaggatgtgcttcatgcaagagtacggacaaatggtgtggtagaaactcagtttagccctctaggagagagcaaaagaggcggagaggtctataggctgtacgatgtaggaggccagagaaacgagagaaggaaatggatccatcttttcgaaggtgttaatgctgtaatattctgtgctgccattagcgagtatgatcagatgttatttgaggatgagacaaagaacagaatgatggagactaaagaactctttgattgggtgctaaagcaaagatgttttgaggtccctttaagcgtgtgcgagtggtttaaagattaccagcccactgcacctggcaaacaggaggtggaacacgcctacgagtttgtaaaaaagaagtttgaggagctctacttccaaagcagcaagcctgaccgtgtcgaccgagtgttcaagatctacagaacaacagccctggatcagaaacttgtaaagaagacattcaagctgatcgacgagagcatgaggcgttccagagaaggaacttgatcgaggatgtggtgttataagccacaagacaagtaactaggatggtgtgaggagcagaaagtttacagtgtcgcggctttggccgattgtgattctttttacatgaggaacatttgttgatctttttgccccaccacaagccagtaaaagtatctgttttgcgctggtcttggggaggtttgggtcgtctccatttccccccaatgttaggacaaaatgtacttaccatcttttggagctctgcctgtttggcctcacaatatcaagttcattcgttgttgtctatgcagcatgcctattcacgaattgtctgaatttgttaaccaacaacagatgaaagttcgattggtactctctc

SEQ ID NO: 6604 - DNA, 1107 bp, Zea Mays
atattaaagagattggagaaaaactatcagaaattggtgccagattggaatacccatcgttgaacaaagaacgtgtacaggatgtaagaaaactatggcaagatccagccattcaggaaacttattcacgtgggagtattctgcaagtcccagactgtgcacagtacttcatggaaaatttggacaaattatctgaagaagattatgtaccgacaaaggaggatgtgcttcatgcaagagtacggacaaatggtgtggtagaaactcagtttagccctctaggagagagcaaaagaggcggagaggtctataggctgtacgatgtaggaggccagagaaacgagagaaggaaatggatccatcttttcgaaggtgttaatgctgtaatattctgtgctgccattagcgagtatgatcagatgttatttgaggatgagacaaagaacagaatgatggagactaaagaactctttgattgggtgctaaagcaaagatgttttgaggtccctttaagcgtgtgcgagtggtttaaagattaccagcccactgcacctggcaaacaggaggtggaacacgcctacgagtttgtaaaaaagaagtttgaggagctctacttccaaagcagcaagcctgaccgtgtcgaccgagtgttcaagatctacagaacaacagccctggatcagaaacttgtaaagaagacattcaagctgatcgacgagagcatgaggcgttccagagaaggaacttgatcgaggatgtggtgttataagccacaagacaagtaactaggatggtgtgaggagcagaaagtttacagtgtcgcggctttggccgattgtgattctttttacatgaggaacatttgttgatctttttgccccaccacaagccagtaaaagtatctgttttgcgctggtcttggggaggtttgggtcgtctccatttccccccaatgttaggacaaaatgtacttaccatcttttggagctctgcctgtttggcctcacaatatcaagttcattcgttgttgtctatgcagcatgcctattcacgaattgtctgaatttgttaaccaacaacagatgaaagttcgattggtactctctc

SEQ ID NO: 6605 - DNA, 965 bp, Zea Mays
ttccgagcacgtaaccgcaacaaggagtagttctaggatgcggcacgcaacgtggcccagtgagcgtgtggaacgtgccacccatcacccatgtcgcatggcagtggatggatagctagacccgaaaatcgtcctgacgggaggcttgcctgtccccggcctgagggctcagggctttgaaaagggaaagggcagagttgctgcacgaactgctcaagaccggagctggcttcgaccccctcccggttcttacccaggaaacactgatcatctggggcgacaaagaccaggtgttccccgtcgacctcggccacaggctgcacaggcttctgggcgagaggtccaggctagagatcgtcagggacgcagggcacgcgctgcagctggagggcgccgaccacgtcaaccgctccatcaagtcgttcctcctggacgagcgggtcggcccgggagccggcgcgggccgcaagtaggacgaggccttctcccgtccaggcccacaaccaaacggaggcctgctcgcaggtgcctgcgtacttgcgttgcagagctgcaacagtgcgaacgccagctgtagttaagcagcggagcggcaatgacctgcacgcacgcagacgcccccaccgccccgcaatcatgcagcgctggggctactggttacaaaagtacagagaagcgtcgctccggactagtttgttttgtacaataatgtctgaaagaacgagcttgtgcggccgaaattcggagagctgtctttatctggtgcgcacagtctgtctctttgtttcttcatgctcagcctcatgagataacgatatatttatgacagctccaacaataatttgtaagctaaattcaagcattttattttatatttcaataaagaaagggagaaaagctacctcctgatcaaaaactggttttgtgcacgtattttaggttcacatgaggttgtcatgttggtc

SEQ ID NO: 6606 - DNA, 1612 bp, Zea Mays
aattacgagaagggcagggcaggtcgggatggtctctctctctcacccccaccgatctgggaaggcattgtcttgttgtactttcccttccggcagtggcctcgattcgcatctccttttcccgtccatgcgcgcgccggcgggcggtgccagtgccaccgcgctcgcggcggccatgaacattaagcagccgctgcacggcgcatcgacgctgttcgcgctgctctccctctcgctgctcctcctccgcctgctcctccggctccgcctggccgccttccgcgacgcggcgctgtcgctccacctgctggcgcgcctccgcctccgccccgtcctcctctgcctcccgtcagcctgccacgacggcggcgccggcgccggcgccaccacgctgcgcgtctggtgccccgccgccccatcctccaagccgccgctgctcctcctccacggcttcggcggggacgccaagtggacgtgggcgcgcaacctcccgcgcctgtcccgccacttccacgtgtacgtgccggacctcgtgttcttcggcgcgcagtcccggtccgcgtcgccgctgcgctccgtggcgttccaggcccgctgcgccgccgaggccatgcgcctcctcggcgtgccccgctacgacgtcgcggggatcagctacggcggcttcgtcgcctaccggatggccgccgccgaggccagggacgccgtgggcaggctcgtcatcatgaccaccggcgtcgcggccacgcccggggagatgcgggcgatggcggcgcgcgaggaccgcaccgtcgaggatgcgctgctgccggacaccgccgaggggctgcgcttcctcgtaagacgctccatgcatcgccccccgccttggatgccggacttcgtgcttgacgacttcatccaggaaacactgatcatctggggcgacaaagaccaggtgttccccgtcgacctcggccacaggctgcacaggcttctgggcgagaggtccaggctagagatcgtcagggacgcagggcacgcgctgcagctggagggcgccgaccacgtcaaccgctccatcaagtcgttcctcctggacgagcgggtcggcccgggagccggcgcgggccgcaagtaggacgaggccttctcccgtccaggcccacaaccaaacggaggcctgctcgcaggtgcctgcgtacttgcgttgcagagctgcaacagtgcgaacgccagctgtagttaagcagcggagcggcaatgacctgcacgcacgcagacgcccccaccgccccgcaatcatgcagcgctggggctactggttacaaaagtacagagaagcgtcgctccggactagtttgttttgtacaataatgtctgaaagaacgagcttgtgcggccgaaattcggagagctgtctttatctggtgcgcacagtctgtctctttgtttcttcatgctcagcctcatgagataacgatatatttatgacagctccaacaataatttgtaagctaaattcaagcattttattttatatttcaataaagaaagggagaaaagctacctcctgatcaaaaactggttttgtgcacgtattttaggttcacatgaggttgtcatgttggtc

SEQ ID NO: 6607 - DNA, 1686 bp, Zea Mays
gtcgtgccaggcagcgtgttacggttaagattagcaatagtacatgcatccttttgcccggcaaaacggcgtagcatagtggcttcgataattacgagaagggcagggcaggtcgggatggtctctctctctcacccccaccgatctgggaaggcattgtcttgttgtactttcccttccggcagtggcctcgattcgcatctccttttcccgtccatgcgcgcgccggcgggcggtgccagtgccaccgcgctcgcggcggccatgaacattaagcagccgctgcacggcgcatcgacgctgttcgcgctgctctccctctcgctgctcctcctccgcctgctcctccggctccgcctggccgccttccgcgacgcggcgctgtcgctccacctgctggcgcgcctccgcctccgccccgtcctcctctgcctcccgtcagcctgccacgacggcggcgccggcgccggcgccaccacgctgcgcgtctggtgccccgccgccccatcctccaagccgccgctgctcctcctccacggcttcggcggggacgccaagtggacgtgggcgcgcaacctcccgcgcctgtcccgccacttccacgtgtacgtgccggacctcgtgttcttcggcgcgcagtcccggtccgcgtcgccgctgcgctccgtggcgttccaggcccgctgcgccgccgaggccagggacgccgtgggcaggctcgtcatcatgaccaccggcgtcgcggccacgcccggggagatgcgggcgatggcggcgcgcgaggaccgcaccgtcgaggatgcgctgctgccggacaccgccgaggggctgcgcttcctcgtaagacgctccatgcatcgccccccgccttggatgccggacttcgtgcttgacgacttcatccagctcatgtacgtggaccagaaaagggaaagggcagagttgctgcacgaactgctcaagaccggagctggcttcgaccccctcccggttcttacccaggaaacactgatcatctggggcgacaaagaccaggtgttccccgtcgacctcggccacaggctgcacaggcttctgggcgagaggtccaggctagagatcgtcagggacgcagggcacgcgctgcagctggagggcgccgaccacgtcaaccgctccatcaagtcgttcctcctggacgagcgggtcggcccgggagccggcgcgggccgcaagtaggacgaggccttctcccgtccaggcccacaaccaaacggaggcctgctcgcaggtgcctgcgtacttgcgttgcagagctgcaacagtgcgaacgccagctgtagttaagcagcggagcggcaatgacctgcacgcacgcagacgcccccaccgccccgcaatcatgcagcgctggggctactggttacaaaagtacagagaagcgtcgctccggactagtttgttttgtacaataatgtctgaaagaacgagcttgtgcggccgaaattcggagatctgtctctttgtttcttcatgctcagcctcatgagataacgatatatttatgacagctccaacaataatttgtaagctaaattcaagcattttattttatatttcaataaagaaagggagaaaagctacctcctgatcaaaaactggttttgtgcacgtattttaggttcacatgaggttgtcatgttggtc

SEQ ID NO: 6608 - DNA, 2156 bp, Zea Mays
caaagaaacagataaaaaaaagaacagagatgctgaaaactgaaaaggaaagaagaaactgttttcccctgctatcaatcctagatccatcccgagccaccttaaggccttgttcgtttgtatcggattgcacccggaatcgttccacctaatcaaagtttatataaattagagaatcaatccggttagaaatcgttccgacccaccaatccagcgcaaacgaacaaggcctaaaagaggataccgatttttgtgcaatgtgtgagaagagacatacggagtcacttttacatacaatacaaactggagctgcgatttgtgccttcttctctttgaaggctagctttgatttgtttggaggagcatgcgggagaggagtcgtgccaggcagcgtgttacggttaagattagcaatagtacatgcatccttttgcccggcaaaacggcgtagcatagtggcttcgataattacgagaagggcagggcaggtcgggatggtctctctctctcacccccaccgatctgggaaggcattgtcttgttgtactttcccttccggcagtggcctcgattcgcatctccttttcccgtccatgcgcgcgccggcgggcggtgccagtgccaccgcgctcgcggcggccatgaacattaagcagccgctgcacggcgcatcgacgctgttcgcgctgctctccctctcgctgctcctcctccgcctgctcctccggctccgcctggccgccttccgcgacgcggcgctgtcgctccacctgctggcgcgcctccgcctccgccccgtcctcctctgcctcccgtcagcctgccacgacggcggcgccggcgccggcgccaccacgctgcgcgtctggtgccccgccgccccatcctccaagccgccgctgctcctcctccacggcttcggcggggacgccaagtggacgtgggcgcgcaacctcccgcgcctgtcccgccacttccacgtgtacgtgccggacctcgtgttcttcggcgcgcagtcccggtccgcgtcgccgctgcgctccgtggcgttccaggcccgctgcgccgccgaggccatgcgcctcctcggcgtgccccgctacgacgtcgcggggatcagctacggcggcttcgtcgcctaccggatggccgccgccgaggccagggacgccgtgggcaggctcgtcatcatgaccaccggcgtcgcggccacgcccggggagatgcgggcgatggcggcgcgcgaggaccgcaccgtcgaggatgcgctgctgccggacaccgccgaggggctgcgcttcctcgtaagacgctccatgcatcgccccccgccttggatgccggacttcgtgcttgacgacttcatccagaaaagggaaagggcagagttgctgcacgaactgctcaagaccggagctggcttcgaccccctcccggttcttacccaggaaacactgatcatctggggcgacaaagaccaggtgttccccgtcgacctcggccacaggctgcacaggcttctgggcgagaggtccaggctagagatcgtcagggacgcagggcacgcgctgcagctggagggcgccgaccacgtcaaccgctccatcaagtcgttcctcctggacgagcgggtcggcccgggagccggcgcgggccgcaagtaggacgaggccttctcccgtccaggcccacaaccaaacggaggcctgctcgcaggtgcctgcgtacttgcgttgcagagctgcaacagtgcgaacgccagctgtagttaagcagcggagcggcaatgacctgcacgcacgcagacgcccccaccgccccgcaatcatgcagcgctggggctactggttacaaaagtacagagaagcgtcgctccggactagtttgttttgtacaataatgtctgaaagaacgagcttgtgcggccgaaattcggagagctgtctttatctggtgcgcacagtctgtctctttgtttcttcatgctcagcctcatgagataacgatatatttatgacagctccaacaataatttgtaagctaaattcaagcattttattttatatttcaataaagaaagggagaaaagctacctcctgatcaaaaactggttttgtgcacgtattttaggttcacatgaggttgtcatgttggtc

SEQ ID NO: 6609 - DNA, 1359 bp, Zea Mays
ctcagggtgtctgtgtgcgcgcgcctgcgacaactaggctacgccgccgccgccctgcgtcaggtgtctaggtcttcgctggaccctcctcccgcgacgagcgtctgccaggctgacggcgatagcgatggcggaagtgacggagaggagaaagcgcgccgcagtcgtggtactgggcgacatcggccgcagtccgcggatgcagtaccactccctctcgctcgctaaccaggccagtatggaagtggacattgttgcaaatggaggaagtgaaccttacttgtcacagagagaatccatcaatttacatccacgagatgaaaaagtgcagttaacaggaatttcaaagatatcagaatccaccctctgttccaacattggctgctgtaaaactggcaagctggctgagaggtgctaaatttattgttgattggcataagtttggatatacattgctggggttgtcgcatggcagaagtcacatcattgtcaaaatatatttctggtttgagaagtactttgggcagatggctgatggtgccttttgtgttacaaaagcaatgcaacatgaacttgctcaaaattggggaatcagagcaaaggttctttatgatcaatctcccgattttttccaccctgcttcattgatggagaaacatggggctagggaattccatctgtagtgctatgggcaatgccaaatgcatatcagtggaggaagtatgggaagacatgagcattactgtcttcgccagtaagattgacgatgaagttttcttgaagtctaatagaccggcacttgttgtgagcagcacaagctggacgctagatgaagatttcagcatacttctggaagcagcattgatgtacgagactacgacagacgtgtcgctgcagctttaggtgaagatgattcaacagatgaggagcaactttggattgatatcaagaatgggaagcaatttgtctacccaagattactgtttattgttacaggtaaaggacctgataggaagaaatatgaggttcagataaaaaggttgaagttgagacgtgttgccttgcggacgatgtggcttgcatcagaggactaccctctattgctcggatcagctgatctaggagtgtcgttgcatacatcttcgtcagggctggacctaccaatgaagatgctctttaaggggtttccagaagaatgcaatgccttgaaatccctcaaagaatgtgccatgaagtcaccatcatcttcgaaatggtcacagaatgggaaaccaacgccctaccgttggtgaaccaatccctactgaatttcgaggaagaggaacgatacagcagaaacccacaaccgtttgatgaaac

SEQ ID NO: 6610 - DNA, 343 bp, Zea Mays
gccatctctgtgttgatctttttgtggttatcgtgttgtgcaagaactcttctctagccacttggctttattgtgctaactcttaatcaagttttgtggattaagtttcaagtttttacaggatcacctattcacccccctctaggtgctctcaattacaaagttgccctgatgaagttgacattgatctactagtgcatataaatataacgaaacagtccaaaacacctacaatcccagtgggtcaacacagtgatgttggcaagaacatgacgagcaacataaacgtcactcctcaagtaacaccagaatacacaatcaacataccacatactgaatctcg

SEQ ID NO: 6611 - DNA, 1356 bp, Zea Mays
gcgcgcctgcgacaactaggctacgccgccgccgccctgcgtcaggtgtctaggtcttcgctggaccctcctcccgcgacgagcgtctgccaggctgacggcgatagcgatggcggaagtgacggagaggagaaagcgcgccgcagtcgtggtactgggcgacatcggccgcagtccgcggatgcagtaccactccctctcgctcgctaaccaggccagtatggaagtggacattgttgcaaatggagaaaaagtgcagttaacaggaatttcaaagatatcaggtgcgctggcacttctacttaaagctgctgtccagttcattttgctagtttggttcctttgttttaagatccctcgcccttatgtctttgttgttcagaatccaccctctgttccaacattggctgctgtaaaactggcaagctggctgagaggtgctaaatttattgttgattggcataagtttggatatacattgctggggttgtcgcatggcagaagtcacatcattgtcaaaatatatttctggtttgagaagtactttgggcagatggctgatggtgccttttgtgttacaaaagcaatgcaacatgaacttgctcaaaattggggaatcagagcaaaggttctttatgatcaatctcccgattttttccaccctgcttcattgatggagaaacatggggctagggaattccatctgtagtgctatgggcaatgccaaatgcatatcagtggaggaagtatgggaagacatgagcattactgtcttcgccagtaagattgacgatgaagttttcttgaagtctaatagaccggcacttgttgtgagcagcacaagctggacgctagatgaagatttcagcatacttctggaagcagcattgatgtacgagactacgacagacgtgtcgctgcagctttaggtgaagatgattcaacagatgaggagcaactttggattgatatcaagaatgggaagcaatttgtctacccaagattactgtttattgttacaggtaaaggacctgataggaagaaatatgaggttcagataaaaaggttgaagttgagacgtgttgccttgcggacgatgtggcttgcatcagaggactaccctctattgctcggatcagctgatctaggagtgtcgttgcatacatcttcgtcagggctggacctaccaatgaagatgctctttaaggggtttccagaagaatgcaatgccttgaaatccctcaaagaatgtgccatgaagtcaccatcatcttcgaaatggtcacagaatgggaaaccaacgccctaccgttggtgaaccaaatggagtctggtcaaaacatgggccactgtcgg

SEQ ID NO: 6612 - DNA, 726 bp, Zea Mays
aaaggttctttatgatcaatctcccgattttttccaccctgcttcattgatggagaaacatggggctagggaattccatctgtagtgctatgggcaatgccaaatgcatatcagtggaggaagtatgggaagacatgagcattactgtcttcgccagtaagattgacgatgaagttttcttgaagtctaatagaccggcacttgttgtgagcagcacaagctggacgctagatgaagatttcagcatacttctggaagcagcattgatgtacgagactacgacagacgtgtcgctgcagctttaggtgaagatgattcaacagatgaggagcaactttggattgatatcaagaatgggaagcaatttgtctacccaagattactgtttattgttacaggtaaaggacctgataggaagaaatatgaggttcagataaaaaggttgaagttgagacgtgttgccttgcggacgatgtggcttgcatcagaggactaccctctattgctcggatcagctgatctaggagtgtcgttgcatacatcttcgtcagggctggacctaccaatgaagatgctctttaaggggtttccagaagaatgcaatgccttgaaatccctcaaagaatgtgccatgaagtcaccatcatcttcgaaatggtcacagaatgggaaaccaacgccctaccgttggtgaaccaagagacgagacagtcgatgcattcgagt

SEQ ID NO: 6613 - DNA, 1212 bp, Zea Mays
ctcagggtgtctgtgtgcgcgcgcctgcgacaactaggctacgccgccgccgccctgcgtcaggtgtctaggtcttcgctggaccctcctcccgcgacgagcgtctgccaggctgacggcgatagcgatggcggaagtgacggagaggagaaagcgcgccgcagtcgtggtactgggcgacatcggccgcagtccgcggatgcagtaccactccctctcgctcgctaaccaggccagtatggaagtggacattgttgcaaatggaggaagtgaaccttacttgtcacagagagaatccatcaatttacatccacgagatgaaaaagtgcagttaacaggaatttcaaagatatcaggtgcgctggcacttctacttaaagctgctgtccagttcattttgctagtttggttcctttgttttaagatccctcgcccttatgtctttgttgttcagaatccaccctctgttccaacattggctgctgtaaaactggcaagctggctgagaggtgctaaatttattgttgattggcataagtttggatatacattgctggggttgtcgcatggcagaagtcacatcattgtcaaaatatatttctggtttgagaagtactttgggcagatggctgatggtgccttttgtgttacaaaagcaatgcaacatgaacttgctcaaaattggggaatcaggctagggaattccatctgtagtgctatgggcaatgccaaatgcatatcagtggaggaagtatgggaagacatgagcattactgtcttcgccactttaggtgaagatgattcaacagatgaggagcaactttggattgatatcaagaatgggaagcaatttgtctacccaagattactgtttattgttacaggtaaaggacctgataggaagaaatatgaggttcagataaaaaggttgaagttgagacgtgttgccttgcggacgatgtggcttgcatcagaggactaccctctattgctcggatcagctgatctaggagtgtcgttgcatacatcttcgtcagggctggacctaccaatgaagatgctctttaaggggtttccagaagaatgcaatgccttgaaatccctcaaagaatgtgccatgaagtcaccatcatcttcgaaatggtcacagaatgggaaaccaacgccctaccgttggtgaaccaagagacgagacagtcgatgcattcgagt

SEQ ID NO: 6614 - DNA, 1577 bp, Zea Mays
gttactattcactgtctggtgcgccttctagcgctgctctgacttatgcgcgcgcaggcgtgcactgttcacttttactgttctgttgcagacgaccgttggcgctgtgtagccgttactccgctggcacaccggacagtccggtgctacaccggacagtccggtgaattatagcggagcggctcccagaattcccgaaggtggcaagtttggagttgggttccctggtgcatcggacactgtccagtggcacatcggacagtccggtgcgccagaccagggctgccatcggtttaaatttgctcctttgttttgaaccctttcttttatctttgtattggtttgttgtgaacctttggcacctgtagaactcataatctagaacaaactagttagtccaaataatttgtgttgggcaattcaaccaccaaaattcatataggaaaagtcataatcttaaagttgttcgccacctttataggtttgtctcgtttaagcagatctagaactatctgatgtataaatgtgtttactagcctcctggaactagtaattgtatcacatttgagtcccagaggattgcggcgcttcagttaccgctttattctcaacgttacagtttgaggagcattaaaataaggaaggaaatatattcttttgagacattggcgtaactttgtagtggtctttcctgtatgatagaaggaccatattcttgtgctcttggcggtggttaatggcggcgggaggacatacagaggacataaatcaaccaggtacgtctactagcatgggtatcgtagctgtacctgatgctgtgaccggagacgcagacggtgtagctgttactccatcggcggcgttgagggcacctggaaatattgatgacaacacaagatcggcagagatggtaggagcagatcaacacatccccatgagacatattggggcgcatgattaaaacacacctcacattctacaaagtcatgtaagttccgataagatcataatatcagttacgtacatacttttgtattgctgtagcaacaccacagtaaatttggggtgtcattgattcataaatgttaaatttctgtgcatggccaaacaatatttatataagattgatacccaaagttggtatgacattttgtaatgtcgacgaggcttataatttttatagtcgatatgcatatgaggttggatttccgttgaagaaatatagggaatgaaagaattgtaaatggttgaattgttcaatggaaggaaagaatgctgaaagtggagttggaaatccaatgatgtgtaatacatgttcgaaacgaacacagtgcaaggctgggatgaaacttaaaaaaaatacgatgatgctaaagagaatgttatttctgtacggattgatctggttaactttgagcataatcatgaattctgaaagaaagatacagaaaaagggcaattgcaatgcaacaaaactcacgatcgtaattatatggagttcgttaatgcgatgcaggaaagtaggattccgcaacattgcattatggattttgtttcgaaaatgcatggtggtccag

SEQ ID NO: 6615 - DNA, 1674 bp, Zea Mays
gtcttcgctggaccctcctcccgcgacgagcgtctgccaggctgacggcgatagcgatggcggaagtgacggagaggagaaagcgcgccgcagtcgtggtactgggcgacatcggccgcagtccgcggatgcagtaccactccctctcgctcgctaaccaggccagtatggaagtggacattgttgcaaatggagaaaaagtgcagttaacaggaatttcaaagatatcaggtgcgctggcacttctacttaaagctgctgtccagttcattttgctagtttggttcctttgttttaagatccctcgcccttatgtctttgttgttcagaatccaccctctgttccaacattggctgctgtaaaactggcaagctggctgagaggtgctaaatttattgttgattggcataagtttggatatacattgctggggttgtcgcatggcagaagtcacatcattgtcaaaatatatttctggtttgagaagtactttgggcagatggctgatggtgccttttgtgttacaaaagcaatgcaacatgaacttgctcaaaattggggaatcaggctagggaattccatctgtagtgctatgggcaatgccaaatgcatatcagtggaggaagtatgggaagacatgagcattactgtcttcgccagtaagattgacgatgaagttttcttgaagtctaatagaccggcacttgttgtgagcagcacaagctggacgctagatgaagatttcagcatacttctggaagcagcattgatgtacgagactacgacagacgtgtcgctgcagctttaggtgaagatgattcaacagatgaggagcaactttggattgatatcaagaatgggaagcaatttgtctacccaagattactgtttattgttacaggtaaaggacctgataggaagaaatatgaggttcagataaaaaggttgaagttgagacgtgttgccttgcggacgatgtggcttgcatcagaggactaccctctattgctcggatcagctgatctaggagtgtcgttgcatacatcttcgtcagggctggacctaccaatgaagatgctctttaaggggtttccagaagaatgcaatgccttgaaatccctcaaagaatgtgccatgaagtcaccatcatcttcgaaatggtcacagaatgggaaaccaacgccctaccgttggtgaaccaagtaagtggccaaacattgcttactagaattgtgttacactcgtcagcttaggtcttacctattttcgtgtccaaatttatagatcgttggttgagatgtgtgcgaacatatactcccttaatattagtcgttttagcccttaaaatttatgtctatattcaaatatatatatatatatatatatatatatatatatatatatatatatatatatagggcaggtaataacgggcatggtttttaaagcggtaaggcggtccaaggcgttggaccaccacctagacgcctaggcgaggtaggcgggcaagacgcctaggcgtcagaccaccgcccggacgcctaggcgtcgcctaggcgacgccttaaaaacagtgataacgggagctctgggcttccaatagttaaaggaagcccaggccgaccacccctgcaaactggttcaaccagcgcgcccaaacaggctgtcgggtg

SEQ ID NO: 6616 - DNA, 1433 bp, Zea Mays
gtcttcgctggaccctcctcccgcgacgagcgtctgccaggctgacggcgatagcgatggcggaagtgacggagaggagaaagcgcgccgcagtcgtggtactgggcgacatcggccgcagtccgcggatgcagtaccactccctctcgctcgctaaccaggccagtatggaagtggacattgttgcaaatggagaaaaagtgcagttaacaggaatttcaaagatatcagaatccaccctctgttccaacattggctgctgtaaaactggcaagctggctgagaggtgctaaatttattgttgattggcataagtttggatatacattgctggggttgtcgcatggcagaagtcacatcattgtcaaaatatatttctggtttgagaagtactttgggcagatggctgatggtgccttttgtgttacaaaagcaatgcaacatgaacttgctcaaaattggggaatcaggctagggaattccatctgtagtgctatgggcaatgccaaatgcatatcagtggaggaagtatgggaagacatgagcattactgtcttcgccactttaggtgaagatgattcaacagatgaggagcaactttggattgatatcaagaatgggaagcaatttgtctacccaagattactgtttattgttacaggtaaaggacctgataggaagaaatatgaggttcagataaaaaggttgaagttgagacgtgttgccttgcggacgatgtggcttgcatcagaggactaccctctattgctcggatcagctgatctaggagtgtcgttgcatacatcttcgtcagggctggacctaccaatgaagatgctctttaaggggtttccagaagaatgcaatgccttgaaatccctcaaagaatgtgccatgaagtcaccatcatcttcgaaatggtcacagaatgggaaaccaacgccctaccgttggtgaaccaagtaagtggccaaacattgcttactagaattgtgttacactcgtcagcttaggtcttacctattttcgtgtccaaatttatagatcgttggttgagatgtgtgcgaacatatactcccttaatattagtcgttttagcccttaaaatttatgtctatattcaaatatatatatatatatatatatatatatatatatatatatatatatatatatagggcaggtaataacgggcatggtttttaaagcggtaaggcggtccaaggcgttggaccaccacctagacgcctaggcgaggtaggcgggcaagacgcctaggcgtcagaccaccgcccggacgcctaggcgtcgcctaggcgacgccttaaaaacagtgataacgggagctctgggcttccaatagttaaaggaagcccaggccgaccacccctgcaaactggttcaaccagcgcgcccaaacaggctgtcgggtg

SEQ ID NO: 6617 - DNA, 1558 bp, Zea Mays
ctcagggtgtctgtgtgcgcgcgcctgcgacaactaggctacgccgccgccgccctgcgtcaggtgtctaggtcttcgctggaccctcctcccgcgacgagcgtctgccaggctgacggcgatagcgatggcggaagtgacggagaggagaaagcgcgccgcagtcgtggtactgggcgacatcggccgcagtccgcggatgcagtaccactccctctcgctcgctaaccaggccagtatggaagtggacattgttgcaaatggaggaagtgaaccttacttgtcacagagagaatccatcaatttacatccacgagatgaaaaagtgcagttaacaggaatttcaaagatatcagaatccaccctctgttccaacattggctgctgtaaaactggcaagctggctgagaggtgctaaatttattgttgattggcataagtttggatatacattgctggggttgtcgcatggcagaagtcacatcattgtcaaaatatatttctggtttgagaagtactttgggcagatggctgatggtgccttttgtgttacaaaagcaatgcaacatgaacttgctcaaaattggggaatcaggctagggaattccatctgtagtgctatgggcaatgccaaatgcatatcagtggaggaagtatgggaagacatgagcattactgtcttcgccactttaggtgaagatgattcaacagatgaggagcaactttggattgatatcaagaatgggaagcaatttgtctacccaagattactgtttattgttacaggtaaaggacctgataggaagaaatatgaggttcagataaaaaggttgaagttgagacgtgttgccttgcggacgatgtggcttgcatcagaggactaccctctattgctcggatcagctgatctaggagtgtcgttgcatacatcttcgtcagggctggacctaccaatgaagatgctctttaaggggtttccagaagaatgcaatgccttgaaatccctcaaagaatgtgccatgaagtcaccatcatcttcgaaatggtcacagaatgggaaaccaacgccctaccgttggtgaaccaagtaagtggccaaacattgcttactagaattgtgttacactcgtcagcttaggtcttacctattttcgtgtccaaatttatagatcgttggttgagatgtgtgcgaacatatactcccttaatattagtcgttttagcccttaaaatttatgtctatattcaaatatatatatatatatatatatatatatatatatatatatatatatatatatagggcaggtaataacgggcatggtttttaaagcggtaaggcggtccaaggcgttggaccaccacctagacgcctaggcgaggtaggcgggcaagacgcctaggcgtcagaccaccgcccggacgcctaggcgtcgcctaggcgacgccttaaaaacagtgataacgggagctctgggcttccaatagttaaaggaagcccaggccgaccacccctgcaaactggttcaaccagcgcgcccaaacaggctgtcgggtg

SEQ ID NO: 6618 - DNA, 1138 bp, Zea Mays
agtacatgcgtatgcgtatcaatttcagaagcatcggccggtgcttattttgatcaatcgaaacacaacagcaacatctattgccaaccgtcgagtcttgtaatatcaaaagacattaaaattgcacgtacataaggctcacacaggaccggaccggaccggagtacttccattatggtagcacagcgtacgactccctcccttaaccgctacttaaacaacaagcaatagtgcaatacaaacgaacaaagttcaaacgtaccttcagaacggtatagtaacacttggtgcatgcatgcaaatcgaccgactgcgtcctataccatatcatatccgatccatcatgcatcggtgaagtgcagcactgcactggtagatagcgaagcgagcgatagatagatagcagccattgcattgcaggtgttgccgaagcggtgcagcgcggcgcgggaggcctccaggtcggcgtcgcgcaggcccaggttgctctgcaggtgctccagcacgtcgcggctggccgcgtgcatgcagaagtgctcgaacgcgcgcttgaagtccgggatgtagggcgcggcggccgaggcgtcccctggggtggtcggcggcgccggcgtggaggccttggacgggaacaggtggcggaacagcacgcccgcgaagaagagcagctgctcggagaagggcagcaccaggggccccagcgtggtgatgttggtcttgagcgcgtggccgcccacctccagcaggtcgtaggtggcctccccccacaccttgcgccacagctcgtcgcggctgaggctgcccagctcggcgccgcacaccagcacgatgacggggatggtggccaggtacacgccgtggctgatgaggtagtggtacccgaggcgcacgtacttgaggttcaccgactgcaggaagtccggcaggcggcggcgcacgcgcaccgagaaggccggcgagccggcgtccgggcccgacggctccacgccgcggttcacgatctccgtcgacagcagcgcctgctcctcccgcgccatgatggccgagcgatcgatcgatctatcgaccgaccgaagctagctcgcgcgcgctgctgctgcagctggtatggatccggggcagtggtggtggtagtgag

SEQ ID NO: 6619 - DNA, 243 bp, Zea Mays
atgaaacagacaccgccaagaaacccaacaagtaccagatatttatacttctgtagcaaactaactatttacaacagaagtgttctttacctatggtttgtttgttttttccttttcctaatagattttccattgtttttccttttgatacttttctatggagaagggaaacgcaaggtaagctaaactaaaagaacagatatattttgcctatttattgtctaagctacggtcaaaattttc

SEQ ID NO: 6620 - DNA, 2238 bp, Zea Mays
atgaggaattacagcaaacttgtgagcatcaggcttggcgggaagcagctagagggagggacggcttggaggcctgataaaacaccaaggataggctatagatggatccgacagttcctagccccctgctattataccctcttgctgatgccaggttttattgaagttgtatattattatttcttctctagccaagttcatagaagtgttgtgtatggagatcagccaaaaaacagcgatgtgcacatgccagacatggatggctttaagcttctagagcttgtggggcttgaaatggacatccctgtcattagtaagtccaaaatgttatagcttactggtgaccgactctcactgttgttgatggtaatatgcggcttttatacagtggtgctcttatatatctacaaggcatccatgccaatcaactaggaattgacaatgagtcccactaccacctgatgttcttttttcagctttgctgctgttaagttatttaccatagtttattctacaatctaattttttatgcagaaactgtgcccaaaggatacttgaactcatgaatgttgacagactcaccagggaaaatgttgcaagtcaactgcaggcaaggcaattagggacttaaccccactctatttagtttagccgcctcatcgccctaattaagcaagtagtactgtttaggcattatatacaacgggaattcatgacaagcgcatatataatatatttattgaagtgttctttgtttttttgctaatcaatcaatcttataaacgtggaagaaaggacacagtttgttccatagctataaatgtggaagaaaggacatgtgaaaaatgaagccttagcaatttcagaaactccagctaaaagcactgctactatgccgccaacttaaattaaacaaaaaaaggaatgcaacatgatctagcgaaatgctttcctgtatgaagtgtatgacagaatgacaatgtgatgttggccttttgcaaaactttgttcagaacggattgcctaatctatgaagctaatcatttaagcttgattgcttaaaaaagaaaaagaatcaatgaaccaaattaacccaacgcacgcaatagttaaatgatgatattagtaaaaataacgcctccttgcacacaaggcaatcagtttagccaagctaattgtacaagctgtgattagagctcaggaacaagcaaaaagttgacatttattgagttataaggaaaacaacaaggaccaagggcaatgtgcatcatttgagcacctagagctgttcctaaagcaactattcagcaggatttagactctagtttttatttaaaatatgtcattgcagttatgccagtgtcctaatcttttttctctactacttttggtcatagaggtgacgttggtgaggggtttgggtgttggaggggttccaaagcctttgcccaacataaatggggctttcactgaatatagttaataccacattgcaatatagtaaatgtttgcgtactttatggaccaaacaaaatgtttgcttctagcacctgcttgtacaacgagattgcctgcatctaacatcataagaaattctatcgaaggggaaaacaaatcataatgtgttccttttatgcttaacttcagtaataaaaaggcatgcttttaaaaaaataatcacacaattaagaaacaaacaccatccaacttgttgtcctaatcgaaaactaatcagacaatacatgcaaaagcagaaagcacaactaaagttaagtaacacaaatagttactttaaaaaaaggattattattgtgcggcatgatatccgaaggcttgatgtgagttcaagtgcaagtggacagccatatctgaagtctactatctttgccttgaagccttcaaacaagatgatattaattgttctattatccctatggacaatggactgatgaactttcccatgaaaatatcgagtccttttgtagcgtcaacaacaatttgcactcgctgcatccaaccaaacgttgggccaggtcgagcaccttgaaatacttttcttcctattgacatgaattagaaaacaatattgcaagttaccagtcgaaacaatagtgttcaattaactgtggagttatgcagcaagatgcagaggatgtgcaaaatcataccatgtagaacatcatggagagaacccatggtcgcgaattcgtaggatactatgcgaagattacgcttgat

SEQ ID NO: 6621 - DNA, 837 bp, Zea Mays
gctcaagtcccagatactgagcctggacgcgagctcccttctcacgctggcttgggcgctgttgctgctcttccatgccttgagctgcttcctcacgcgctcgaccgaccatctgtcgctgctccatcgcacacgttccagctcgccggcctggtaccgtcttccaactccacgctttgccatccgccgacctcgttggtgagggctgacgtcgtcctgcagcttccacgccgtgccgacgctcgtcgtgcagccttgcttgttgtgcttgccgcagttccccatcatgctgtgagctgcaacatgctcatggttgttgtctcctcatcggccacgctcaacctcgcagctccttcgcgtcgttgatttccttgacccacagcctctcttccgacctcgtcgtgctcgcggtgtcatcgtaaagctgctagctgcctgtctcgctgttcctcatgcccagcaggccgtcatgctcggcatactttctccatgtggttctctcgcttcatcggctttccgcgtgttagagcagggacaatctgcagcatcaaacaaccctcatggatagcctagcccatcgtggaaccaatccaaccgcccacctcattgatgttcttctaaacttagttgtaagacatgtttatggcatatattggatgtttgtggactcatttatgtgagtacttgttagtgctgtgaactattttgtgatacttgtgactttgtgatctttgtgaagaaacatgtgatctttgtgagctatgtcgtgtgtttgatgtatgtgatgattctgtgagctctgtgatgtatatgtgatgattatgtgatatatgtttt

SEQ ID NO: 6622 - DNA, 1451 bp, Zea Mays
cgggcctttttggcaacggctctgcttcggtccgcatacgccttccctctgaaaactcttcattctcctctcctccgccgcgccgccaacttcccctcccgtcaactccggctcccgacagagcaagaggcggagaactacacggtggaggaccttgtggccctgaatccgtacaaccccgacatcctcaacgaccttgagaagttcgtcaacgagcaagttgcgtctcaaacatataacttggatgcaaatctcagccttcttcgcctgtaccagtttgagccaggaaggatgagcatacatattgtggcccacatactgatcaaggctctcatggcaatgccggcccctgacttcagtctttgcttattcttaattcctgaacatgtggtatgaaaaattacatcctgcacttttagttcaatagtatcagaggtgctgtgtagacctgcaatacagtgtgtttaattgaggcttgtgtgtgattaatgtgcacaatatccaatatttataaatatttggtaaagaagcccccacatccatgcttgaatatatattgtgctctgcgagtttgaaaatttgcaggaagcagactagtctcgcaaatgtcacagatgcagagattccatacaggagctgtcctgttgcctttacattttttggctgcattattttgtcagcatgtttagtctacttgtctgtgtctttgtttcagcaaatggaagagcaattcaaggcattgatagttctttctcactatctagagactgctaggttcaggcagttttgggatgacgcagcaaacaaccgccacatattggaagcagttccaggttttgagcaggcaatccaatcctatgcaattcatgtactttccttgacataccagaaagttccaaggcatattcttgcagaggcaatcaacattgaaggtctcgctttggacaagtttcttgagtaccatgctgcgaactcaggttgggtaattgagaagggtgggcagtctcaagtgattgttcttccacgcaatgagttcaatcacccccagctcaagaagaacacagctgataccgttccatttgagcacctaacacgcatattccctgttcttagctgattcaggcgtagtgagagatatacaatagaactcagagcgagtgaagcttctctaagcaattgtatcatctcctttgtggtataccgtattttaagatctcggtatacctgttcttttttatggctgaattggtacctgcaacttggtttttactataacgaaatgaccagttatgagattggtcggccctaaatcctaatgcttgcaatgctgctgaactactgatatttctgagaagactcatcttttaaaagcggaagatccattgttgtgttgggaatagggtgacatgacaatgggctctaaattttacactataaaatttaaggcttag

SEQ ID NO: 6623 - DNA, 1101 bp, Zea Mays
cgggcctttttggcaacggctctgcttcggtccgcatacgccttccctctgaaaactcttcattctcctctcctccgccgcgccgccaacttcccctcccgtcaactccggctcccgacagagcaagaggcggagaactacacggtggaggaccttgtggccctgaatccgtacaaccccgacatcctcaacgaccttgagaagttcgtcaacgagcaagttgcgtctcaaacatataacttggatgcaaatctcagccttcttcgcctgtaccagtttgagccaggaaggatgagcatacatattgtggcccacatactgatcaaggttggaacatttaatggctgcatcgatttcattgatagcaaatggaagagcaattcaaggcattgatagttctttctcactatctagagactgctaggttcaggcagttttgggatgacgcagcaaacaaccgccacatattggaagcagttccaggttttgagcaggcaatccaatcctatgcaattcatgtactttccttgacataccagaaagttccaaggcatattcttgcagaggcaatcaacattgaaggtctcgctttggacaagtttcttgagtaccatgctgcgaactcaggttgggtaattgagaagggtgggcagtctcaagtgattgttcttccacgcaatgagttcaatcacccccagctcaagaagaacacagctgataccgttccatttgagcacctaacacgcatattccctgttcttagctgattcaggcgtagtgagagatatacaatagaactcagagcgagtgaagcttctctaagcaattgtatcatctcctttgtggtataccgtattttaagatctcggtatacctgttcttttttatggctgaattggtacctgcaacttggtttttactataacgaaatgaccagttatgagattggtcggccctaaatcctaatgcttgcaatgctgctgaactactgatatttctgagaagactcatcttttaaaagcggaagatccattgttgtgttgggaatagggtgacatgacaatgggctctaaattttacactataaaatttaaggcttag

SEQ ID NO: 6624 - DNA, 4784 bp, Zea Mays
gacatggatgagtgtatgaccaatcatatgtggacaagattgtgttttgtgtacttttgtgaatgagacttgtatcagaacagtagcggtgacgaaagacgatcctcgtcgaggaaatctgataaaacaaaaggagcagcttcaacagagcctgcagctccagtggtcggactgaccaacatttgcacaactgaaattgaatccatgggcagacgaagagggagagggaagaagcaaaccactgtcaggagccatgaagacaaaggtagcagcggtgaagaagtcgtgcctgcaaagaagaggaggggaaggccccaaacgcgcttcgccagtaagatcgatcaagcagatgttgaaaactttgtagaacaggtcgatgccgaccaagaagaagctgacgatgccaagctaaagaacagtgctgcagctggtggtcccaagagagtcagactgctgaaagagcgctccaatattgccatagaaaatactaattctactgttcgattaagcagtgatgaatcaacgaggaccaatgggttcaggcagattgggagccgacggaaaaacaagcccaggcgagcatcggaggcagggctagaatgcaagtgaaccgtccctgcatttttcagtacaaggtagcatccatttttttgctacatttgtcatgttcggtagctcccggtgctagaaaaacaaaatgtaaactagcatgttctgattgcatgcctcagtttttttattgacacaaagtgtatgaactgatggtacaccaacttgttcagctgctctaggccctggttctgtttgagctgcttgtagcagacatcttacctttcagtttaccatatggtgttcctgcaattttgattgatctgatcttttccttttccttttagcctattactgaatatttgtagtttattaagttctggaaatgggaaagaacataggtgctgtcttgaggatctgttatctgttgttcttagaccgctgagctaacatctaaatgtatatagtttgctagattattcgttagctccacgcggtctactacctccagaagctactcgatggcgccgggtccttggacggtgaaaagcggaggcggagaacgagcggcattggcagctggccgagacacaggccagtggcgacggtggctgctgcgtagacaatgggcacgactggacgaagacacagggagatggtcagctgcgacgagtgcagctgtgggtgcacacgcggtgcgcacgctatgtccgcagcgtccacacatccttctcctgccacaaatgccggaggtccaagcgcgtgtcttcctccaccgacgaggccgaggttgctgagctcctcgccgagctgccaacccactgcccgcctccgttgtacaaccgctgggccgaggtcccgctcctagcccgcgtccgcgtccacgggcttcctggctggggcaacgacactctttttcgcggcgccccgaccttttccgccgccctgtggcgctgcaccagctacgtccccaagagaattggcttccgctactgcgagttgccctcctaggccaacgataatgatggggctgatgctctttttgtgctggccagagagaagcccaaggagatgacaaatgatgttttgataggtactgaaccgaagaaggagaagcattacgtccgaagcctgagttgtcgtggcaagaagattgacagtgatcagcaagcaatgactcctctaaccaaggttaagaagagagagcctgatagttggaagaatgtgtgtcagcagagtgagggctgaagatgctagatgtagaaagagggaagacgtggagactgctactaaaaagagtgaagaatcggacactgaatctgaagaggaagaacaaacatggactgaatcaagcacaatcgaaaagcaaggtcctatcatcattaaccttgttcctcagtttgatttcgtatttgaattgtagttatatgacactttgtctaatttgttaatccggatggttgatgcattttatgtctttaccttgcaaacaggttaacagaatcagggaacttccacagaacagtaagatcatagccactcacactaacagtccagatgtatgttcagaccttatgatgctgtttaattcttgtgaggcataatgtgttacaattggaatgatgtcaacctttttcccattgtcatataggtactttgtttggatgaacaagagctaatttttcttatgtggcgaggaatttctagatatgaatacatccaagtgtataaagaacaacttcctcaatttttagatatgaatataattggttcataatgatttttagtttgttgttggtctgccatgtgatgcatccagtatcgcaacaacttcattaacgaagtgtcgggtatcatgttcattcataaaagaatatctgcattttattcaactttgatgtgcagtttgtcctcttttattttctgtttgttctttgatccttatcacacttaggtactttgtagactctgaaattttagtcactaaggtatacaaaaagactctgaaatttattttttctgcacacaatccaaaaaatgttttttgtgtgtttctcattttcatttggttaagtacatttatgtttctacttcgtgcagtttacaattgaaataggcaatgtgcaaattggtttgatctgataacatttatgtttctacttcatgcagtttgtgagcatggttacacgttagcccagaatttggatccgaacagcgaagggagaggagtattgcagttcaaaaccgatttaatgtcagtgatctgggtatgtctatttcagttacacatcttacgtgatttcataatgtaagatgtccttttctcaacttctacagtattggagaataaacttttgaattttcatactttgttggtaaaggccatataagtatatcaccatgaatccatccccttctttttgtgaatcttttactattatttttataaggccattctagatgcttttacctatgttactggtaacaatgatgaatgttttgctgcgtgctttaaaatgaccgacgacgggtgcttatgaacataaggagtatttagcaatttaataatatgttttttcagtagattgtccacattccattgtgattggtgaaaactggtttaatgccagtgatcagggtatgtccatttcagttacacatcttatgtgatttcatactgtaagatgtccttttctgaactattacagtattggagttttttttttgaaatttcatgttttgttggtgaagaccatagaagcatatcaacatgaacccatcctcttctttttgtgaatctttactattatttttataaggccattctagacgcttttacctatgttactggtaacaattatgaatgtttggctgcgtcctttaaaatgacagaaggcaggtgcttatgaacataaggagtatttagcaatgtgataatatgttattttagtagattgtacacattccattgtgattggtgctatttcgtttaagccatgaaggcttggatccctttatgtcgtatcacataatgccttaggggtcacccaggtcacaccactatactacaccatatcaatttgcaccctaaacgacatattattctgaaaatagatcttcatcataaccttaggtatatttttgaacagttcttgttggttcatgaatttagcaaaaactagcgaagaggggaggtgctgctattgatcgaagtcaggatattgctaaattgcaagaattttacaagctttatagagaaaagcataaagtggatgagttgattgaagatgaaatgaagctgagggaatctgccgtgttcagcggtaaccttggctttcctcttcttggaccttctgaagcagatgccaagaaagataaccatctagatttacaacatcctgcacgtaatgctaaagggtagctgtggtggtgggttttagcaccattatgggcgctactttagagaataaaaattttagcagtgattcaggtggaggaggcaataaggttgtcggttctgccggagagtcatcaaagtagcacccaaaaaatgggaaggaacccattcagtggcacaacaagtgtgacatcactatctttgctcatctaaagcttgtattttattcatgatcaagtttatagacataaacacattcgagtgtgggagttgactgttggtggatataacagtgggttttatactgcattttattgatctattctataaacatgaataatagatgaaggcaaatggttgccatttttatttattttaccttgtgtatgccatgtgtccacacaagtgagcctatagttgtctgagataaaatatggctgatatatattcactatgagcagatatttttcacacaataatatgtccaatgaacttattgctctttctaggtggtttaaagctattgccatggaactaatttctgttctagaacaggtaaatatttcatgtagaacttcatctcttttgtttacttccctactattattaagaggggaggaagatgaagtggtgagtgtatatacgtaatttgttgagtccttcaaaggtgttagctcatatggggctaagttagcaattaggttgtgtgatcgactcccaatgtaaagctgaagaccaactcggaaggttagtgacatgggtttcatttttgcatacttcctcattcggcaatggtaggtggaaaatccaaagatgacaggtctatcatgtaacattt

SEQ ID NO: 6625 - DNA, 3314 bp, Zea Mays
gatcatttatgtgtggtcatgactatgtattgtatatttgtgtggttgagacttgtatgtgaatgcgaatgaacaatcgtgttttaagacttatgtgttgtgtgttataatttaagagtggacatggatgagtgtatgaccaatcatatgtggacaagattgtgttttgtgtacttttgtgaatgagacttgtatcagaacagtagcggtgacgaaagacgatcctcgtcgaggaaatctgataaaacaaaaggagcagcttcaacagagcctgcagctccagtggtcggactgaccaacatttgcacaactgaaattgaatccatgggcagacgaagagggagagggaagaagcaaaccactgtcaggagccatgaagacaaaggtagcagcggtgaagaagtcgtgcctgcaaagaagaggaggggaaggccccaaacgcgcttcgccagtaagatcgatcaagcagatgttgaaaactttgtagaacaggtcgatgccgaccaagaagaagctgacgatgccaagctaaagaacagtgctgcagctggtggtcccaagagagtcagactgctgaaagagcgctccaatattgccatagaaaatactaattctactgttcgattaagcagtgatgaatcaacgaggaccaatgggttcaggcagattgggagccgacggaaaaacaagcccaggcgagcatcggaggcagggctagaatgcaagtgaaccgtccctgcatttttcagtacaaggtagcatccatttttttgctacatttgtcatgttcggtagctcccggtgctagaaaaacaaaatgtaaactagcatgttctgattgcatgcctcagtttttttattgacacaaagtgtatgaactgatggtacaccaacttgttcagctgctctaggccctggttctgtttgagctgcttgtagcagacatcttacctttcagtttaccatatggtgttcctgcaattttgattgatctgatcttttccttttccttttagcctattactgaatatttgtagtttattaagttctggaaatgggaaagaacataggtgctgtcttgaggatctgttatctgttgttcttagaccgctgagctaacatctaaatgtatatagtttgctagattattcgttagctccacgcggtctactacctccagaagctactcgatggcgccgggtccttggacggtgaaaagcggaggcggagaacgagcggcattggcagctggccgagacacaggccagtggcgacggtggctgctgcgtagacaatgggcacgactggacgaagacacagggagatggtcagctgcgacgagtgcagctgtgggtgcacacgcggtgcgcacgctatgtccgcagcgtccacacatccttctcctgccacaaatgccggaggtccaagcgcgtgtcttcctccaccgacgaggccgaggttgctgagctcctcgccgagctgccaacccactgcccgcctccgttgtacaaccgctgggccgaggtcccgctcctagcccgcgtccgcgtccacgggcttcctggctggggcaacgacactctttttcgcggcgccccgaccttttccgccgccctgtggcgctgcaccagctacgtccccaagagaattggcttccgctactgcgagttgccctcctaggccaacgataatgatggggctgatgctctttttgtgctggccagagagaagcccaaggagatgacaaatgatgttttgataggtactgaaccgaagaaggagaagcattacgtccgaagcctgagttgtcgtggcaagaagattgacagtgatcagcaagcaatgactcctctaaccaaggttaagaagagagagcctgatagttggaagaatgtgtgtcagcagagtgagggctgaagatgctagatgtagaaagagggaagacgtggagactgctactaaaaagagtgaagaatcggacactgaatctgaagaggaagaacaaacatggactgaatcaagcacaatcgaaaagcaagtttgtcctcttttattttctgtttgttctttgatccttatcacacttaggtactttgtagactctgaaattttagtcactaagtttacaattgaaataggcaatgtgcaaattgtttgtgagcatggttacacgttagcccagaatttggatccgaacagcgaagggagaggagtattgcagttcaaaaccgatttaatgtcagtgatctggcaaaaactagcgaagaggggaggtgctgctattgatcgaagtcaggatattgctaaattgcaagaattttacaagctttatagagaaaagcataaagtggatgagttgattgaagatgaaatgaagctgagggaatctgccgtgttcagcggtaaccttggctttcctcttcttggaccttctgaagcagatgccaagaaagataaccatctagatttacaacatcctgcacgtaatgctaaagggtagctgtggtggtgggttttagcaccattatgggcgctactttagagaataaaaattttagcagtgattcaggtggaggaggcaataaggttgtcggttctgccggagagtcatcaaagtagcacccaaaaaatgggaaggaacccattcagtggcacaacaagtgtgacatcactatctttgctcatctaaagcttgtattttattcatgatcaagtttatagacataaacacattcgagtgtgggagttgactgttggtggatataacagtgggttttatactgcattttattgatctattctataaacatgaataatagatgaaggcaaatggttgccatttttatttattttaccttgtgtatgccatgtgtccacacaagtgagcctatagttgtctgagataaaatatggctgatatatattcactatgagcagatatttttcacacaataatatgtccaatgaacttattgctctttctaggtggtttaaagctattgccatggaactaatttctgttctagaacaggtaaatatttcatgtagaacttcatctcttttgtttacttccctactattattaagaggggaggaagatgaagtggtgagtgtatatacgtaatttgttgagtccttcaaaggtgttagctcatatggggctaagttagcaattaggttgtgtgatcgactcccaatgtaaagctgaagaccaactcggaaggttagtgacatgggtttcatttttgcatacttcctcattcggcaatggtaggtggaaaatccaaagatgacaggtctatcatgtaacattt

SEQ ID NO: 6626 - DNA, 2793 bp, Zea Mays
agaaggaaacaaaagcagagagcattacggtcattttatttgtttattgtccaatgcaaagctgatttgccaaataagatcacgaaaacccctcagcttcatcggaaaagctgttcgtacgtgaagctaaaaacctcggaacaacagctccacttatgaaactgagctggcctaaatgtacccacgaaccaaaatgctgcgcgcctagcgatctggctctcgaccagctacgtgtggggtattatgtacgaaaatgcagcaggcgacggacggagtagtcgtggatcagtcccatttccgcgggtccgtgatgttgatcttccagtgctggtcggtgtacccgagctcctcggcgacgtgcctgtcccatgcgatctccaccttcctccgctcggagaggcggcagggcccgcgcatgtggtcccccatctggtcgtacacctgccaccagcgcgcgtgcgcctcgtcgctggcgtacaccctctggtccgccacgttccagttgcagtcgtagtccctgtagcacgtccatggcttcatccccaggtagtggacggaccagacctcgggcgggtccgcccggaacagcctctccttgagcgcgcgctcccccgtggtgttggcccagaagttcttgaggtagttgacccggcgcggcaggcggtgccaccacacgaacacctcgttgaggaacccctggtcgccgccgttgtacgagcggacggtccggcgcccccgcatgagcgcgtcgaacgtgcacgccgacggttcgatcaccatcacgcccgagttgaagagcgagccgtcgttgcccaccgccgccagctgcgggaacgcgaacagcgcgtccaggtcgcgcagcaccaggatgtcggcgtccacgaacaccacgcggtcgtagtcggccagctgccacagccggaacttgctgtagttgtactcgttgtaggtgccccgcgccgcgcgcgggttgcggatgcgcttgatccgccggggcgtccacccggccgccgacagcgcgcgcagcgccggcctcgacaccgtgtggtcgtgcaggaggaccaggtcgcgggtcgaccccgcgcgccggatgctctgcgccagcacgatcgcgccgcacaggtacgtgtccgacgagtgcagaaccgtcgcgtacgcctcgcgccggggacgacgcccgcccgaccacgacgtcgcgttcaacacctcatggatccctgtgcacaaataatgcttgttcagtttagtttactttttgcgtgttcatccatgtaatattgatgtagtatcgatgcatgcacctagcttcctcactcaaaccatcatttttcctatgaatctcgtcatgaaacaaatcgtacaagttttaattattgtttcaaagaagaaatgcgaaaagctgaatacataattatgctgcgtggcgtacgtgtgtggggattggtaacagctagtagcgaccactgtctgtctacaaattatttttgtttgtttctttctgggaagaaaccccaccccccctagctagctttatatagtaatcgctagtactagctagatagttcagtcttaaaacgtactaccaccaaatggcgcggcactatacattgatctatctaccccacagcgaagcccggctcccaagcaaaagaaagttctgctggtggggtggattgtgttgcagtggtcgtcaagtcaaaaccaaactaaagaatttaagaaatggctgaaaaggcgacatatataatcgaccaacgcaaagtaaccacggatggttggttggtgatccacctggtagaatgcagtagcatgcaagtatcactaggctccgccgccgcgtgcccaaagtcccaaagccggcgagacccagccccggcccgaccggtgcagctcaccaaccgaacctacctgagtcagtcgtgtcgacgtattcgccacacatgacacatatatccatctgccgaccggatatatacccccatggccccatgcattacatcgcccgtccctaccgatcatacatgcccagataagcaagaatctatcttattagcttaatgattatatacatgtcctgtacgtatatagagcatataattccattaggtggcgcgttacgtccctaacacacaacagtgttgtagcacatgcatgtttctggacattattcgtgctaatgatgctctctcctatcctcccactaccaatggacactacacacgcgtggatttatttatcctgaataattaacagaaccgacactaattttctcttttacttactacttttggttgcacggaccccctgtttattattttctatcagtataatgaagatgcatgttgctggtcaaagtagcactacagctgattctgtatatattacacgtttactatcctgtataggtgtctaggattgtaaaaatgttgaatttagattagatgctggatgttgtttgttgtatgaaaacaaagtaaaattaaatcaggcgtctgtgatttagtatatcatgttgatgctatctcagtcttcttttagtttcaagacaagaataaaattctatgagatcggcggtctaaattctcacgcatagcgtctgtcgtctgtcctgctcgatcgtacactcgtattgctgctgcgcctaggactagcttagcatgtgttagtgcaactagatatgcctgcctgccttgaattgaattgaattgcatgcagtgcaggtttttagtagcatcaagagactgaactatggaggagtacgtagacggatcgaaagtcgaaacgtatgtgtcg

SEQ ID NO: 6627 - DNA, 180 bp, Zea Mays
atggtcatcaaaatgcatccccccttgctcaataacttcaattgctgttgcaatatctcttgtatcagcatcagcaggcaacaaaggcttaaaggacgaatagtctgcattatcgcagttagaagtgattatatccataagtgcagccacaagcatgctcctccctttagaatgatctaa

SEQ ID NO: 6628 - DNA, 1208 bp, Zea Mays
aatacttacgacaagctccccaaagcctgggtatgcagattcaattggcactatctccatacgaagtgcccaaccgccatatccttcaacaatcggtgtgacctgggtctgtcaggaaccaattagcatatactataacttagcattgtggcagtggaacttggcagtacgaatgttactacctcactaaaactaagaacatcaagaaatcctttgttgtgtcgttgacgcacaaaatcgttcagttcaactagtcttggagacccacttcttaactccccaatctatcaaaaattaaatgtcagaacatatagagaagatgaaaactatcaatttgtaaggaaacttatcagatggggaatggatgttagggcgtaaggaggcccacggaggggctgcgatagcagcagccatgggccctcaagggggattagataaggatagttagagataagattagaagattagttgagattatttaggagattagttgagattatctaggaaggttatcagttagtagtttgttgagagtttttaggagataaggatctctagctagatagggacggccaaccggcatatttatgtaatcaatggatgagaaataaagcatgcaagaattagaagggagaaaccctcctcttgctcggccgtgggcacaggcccccgaccggcgtttctgtccatcgatatctctctccaatccctcaccgatctagcgaccataacaatggaagaccataccgaaggagcaggacgaaacactaaacccatacgccatggcatgtctgcaagtttactgccaaaatgcggacaactatagaaaacctgtgatgcagaaagagttagatcttattaacgcgcacacagataatcacaaaattcaacacataaatatacatactagcccaatagtattattcaggaacttgtcatagttattcagctttgcttgatataaaagctgtttaaccaccagtcctcccatgctgagtatgaaaatggggagaaagcaagtcataagttatttcagtaactagcagttacataggtgaggagttagcacaacaaatatagcaacatgtcataacaattgcatggccgagtagcatcatagaccaaacaacaacccttacctatgtgtcacgaaaatgacaggccgactaccaatcccagcagccaccaacttcctcagcagcatagag

SEQ ID NO: 6629 - DNA, 2178 bp, Zea Mays
cgcaccaatcatgagaacaaactgcataatattattttataagtcgagacaaaatcgtaggttcgaaaaccactaaaatcagagttaaaacaattagttgcaaaattattaagtttctggaattattttcacacagataatctatttctgaattaattttattaatatcttgaaatccaaggacggcgagcattatacttctaaagtttagggtctaaaccgagaattccaagaccttgaattaatattcttttaacagacacggacgacgggttaattttaataaaaactagggactctttagtcaaaataccccacggctgcagaagtgatcgtgttgtatacttgtatccgccagactaatctggacaacttagattagaagtacaccaatccgaatcggtacagccatcggatcgaagatcaacagtgataatttaaaatactagagatctgctcccgaccgttgatacgtggatcaacgacagcggtataaagggaacgaaggggtataatcgttttaatcttagccgcccatcagagattcgacgtctaacgcgtctcttccacccggccagacccaagcggcggcgatttgcttcaccgcggcagcggacatcaccggagacagagatctgatgccccagtgctccaatccctaggaggatcgatgctacacgatgccgagaccctagaaacccaactaggaccataataactggaattagaacgccaaagcgatcctgcccacacgatcagcagcctgatgctacgattccggcggctaaggcgaccatcaatccacgattctcggagctatgcataaagggaaaatgggcgagcggtaggatggttcattggttcctcacgggtgatgaagtcgtggcaagaccgaatcacatagtgggcgggttcacggcggagatttgctccggtgagcaatctgtcgcaagcaggcgactccggccacgggtggtcaccgaactggctcctacggctccctggcggtgtccttcggcacttcaacgagaggctaattcgacggcgaaccgaggaggacaacgctccacaagcatttcgtggaactggtccttacaaatctaatactccgtttctttttagttgtcgctggataattcaattttgcactatctagcgacaactaaaatgaaacggagggagtaacatttactgtgtcaaaatactcactgaattaacagagcagttgttggttaaaggcgtgtcctgacgcccacgttcatactaatttatatgacgttagaacagccatatatatattgacttaaatgtcatcacattttactgtctaagtcctcacttcataaaataatgaccagaggctgtaggccttatacaccaaaaattaccttcgcgggacataataagaaaaccattttggtaatctggtgaacaaaaagattgcattaacaagcatagcatgcatttgttgatatgtgctctcaatttaaagttttcgaacaccaaatgcataaacttcactatacggtgaattatgtttcagtctttactaccatgcatatggggtccatctcactttttcttattcatgttctttattaagaagttctatattctcagttctattagcaagatggttgattaaccattattgcaaaccagagacactgtttaacccactgaaatttgacagctgcaatgttcctaaggcaataaggtgaggtgtggctactcttgttgcctaggcaactaggtgacatgtagctcgtcacacccttaagaacattcggcaggtggaaactaaatatataagaaatgcctaaatgtattcaaagaagtataccttattagaaaatgcaaactagtaaagtattatcactattgtatatcatctgtgatcagcttgaacctagtaataatttatgccccccacccccaactatcccaagttcccgacaggacatctgtgattgttcttttcactcgaaaaccagtgatcttgttatgagaataagaagacttgcctgttacgctaccaatataactccaaaaattcagaaaccataatggtactgagatagaaaggttaacccaaacagccatctgacctcctggaaaatgcaatttgaagacggtattgacattgcttttcaacaagaaacatgaggtacaatcaag

SEQ ID NO: 6630 - DNA, 1639 bp, Zea Mays
ccagcaggcagcagcagcgggtagcaggggcgaggtgacgcgcggaccaatggcgcggagggtaggggggcactcgcccctgaccgcctcgtggccgacacctggctccatcggtctgggggatcggagcagcagcctagcaggcaccacggcgaccctttaccataaaaagctactgctccttcgtacgacgccgtgctgcaagctgccctacagctgcagtgcttgctggctagggtaggcttctgttcatgctgctgctgagccaacgcggccgtcctcatcctgttcctgtcatccatccactctctctcctctccctccctccctcctctcctctcctctcctctcgtctctctctctctctcgtcgctattggctagttcgcgcgtcttgttccataaataggagtagtaggcagttcctcgctggtcctttgcgcaaaagagtactctctccctcctaccacacacagcctccggactgctccggacgcgcgcctcagatctactccaacacctccgcagcggcggcgcccgcgggtggaggagcaggagaggcggcgccatggtcgggaccgggaagagggagcggatagcgatacggaggatcgacaacctggcggccaggcaggtgaccttctccaagaggcggcggggcctgttcaagaaggccgaggagctctccatcctctgcgacgccgaggtcggccttgtcgtcttctccgccaccggcaaactcttccacttcgccagctccagcatgaagcaggtaatcgatcggtacgactctcattccaagactctccagaggtccgaaccgcagtcgtctcaactgcagtcacatatggatgacggcacttgtgcaaggctaaaggaggaacttgctgaaacaagccttaagctcaggcagatgagaggagaggagctccagaggctgagcgtcgaacagctgcaggagctcgagaagaccctcgaatccggcctcggctctgtactcaaaaccaaggtagagccaaaaaatccttgacgagatcagcggtctggaaagaaagagaacgcagctgatcgaggagaactcaaggctgaaggagcaagtgacacggatgtcgaggatggagacgcagcttggcgccgatccagagttcgtgtacgaggaagggcagtcgtctgaatccgtgacgaacacgtcctatccgcgcccgtccaccgacaccgacgactgctccgacacatcgctcaggctcggctccaagtgacggagatttgacatgtccggtagcggagcggtgccgattgcttgcccttctccactctagataggtctggattgggggagagcaagcactgctggatcgggaagacccaagtgaccaacgcgtcgcatcagaataaggcattttgagtgctgtatgatgtgtgtattctggctctgaaagtgagacctgcttttgttataatacatacatacaggcagcatggcaatacgtgacggggtatccgctgcctgcagtccgtgacctgtctgtcgtctctgtttctagtacccgtataatcaccctgcaattacctgcagctggtcatcgttaggagaaactccagtccatgcaaatgaactcccagcacttgtgctcttcgcg

SEQ ID NO: 6631 - DNA, 1641 bp, Zea Mays
ccagcaggcagcagcagcgggtagcaggggcgaggtgacgcgcggaccaatggcgcggagggtaggggggcactcgcccctgaccgcctcgtggccgacacctggctccatcggtctgggggatcggagcagcagcctagcaggcaccacggcgaccctttaccataaaaagctactgctccttcgtacgacgccgtgctgcaagctgccctacagctgcagtgcttgctggctagggtaggcttctgttcatgctgctgctgagccaacgcggccgtcctcatcctgttcctgtcatccatccactctctctcctctccctccctccctcctctcctctcctctcctctcgtctctctctctctctcgtcgctattggctagttcgcgcgtcttgttccataaataggagtagtaggcagttcctcgctggtcctttgcgcaaaagagtactctctccctcctaccacacacagcctccggactgctccggacgcgcgcctcagatctactccaacacctccgcagcggcggcgcccgcgggtggaggagcaggagaggcggcgccatggtcgggaccgggaagagggagcggatagcgatacggaggatcgacaacctggcggccaggcaggtgaccttctccaagaggcggcggggcctgttcaagaaggccgaggagctctccatcctctgcgacgccgaggtcggccttgtcgtcttctccgccaccggcaaactcttccacttcgccagctccagcatgaagcaggtaatcgatcggtacgactctcattccaagactctccagaggtccgaaccgcagtcgtctcaactgcagtcacatatggatgacggcacttgtgcaaggctaaaggaggaacttgctgaaacaagccttaagctcaggcagatgagaggagaggagctccagaggctgagcgtcgaacagctgcaggagctcgagaagaccctcgaatccggcctcggctctgtactcaaaaccaagagccaaaaaatccttgacgagatcagcggtctggaaagaaagagaacgcagctgatcgaggagaactcaaggctgaaggagcaactgcaggtgacacggatgtcgaggatggagacgcagcttggcgccgatccagagttcgtgtacgaggaagggcagtcgtctgaatccgtgacgaacacgtcctatccgcgcccgtccaccgacaccgacgactgctccgacacatcgctcaggctcggctccaagtgacggagatttgacatgtccggtagcggagcggtgccgattgcttgcccttctccactctagataggtctggattgggggagagcaagcactgctggatcgggaagacccaagtgaccaacgcgtcgcatcagaataaggcattttgagtgctgtatgatgtgtgtattctggctctgaaagtgagacctgcttttgttataatacatacatacaggcagcatggcaatacgtgacggggtatccgctgcctgcagtccgtgacctgtctgtcgtctctgtttctagtacccgtataatcaccctgcaattacctgcagctggtcatcgttaggagaaactccagtccatgcaaatgaactcccagcacttgtgctcttcgcg

SEQ ID NO: 6632 - DNA, 1649 bp, Zea Mays
ccagcaggcagcagcagcgggtagcaggggcgaggtgacgcgcggaccaatggcgcggagggtaggggggcactcgcccctgaccgcctcgtggccgacacctggctccatcggtctgggggatcggagcagcagcctagcaggcaccacggcgaccctttaccataaaaagctactgctccttcgtacgacgccgtgctgcaagctgccctacagctgcagtgcttgctggctagggtaggcttctgttcatgctgctgctgagccaacgcggccgtcctcatcctgttcctgtcatccatccactctctctcctctccctccctccctcctctcctctcctctcctctcgtctctctctctctctcgtcgctattggctagttcgcgcgtcttgttccataaataggagtagtaggcagttcctcgctggtcctttgcgcaaaagagtactctctccctcctaccacacacagcctccggactgctccggacgcgcgcctcagatctactccaacacctccgcagcggcggcgcccgcgggtggaggagcaggagaggcggcgccatggtcgggaccgggaagagggagcggatagcgatacggaggatcgacaacctggcggccaggcaggtgaccttctccaagaggcggcggggcctgttcaagaaggccgaggagctctccatcctctgcgacgccgaggtcggccttgtcgtcttctccgccaccggcaaactcttccacttcgccagctccagcatgaagcaggtaatcgatcggtacgactctcattccaagactctccagaggtccgaaccgcagtcgtctcaactgcagtcacatatggatgacggcacttgtgcaaggctaaaggaggaacttgctgaaacaagccttaagctcaggcagatgagaggagaggagctccagaggctgagcgtcgaacagctgcaggagctcgagaagaccctcgaatccggcctcggctctgtactcaaaaccaagagccaaaaaatccttgacgagatcagcggtctggaaagaaagagaacgcagctgatcgaggagaactcaaggctgaaggagcagtgacacggatgtcgaggatggagacgcagcttggcgccgatccagagttcgtgtacgaggaagggcagtcgtctgaatccgtgacgaacacgtcctatccgcgcccgtccaccgacaccgacgactgctccgacacatcgctcaggctcgggctaccactcttcagctccaagtgacggagatttgacatgtccggtagcggagcggtgccgattgcttgcccttctccactctagataggtctggattgggggagagcaagcactgctggatcgggaagacccaagtgaccaacgcgtcgcatcagaataaggcattttgagtgctgtatgatgtgtgtattctggctctgaaagtgagacctgcttttgttataatacatacatacaggcagcatggcaatacgtgacggggtatccgctgcctgcagtccgtgacctgtctgtcgtctctgtttctagtacccgtataatcaccctgcaattacctgcagctggtcatcgttaggagaaactccagtccatgcaaatgaactcccagcacttgtgctcttcgcg

SEQ ID NO: 6633 - DNA, 1177 bp, Zea Mays
caacaacttgctcgtgtcccacaccatcactgcaactagatccatcgttgccctctcctttgcgctccaggtccttcttctctgaactatgcggtacagtagctggttagctacctctatctcgctgtagttttgaaatctctaattttttttatgtgcgtggaatgaaagtgacccagttctttcttgcactaaaaaatgaattgaattcgtgatctttggatgcatggatggatggatggatggacggtcggaggcagcttggatcttcatttattttgtttgttttttctttttttgttggattccactaatattgtctacttccattaattaaatttatttgattagctataacacattatgtggttaggaaacgagcgcggaggatgaggcgaaggagtgggctgtctaggtggatccatggatgctcatcaccttcttgctgtcgtggtgcggcaaaggtctgaagcacatccgattttgaataacaatcagaatggtaattccagttcaaaggggaaatgacagaaaagtcgcaaagtcatcgataattttgtactagatcaccaatatcagcataggaaatccagaagaaatctgtcaatggtgctaaccatcatctccagctacatggctagcctgacgatgcagcaactgtctatgggcatttagagactggacaaccccttttccagcaatgaccccatcggctaccctactaggtcgactccttcgcccgaagctacatgacggacgagctggctggcgtgccaacgtcgctccttcaggagctagcctacgcatcgacaacctatagtgtggcccagtaatggcgatatggcgaccagctaccaacatggaactcttcctctccatcaactaccagttcaagaatgtgggacaagagctcaccaagagcagatgaggacctggtgggcctagcaatggcagcatggcgcggtggcgacgagctgctatgtgcagctcttcctctcagtaactaccagttcacgacagtgtggtaggagttcatcaagatcggatagggatcgcaagttggacatgtttttttgtctatctacatactgtgtttggagatgtagtactttattctctacaatcggttaaccctggtgtcagcgtttcgagaccggggggtccctggaccgacgag

SEQ ID NO: 6634 - DNA, 1045 bp, Zea Mays
gcaccctagggcgccaacaacttgctcgtgtcccacaccatcactgcaactagatccatcgttgccctctcctttgcgctccaggtccttcttctctgaactatgcggtacagtagctggttagctacctctatctcgctgtagttttgaaatctctaattttttttatgtgcgtggaatgaaagtgacccagttctttcttgcactaaaaaatgaattgaattcgtgatctttggatgcatggatggatggatggatggacggtcggaggcagcttggatcttcatttattttgtttgttttttctttttttgttggattccactaatattgtctacttccattaattaaatttatttgattagctataacacattatgtggttaggaaacgagcgcggaggatgaggcgaaggagtgggctgtctaggtggatccatggatgctcatcaccttcttgctgtcgtggtgcggcaaaggtctgaagcacatccgattttgaataacaatcagaatggtaattccagttcaaaggggaaatgacagaaaagtcgcaaagtcatcgataattttgtactagatcaccaatatcaggtcgactccttcgcccgaagctacatgacggacgagctggctggcgtgccaacgtcgctccttcaggagctagcctacgcatcgacaacctatagtgtggcccagtaatggcgatatggcgaccagctaccaacatggaactcttcctctccatcaactaccagttcaagaatgtgggacaagagctcaccaagagcagatgaggacctggtgggcctagcaatggcagcatggcgcggtggcgacgagctgctatgtgcagctcttcctctcagtaactaccagttcacgacagtgtggtaggagttcatcaagatcggatagggatcgcaagttggacatgtttttttgtctatctacatactgtgtttggagatgtagtactttattctctacaatcggttaaccctggtgtcagcgtttcgagaccggggggtccctggaccgacgag

SEQ ID NO: 6635 - DNA, 1570 bp, Zea Mays
tcatttgcctcctgtgtcacaggctttccctccgcttcaactgccttcttctcatttgcctcctctgtcacaggcttgtcctccgcctccactgccttctcctcatttgcctcctgtgtcttcccctccgccgtctcctctaccctccccttctccgcctccttggcctcctccaacttcggcttcttcgccgccgccccttccacctccgtctcctcgccgccgcattcagcagcaggatcgcctccttcctccctctctctcttctgaccggctggtgctgctgtcgctacggccacctccatctcgggttcagccatggctggagaagcgcggtcgaagcggagctccaccacccgtcggcgttggcggtgttcctggatcgggttcgcctagggtttgatgctcggtggtttggagacttccgtccgaggcgagagggtttatgagtaagcgagttgcggcgtcggggccgaatggtttgctgaaagcccagtgtggccttgtgaagcccacaagatagagcccaagagaggagcaaggacgaatcgtgctcgtgagtcgacaagtcaagggatgcgctttaccgacggcgacgcgtacaaaagcggttatcgaagctaccggagatgccactccccgcaccgttccgagttttctccccacccacctccgcggctgccagtcccgccggagcgcagcgcgcgctgctctacggacgccgcgcgccgttcgcgggagcgctcctgtttttcagcatcggcgccgtcagcgctgcggtcgcgttcaggacaggggcaagaggtctcagttccactagaatggagtcagcttcgaccacagtgccatccattgtcgtgtatgtgacagttccaaacagggaagcagggaagaagctgtcacagagcatcatcagcgagaagcttgctgcttgtgtcaatatagtacctggcattgaatccgtgtactggtgggagggaaaggtacaatctgatgctgaagaattactcatcatcaagaccagggaatcacttctggatgccttgactgcacatgtcaaagccaatcatgaatatgatgttcctgaagttattgctctgcccataactggtggtaacaccaagtatttggaatggatcaagaacagcacccgggacaagtgatctctttttttttggagctcgacataatgcgatgatcgaagtgcccatggctccttagctcttccagtggcttgcacacaagggtgtatcctctcttgacctggacatctcaattacgttgctgtaccgaatccatatctaccatcttcaggtaacaagtgatttggtgtcccgtgtgggtaatccaaatgcatgcattgctctgagtattgacaggttggctagtgtaacgtgtaagtccaaaccagatcgtatccaaacatgcgtattgttggtctttgatcgatatttgggccgagttttctgctggtgtgcctgaaactgatgttgcgtcaccgactgttcaattactataacatgttcgctttttacgtgatgattttacccaatggtttgttgatattttc

SEQ ID NO: 6636 - DNA, 965 bp, Zea Mays
gtggccaccagacttcttgccattgccgatcttaaagtcctcagggaggggcagtatgttgtccacacatttgcggaagctgaagtcatccacagatccatcagtcctgcgcacaaagaagcagtgacttttccacaccgggtggttgcctatctcaaatgcttcgactcctgccccaatcttcttagcagggcaagaggtctcagttccactagaatggagtcagcttcgaccacagtgccatccattgtcgtgtatgtgacagttccaaacagggaagcagggaagaagctgtcacagagcatcatcagcgagaagcttgctgcttgtgtcaatatagtacctggcattgaatccgtgtactggtgggagggaaaggtacaatctgatgctgaagaattactcatcatcaagaccagggaatcacttctggatgccttgactgcacatgtcaaagccaatcatgaatatgatgttcctgaagttattgctctgcccataactggtggtaacaccaagtatttggaatggatcaagaacagcacccgggacaagtgatctctttttttttggagctcgacataatgcgatgatcgaagtgcccatggctccttagctcttccagtggcttgcacacaagggtgtatcctctcttgacctggacatctcaattacgttgctgtaccgaatccatatctaccatcttcaggtaacaagtgatttggtgtcccgtgtgggtaatccaaatgcatgcattgctctgagtattgacaggttggctagtgtaacgtgtaagtccaaaccagatcgtatccaaacatgcgtattgttggtctttgatcgatatttgggccgagttttctgctggtgtgcctgaaactgatgttgcgtcaccgactgttcaattactataacatgttcgctttttacgtgatgattttacccaatggtttgttgatattttc

SEQ ID NO: 6637 - DNA, 111 bp, Zea Mays
caagatgcaatgggcagaacattttaacgcacggtggcggcttcgttttggtttggcacgagctcaatggtggaagcattctcctatcatacagcctagcaaatgcatcac

SEQ ID NO: 6638 - DNA, 2600 bp, Zea Mays
gaagaaaatggacggataaccagatctaccgccttggcaaaggaagaaaaagaaaagggaaggagatctaccgctcagcagtagcacatgcacaatgcacaagcagcgggcgggcggctgcgtcgagccgtcgactgactagtgactactcaggcgaacacaagtacacctcacacccaccacccagcccgccgcgcagagcagcgcaggcgccctgcacctccactctgcagctctgctccccctccctctctcccgctcctcctccttttccttctccagctcggccgcctcagcccgcgccgcgatgtcagaggaggacgaggaccagccgccggccaagcgacccagcccgtcgccgcccgcggaccaggtgctcgacaacgtgctcgagacggtgctccagttcctggacgccccgcgggacaggagcgccgcctccctcgtctgccgctcctggcacagcgccgagtccgccacccgcgagtccgtcgccgtccgcaacctcctcgccgtgtcggccacccgcaccgcgcgccgcttccccaacgcgcggagcctcctcctcaagggccgcccgcgcttcgccgacttcaacctcctcccgcacggatgggacgcctccgccttccgcccctgggccgccgccgtcgccgccggggccttccccgcgctcacctcgctctacctcaagcgcatccccgtcaccgacgccgacctggacctcctctcccgctccctcccggcgtcattccgtgacctcaccctgcacctttgcgacggcttcacctcgcgcgggctcgcgtccatcgcctcccattgcaggggcctgcgagtgctcgacgtggtggagtgcgacatggccgaggagcaggaggttgtggactgggtggccgcgtttccgcaggagccctctaacctcgagtcgctctccttcgagtgttacgagccgcctgtggccttcgcggcgctcgaggcgctcgtggagcggtccccgcgcctcagacgcctgggggtcaatctgcacgtctcgctcggccagctgtgccgcctcatggcgcacgcgccgcgcttgtcgcacctgggcaccgggtcgttccggccggcggatggcggcgaggaggggacaggattcggggaggttgtctctgcattcgtggccgctgggcgagcgcgcacgcttgtttccctctccggcttccgtgacctcgcgcaagagtacctgccgaccatcgccgtggtgtgcgcccacttgaagagccttgacttaagctactccgcggtcaccccgaatcagattctgatgttcattgggcaatgctacaaccttgagacactatgggtacttgactcggtgcgcgacgaagggctcgacgccgtgggaatttcctgcaagaagctccagtctcttcgtgtgctcccgttgaatgcacatgaggacgccgacgagttggtgtcagaggtattccggttatgtataatgggacggcaccagccggaccatgcgactggggagcctatggatgaaggattcggtgccatcgttcagaattgcagcaagcttaccaggctatccacgtccgggcaacttactgatcgggcatttgagtacattggcaggcatggcaagtccctgcggacgctctccgtagcatttgctggaaacagtgatgtggcgctgcaatacatcctccagggctgtccaaagctagagaagcttgagataagggactgccctttcggtgacgctggcctcttcgccgggatgcaccatttctacaacatgcggttcgtctggatgtcaggctgcaacctgaccctgcaagggtgcaaggaggtggctcaggtgctgccacggatggtggtggagttgataaatggccagtctgatgagaacgaaaggaatgaaagcgtggacatcttatacatgtatcggtcactcgatggtccaagggaggatgttccaccgttcgtgaagatcctgtgaagctgcgcttctgcggagatggctgggtatcgctatcagtgtagtattcaggctgctgcacttgatatgctggctgagtgcagatcatttaacggaatatatatgtaagttgttgagctgcagatgtggtacatttttatctcttagaaagatttcgaagcactgtactggagcggggcgggcgggggtatcatgtagtaggagttcatcagatgtggtacatttttatctagtaggagttcatcagtgtatccaaagcgttcacggcaggaggactaagtgcagcagagcaggcttcttcgagggggcctcatggctgcctcagttttgtttgctgctctggagggggctctggtttgaggaccatattttctgtgccggtgcaaccaccatgttttccttcaaattttcgaaatgaaacctgtcatatcagactagattagattcattagaacttacccttatgttgttgttgttgcatattttctgtttcattttttctcgctttagaactatatgagatgagatgagaaagacctcctgatctgagctactgtatattgttaaatgccaatgttcctagagtcccaagttgtttgatctgatatctttt

SEQ ID NO: 6639 - DNA, 503 bp, Zea Mays
gcgtggctgggttggcgagtcccaggcagcagccgcagctagcgtcatcgacgacggaagggcgacgggaacacatacgttgcgtttcgatcggcacgtgtttgttggtggcgatcgagagttgctcgcgttcgttgccgcgggggacgacagatcgatgagccgagcgccggcccgaccaccatgcatgccgcgcccgatgcatcaaggttccagcagccgcatgttccacgagacgacctcgcctttaatttgcagaaggcgactcagcgaaaggtcgtagccccatcatgatcgttcggcataggacggacttgggttcaccgacacccacgtcaactgaaaccttttaggcccagtttaagttgagaagaataccacatcagtatgatatattgtagggtcggagtcgttacaagttaagctctagtttcaggggttatgttgtgcaatctctagttgtctcttgtattttgaaaccgaatacatgcccttaaactata

SEQ ID NO: 6640 - DNA, 808 bp, Zea Mays
atggcgccggtggcccaccatgagaagttgagcgtgagggcgatgcccgcgaggccgaagcggagcctggagacgaggagccagcttgcgaggaggtggacgcagagcgcggctgcggcggcggcggcgttggcggagttcctcatctggcactgcaggaagcgctgcagcgggaagaggaaggcgaaggagaagtgcagcgggatgaaccacacgcacaccttccccgccatcgccgccagctccggcggctgccccgtcagcagcagcacgtcctccgcgaagaagtacatgggcagcagcagcaccgcgcacatgaacagcacgatccacgaccgctgcatgtacacgcccatcatgtggaacttcttcgcgccgaacgcctgcccgcacagcgtctccagcgcgctcgccatgcccagctgacatgccagatgcagagtgtagtattaattaattaattaattacccggccatggaataataatcatgattacacacgacggtactgtatgtattactatatatcactactgtgtccacaggtccatgaatgatgcagcggatacatcccagacaattgaagatgagatgtgtgtaaattaaattaaaggggacaagctaagattgtgtaatcggaattcatccggacgtgacagcaacaagtgtcacatatacgagcacggcggccctgagcatgagatgccaaggcgtggagagcgaggattcgatggaagaagaaccaatcactttcgtagcgctctgatacgttctctacgtcgtcgaccattgatggggttggatgcag

SEQ ID NO: 6641 - DNA, 2752 bp, Zea Mays
gaaatctgcccctgtctgatcggttccctgtcttatttgacttagcttatgacaaagacatttctgttaatactgtcttggtttccaattttgagactctctcgtttagaagaaggattattggtaatctgagggtattattggatgagttgatgatttgctgtaatcatgtttccttgtctgatcatgatgacagaattgtgtggggtctaggaagaaaaggtttctctgtgaactctttatacaaaaagaaagtaatggatcaagtttctattccctacaagtttttgtggaaatccaagttgccacagaaaatcaagattttcatgtggttggtggtgagaaataaaattcttactaaagataatttgaagaaaaggaactggaatggttctcttgagtgttgtttttgtggtgttgatgaatccattgataatttattctttcattgtcccattgcgagatatatgtggagagtaattcaagtggctttgaatttggtggtgattccgaaaagtattagcaacctttgtgataactggttaagtaaaccaaaagacaagattgctaatctgattttgtttggctgtggagctatgttttgggcaatttggcgcactagaaatgattggtgctttggtaataaaactatacttgatccttctaacatcatttttcttagctgcttctggctggattcctgggctattcaacagagaaagagggagcaaaaaatggtggtccaaggaagcaagctaatccgaaagatagcaagtgaagcgtttggccgggcgtttgggtggtgcccgagagacaggcgaatttctgggtgatcaatgctggaatatggattctggagttggagatagccttttcttttggttgatgtcttgaatcagggccttttgttttgcgcctgtctgtcgtgatctggttgtaaataagaaagtcttatgctactagtcgcaggtcgaactttatcttctatcctaggccctctacttatctaggttgatagtgtaaggtgtctagatagggatctgacctagttgctatctgtcggatcgtttgatcacgatggatgtcgttgttctaaactttcgtatttcctaatgaaatagtgggcttcgccccttcgtcaaaaaaacatatataagataagatgttgttggagagaaatgagatataaagaagataatcttttagaagagcatgtaaagaaaaatataaaagagggacatagaggatactgcaggaggtagcctaacaattaataaccctgctactactagtttgtttcaaaaaaatatttcctttttattttcaatttatgagtgcaggacaattccacaaacttaaaaaatagatctagaattcacctagatgatccatcgtggaacagctcaccgataaatcaacgattcgtcaaggtgttcaggatacttcagctttatctctatctcacttccacatggtccccacgtgtaagctcttcgtcctctttttcctcctcctttctcatattatcttctcctcatattattttctcctccttccttctttctctagcgaccaaggggtggcgtaaccctggtccttatggccacgatgagggttgatttggtgacaagtagatcaagaggatcagaaaggattaaggaagaaatgaactaatttctccctcaatctacttcaatcccctcgaaatcactggtcaccaaatcagccctgagagtgtaggggcggtgggagcaggccatagaagacgtggccatggaggcgggcgtggcaggccattagggcttgggcttgaccacagacagaaatcgtaatgagtacctcaaacctaaatatgtgacgagttttacctgatataaggatggatataaaatagattttttatccacagatatattaatagacatgaacatgttcctatcgggcagatggatacggatataggtggatactactcattccatgtacccatggacagtggcggacccggttgctatgcttagggtgtgccggaaaaaatgtcaaaaaaagaaacaaaaaatagggatcagtaagactcagaccttgactaccaagttcaaaacatagcacttacacaactatactaactacttttatgtgatttagggtgtgccacaacccatatggaccactcgctaggttcgcccttgcccatgggtaaaaatatagccgcatcatatcactattaccatttaattaaagtccatcttagctaaaataaaatccttctccaaccactgtttgtttaactaaaagttatgtaatatcatatggtttgtaatatcttaagttggactcttgtgtttttttaatattttgagtgattggcatattttaattttagactttttttaacgatacgtgtaacccgacaggtaaaattaccgttgtggatatatgagtatgagtaagattctatatctatgagtagatatggataacccgacaatagactttttttatgaatacatatataaaatgattctatcaaacttatgtgtacctgttgcaattcctaaccatgagaaggtggctacgtggcatgcccttggtcgactagggctagggtacgatcgactggggagggcactacaagcacgcgaggatagcttgtgcactgcagtaaactgatgaatatccgacggtcactctatctccgacggcttcctacgaggccgtcggatattatcttatgtccgacggccaacatggg

SEQ ID NO: 6642 - DNA, 2282 bp, Zea Mays
aaaatgcctaggaggaaaaaaagaaagggcgtgggtggtctccagaggcgtcttcctcctgttcatcctcggcccgcgccgctgtgtccatggtccatgggccgcctccctcgcgctcccccgcacagtacggtcctttgggaggtcgccttcggtcgtggcccagggtgtcacgcgcgacgagtcggcgcgtggtggagggtcgtcttctgctgcttctggctggattcctgggctattcaacagagaaagagggagcaaaaaatggtggtccaaggaagcaagctaatccgaaagatagcaagtgaagcgtttggccgggcgtttgggtggtgcccgagagacaggcgaatttctgggtgatcaatgctggaatatggattctggagttggagatagccttttcttttggttgatgtcttgaatcagggccttttgttttgcgcctgtctgtcgtgatctggttgtaaataagaaagtcttatgctactagtcgcaggtcgaactttatcttctatcctaggccctctacttatctaggttgatagtgtaaggtgtctagatagggatctgacctagttgctatctgtcggatcgtttgatcacgatggatgtcgttgttctaaactttcgtatttcctaatgaaatagtgggcttcgccccttcgtcaaaaaaacatatataagataagatgttgttggagagaaatgagatataaagaagataatcttttagaagagcatgtaaagaaaaatataaaagagggacatagaggatactgcaggaggtagcctaacaattaataaccctgctactactagtttgtttcaaaaaaatatttcctttttattttcaatttatgagtgcaggacaattccacaaacttaaaaaatagatctagaattcacctagatgatccatcgtggaacagctcaccgataaatcaacgattcgtcaaggtgttcaggatacttcagctttatctctatctcacttccacatggtccccacgtgtaagctcttcgtcctctttttcctcctcctttctcatattatcttctcctcatattattttctcctccttccttctttctctagcgaccaaggggtggcgtaaccctggtccttatggccacgatgagggttgatttggtgacaagtagatcaagaggatcagaaaggattaaggaagaaatgaactaatttctccctcaatctacttcaatcccctcgaaatcactggtcaccaaatcagccctgagagtgtaggggcggtgggagcaggccatagaagacgtggccatggaggcgggcgtggcaggccattagggcttgggcttgaccacagacagaaatcgtaatgagtacctcaaacctaaatatgtgacgagttttacctgatataaggatggatataaaatagattttttatccacagatatattaatagacatgaacatgttcctatcgggcagatggatacggatataggtggatactactcattccatgtacccatggacagtggcggacccggttgctatgcttagggtgtgccggaaaaaatgtcaaaaaaagaaacaaaaaatagggatcagtaagactcagaccttgactaccaagttcaaaacatagcacttacacaactatactaactacttttatgtgatttagggtgtgccacaacccatatggaccactcgctaggttcgcccttgcccatgggtaaaaatatagccgcatcatatcactattaccatttaattaaagtccatcttagctaaaataaaatccttctccaaccactgtttgtttaactaaaagttatgtaatatcatatggtttgtaatatcttaagttggactcttgtgtttttttaatattttgagtgattggcatattttaattttagactttttttaacgatacgtgtaacccgacaggtaaaattaccgttgtggatatatgagtatgagtaagattctatatctatgagtagatatggataacccgacaatagactttttttatgaatacatatataaaatgattctatcaaacttatgtgtacctgttgcaattcctaaccatgagaaggtggctacgtggcatgcccttggtcgactagggctagggtacgatcgactggggagggcactacaagcacgcgaggatagcttgtgcactgcagtaaactgatgaatatccgacggtcactctatctccgacggcttcctacgaggccgtcggatattatcttatgtccgacggccaacatggg

SEQ ID NO: 6643 - DNA, 2657 bp, Zea Mays
aaaatgcctaggaggaaaaaaagaaagggcgtgggtggtctccagaggcgtcttcctcctgttcatcctcggcccgcgccgctgtgtccatggtccatgggccgcctccctcgcgctcccccgcacagtacggtcctttgggaggtcgccttcggtcgtggcccagggtgtcacgcgcgacgagtcggcgcgtggtggagggtcgtcttctggtaagagtctagggttttcgcccaatttcgttggttcgcattcatttccccatttcgcgtcgcgtctctcttgtctttggtctctcccgttctcgtcgcgttctagcttcagcggtggttggttttcttctccttttcgaccgcccgaggttgtcgaggagtggcccctcccgggtcgctctgctgctccgcatcagatggatccgaagaatcgtaaccctaactaggaccaatggggtcctaaagctgcccctcaggggtcgcaatcttggggaaagaaccggagtcttagctggcgcttgaagccgggtactggaaaacccgagcacaaggatgacattcttacctcttcttccgatgatggcggtcagtcagctgcttctggctggattcctgggctattcaacagagaaagagggagcaaaaaatggtggtccaaggaagcaagctaatccgaaagatagcaagtgaagcgtttggccgggcgtttgggtggtgcccgagagacaggcgaatttctgggtgatcaatgctggaatatggattctggagttggagatagccttttcttttggttgatgtcttgaatcagggccttttgttttgcgcctgtctgtcgtgatctggttgtaaataagaaagtcttatgctactagtcgcaggtcgaactttatcttctatcctaggccctctacttatctaggttgatagtgtaaggtgtctagatagggatctgacctagttgctatctgtcggatcgtttgatcacgatggatgtcgttgttctaaactttcgtatttcctaatgaaatagtgggcttcgccccttcgtcaaaaaaacatatataagataagatgttgttggagagaaatgagatataaagaagataatcttttagaagagcatgtaaagaaaaatataaaagagggacatagaggatactgcaggaggtagcctaacaattaataaccctgctactactagtttgtttcaaaaaaatatttcctttttattttcaatttatgagtgcaggacaattccacaaacttaaaaaatagatctagaattcacctagatgatccatcgtggaacagctcaccgataaatcaacgattcgtcaaggtgttcaggatacttcagctttatctctatctcacttccacatggtccccacgtgtaagctcttcgtcctctttttcctcctcctttctcatattatcttctcctcatattattttctcctccttccttctttctctagcgaccaaggggtggcgtaaccctggtccttatggccacgatgagggttgatttggtgacaagtagatcaagaggatcagaaaggattaaggaagaaatgaactaatttctccctcaatctacttcaatcccctcgaaatcactggtcaccaaatcagccctgagagtgtaggggcggtgggagcaggccatagaagacgtggccatggaggcgggcgtggcaggccattagggcttgggcttgaccacagacagaaatcgtaatgagtacctcaaacctaaatatgtgacgagttttacctgatataaggatggatataaaatagattttttatccacagatatattaatagacatgaacatgttcctatcgggcagatggatacggatataggtggatactactcattccatgtacccatggacagtggcggacccggttgctatgcttagggtgtgccggaaaaaatgtcaaaaaaagaaacaaaaaatagggatcagtaagactcagaccttgactaccaagttcaaaacatagcacttacacaactatactaactacttttatgtgatttagggtgtgccacaacccatatggaccactcgctaggttcgcccttgcccatgggtaaaaatatagccgcatcatatcactattaccatttaattaaagtccatcttagctaaaataaaatccttctccaaccactgtttgtttaactaaaagttatgtaatatcatatggtttgtaatatcttaagttggactcttgtgtttttttaatattttgagtgattggcatattttaattttagactttttttaacgatacgtgtaacccgacaggtaaaattaccgttgtggatatatgagtatgagtaagattctatatctatgagtagatatggataacccgacaatagactttttttatgaatacatatataaaatgattctatcaaacttatgtgtacctgttgcaattcctaaccatgagaaggtggctacgtggcatgcccttggtcgactagggctagggtacgatcgactggggagggcactacaagcacgcgaggatagcttgtgcactgcagtaaactgatgaatatccgacggtcactctatctccgacggcttcctacgaggccgtcggatattatcttatgtccgacggccaacatggg

SEQ ID NO: 6644 - DNA, 4952 bp, Zea Mays
aaaatgcctaggaggaaaaaaagaaagggcgtgggtggtctccagaggcgtcttcctcctgttcatcctcggcccgcgccgctgtgtccatggtccatgggccgcctccctcgcgctcccccgcacagtacggtcctttgggaggtcgccttcggtcgtggcccagggtgtcacgcgcgacgagtcggcgcgtggtggagggtcgtcttctggtaagagtctagggttttcgcccaatttcgttggttcgcattcatttccccatttcgcgtcgcgtctctcttgtctttggtctctcccgttctcgtcgcgttctagcttcagcggtggttggttttcttctccttttcgaccgcccgaggttgtcgaggagtggcccctcccgggtcgctctgctgctccgcatcagatggatccgaagaatcgtaaccctaactaggaccaatggggtcctaaagctgcccctcaggggtcgcaatcttggggaaagaaccggagtcttagctggcgcttgaagccgggtactggaaaacccgagcacaaggatgacattcttacctcttcttccgatgatggcggtcagtcaggtattctcaaaacccccctcctcccattctgaaaaaagagaatgaaatggtgcgtcgtgttttctgccaaaaatgtggtacggatgggcatcatgctagggaatgtttcaaatctttatagtgcgagatctgtcgcaaagaaactcacaataccgtgcagtgcgttctccccaaacaaaacaagccctgcatgcctattgttgggatggcggcggatgggttagggttttactcttcccacttttccaaacctctgtcgaaaaaaactaaacgcggttttattggtttggttaaagttgttgagggcttgatctcggctgaggatattgagaaggattttggtttccatttcccctggggtcgtacttggaaagccaccaagtgtcactctggtttcctaatgcaattcccttctcaagagaggctggatgaaatgatcaatttccctgaattgaaaatgaaattgtctggtgcaaaaatctctgtttcgtcttggagttcacaggctaagccaaaatccaaactccactctgtttggattgttgctgaaaatgtgcctgaagaacttcagaattaccaggctatctttgagttgggatctacaattagggctgttgaagaagtggacattttgtctttagattctaaagatattgtgagattcaaagttcatgtcaaaagtgttgccatgattcccccaatcattaaagttggtgtcaaaccttttctgtatgacatctactttaaaattgacaatattactgatgaagggtggaatgatgactccataaatctgggcaagagggcttctgttgatagacagggttttggtgacccctcttttgagaaatttgttaaaaaagccaaaagtggtggtgaaaaatctagcatggatgataagggaaaatctcccttagaggatccctcaactcatggtaatgaagctgattttcagtctgaacattcagatggtatgaagtctgggaaaaattctgaatgtgtcaaaggatatcttgacagtcagtgatgaggatgatgattacaatgaaagtgaggctgatctgttggattcccaagatctggaggaattcatcaaggatgaagaacttattccttcccctcctcaagagaaaggaaaaatgaatataaatgcttctcataccgaagatgctggtaaggaagctggagctaagaaaggaggatccatggaaggggagcttgcagaaggcgttcggaggagcagcaggttggagtctaacgatgaaatgaagattgcagataaggctacagcaagagcaatggctaaagacgcgttcattaacaaaggtacgtcgtacaatccattttctgttcttaatactgataatgctgttcttatggatgttgcgcacaaaataggggttgaattaggttcttctgttaatgatgctgtggaaaatttaaacctgattaaatctttagagctttctagaaaaaatctggtagtgcaatctgttaaatgtaatgttgataattccaaggcagccattattgaatctgagatggataatagtatccataatgaaggagaggataatgctttgactgatcttgaaaatgtgatggttctcagaaaaggccgtaaaattcgccacaggaaaaaatctgtgaggaagaaaaaaaggacaataaacctcccaaaaataggaatatccctattaagtggagaggtctgaatgaggggcttacccaaagttgttcagaatgataggcttaatttggaactgtcagggcctgggtaaagatgtgaaaagtgatttcctaagagatattatcaggaaagagagaattgattttattggtttgcaagaaaccaacaagaaaaactttgatgactcttggttgaacttcattggtggcaataggaattttgcttgggtttggtccccccctaatgggaggtctggtggcttactcgtagggtttgatgctgacatctttgatgtgagagaaaaagaattgggagaatttatgattcgtattctggtgattcaaaaggaatcagaatttatttggaatttcattaacgtttatggggctgctcaaaatgaccaaaaacagaaatttctgagtgagttgtccgctttatgctccaaatgctctcatcccatgttgattggtggtgactttaacattcttagaaagaaatcagataaaacaaacctggtggcaccaataggtggagttctttatttaattctattattgatgtgcatgatctgattgaattggagcttagtggtaggctttatacctggtctaataatagaaatccccctacatatgaaaagttggatagatttcttgttagcccggagtgcgatttacattataataatgtgaatgtttctggtcttagtagatctttttctgatcatgtgcctttatgtctcaaaactgattttgctcccccttcagtgagagattttagatatgagttgtgttggatgtttagacctgattttagaaatctggttgagaaaaattgggagttgcctgtcagaggtaaaaagagtattgaaatttggaaagaaaaaacaaagcgtctcaagaaaatgttgaaaggttggaatataaatgttgaaggtagatatttgaaactgaatagagatttgatgagtaaaattgacattttagattaaaaaatgtgaagttatgggcatttcagatgctgaaagaattgaaaaactcgatttggattggaatttgaaaaaaattatggaagaagggtgcaaaaaaagcaaactgtgagagagagattcattaatgagggtgatgagaatactaaattctttcaccttattgcgaaagatcggaaacaacatgttaaaattccttttttgattcatgacggtgcctctgtgaatgattctaaaagtatcaataagattgcgtcttcttattataaagatctttttggcccttctattcattctagtattaatgtttctaatctcaatatgaatcagttgtctgacactgacagatcacttctaacggctccttttaccattaatgaaattaaaaaagtggtgtttgagatgaagcataatagtgctcctggtccggatggttttcctgcggaattttttcaaaatttttgggagctgattcaaatggatgtttggaacttattcaaggacttttatgatggaaatcttgatattgaaagattgaattatgggatggttattcttttacctaaagtggataatgcagttgacattaaaaacttcagacctatctgtcttttgaatgtttgttataaaattatcaccaaagttctaaacaacaggctggctagttgcatcacaactgtgattagtgactcacagtatggtttcattaaaaacagatacataatggacgaggtcgtctctcttaatgaaattcttcatgtggttaagatgaaaaatcaaagtggtgtgttccttaaaattgattttgaaaaagcttatgacaaagtgaattggcatttcctttatgtcatgatggaaaaaggttttgggagtacttggtgtgattgggtgatgagaactgtgcgaggtggcaaagtagccataaaaagtaatgatatgttggggccttacttcactactcacaaaggggttagacaaggggatcttttctctccccttttgtttaatttggtagctgatggcttggcatgtatgattcataaagcacaagatgaggacctgattgagggtcttattccccatatcatccaaaacggatgcagttgcctccaatatgctgatgatactatcttcctcatccaagattgtttagaaggtgcccaaaatcttaaattcattttgtgtttgtttgaaagcatgtcagggttgaaaataaacttccacaaaagtgaaatcttttgcttttggaaaagctaaggaaattgattatctgtatgctgatatcttcacctgtcctattggttgtctccctatgaaatatcttggtgtgccaattgataataagaagataaataaaagcctctgggttcccatgattgaaaaattggaaaaggcttgctgggtggcagggtagatttttgagtctgggtggtaggctaactcttttaaatagctgcttatccaatattccgttgtatatgctttcgatttaccctgttcctaaatcggttgtcagaaaagtggatattcttaggaggcgtcttttatggcaaggggggcatcagtccaaaaaatttcatttggttgattggatatttgtgtgttctcccaaaagtcagggaggtttgggagttttgaaccttgattttatgaatgattccttactaactaaatggctttggaatat

SEQ ID NO: 6645 - DNA, 4282 bp, Zea Mays
ctccagaggcgtcttcctcctgttcatcctcggcccgcgccgctgtgtccatggtccatgggccgcctccctcgcgctcccccgcacagtacggtcctttgggaggtcgccttcggtcgtggcccagggtgtcacgcgcgacgagtcggcgcgtggtggagggtcgtcttctgctgcccctcaggggtcgcaatcttggggaaagaaccggagtcttagctggcgcttgaagccgggtactggaaaacccgagcacaaggatgacattcttacctcttcttccgatgatggcggtcagtcaggtattctcaaaacccccctcctcccattctgaaaaaagagaatgaaatggtgcgtcgtgttttctgccaaaaatgtggtacggatgggcatcatgctagggaatgtttcaaatctttatagtgcgagatctgtcgcaaagaaactcacaataccgtgcagtgcgttctccccaaacaaaacaagccctgcatgcctattgttgggatggcggcggatgggttagggttttactcttcccacttttccaaacctctgtcgaaaaaaactaaacgcggttttattggtttggttaaagttgttgagggcttgatctcggctgaggatattgagaaggattttggtttccatttcccctggggtcgtacttggaaagccaccaagtgtcactctggtttcctaatgcaattcccttctcaagagaggctggatgaaatgatcaatttccctgaattgaaaatgaaattgtctggtgcaaaaatctctgtttcgtcttggagttcacaggctaagccaaaatccaaactccactctgtttggattgttgctgaaaatgtgcctgaagaacttcagaattaccaggctatctttgagttgggatctacaattagggctgttgaagaagtggacattttgtctttagattctaaagatattgtgagattcaaagttcatgtcaaaagtgttgccatgattcccccaatcattaaagttggtgtcaaaccttttctgtatgacatctactttaaaattgacaatattactgatgaagggtggaatgatgactccataaatctgggcaagagggcttctgttgatagacagggttttggtgacccctcttttgagaaatttgttaaaaaagccaaaagtggtggtgaaaaatctagcatggatgataagggaaaatctcccttagaggatccctcaactcatggtaatgaagctgattttcagtctgaacattcagatggtatgaagtctgggaaaaattctgaatgtgtcaaaggatatcttgacagtcagtgatgaggatgatgattacaatgaaagtgaggctgatctgttggattcccaagatctggaggaattcatcaaggatgaagaacttattccttcccctcctcaagagaaaggaaaaatgaatataaatgcttctcataccgaagatgctggtaaggaagctggagctaagaaaggaggatccatggaaggggagcttgcagaaggcgttcggaggagcagcaggttggagtctaacgatgaaatgaagattgcagataaggctacagcaagagcaatggctaaagacgcgttcattaacaaaggtacgtcgtacaatccattttctgttcttaatactgataatgctgttcttatggatgttgcgcacaaaataggggttgaattaggttcttctgttaatgatgctgtggaaaatttaaacctgattaaatctttagagctttctagaaaaaatctggtagtgcaatctgttaaatgtaatgttgataattccaaggcagccattattgaatctgagatggataatagtatccataatgaaggagaggataatgctttgactgatcttgaaaatgtgatggttctcagaaaaggccgtaaaattcgccacaggaaaaaatctgtgaggaagaaaaaaaggacaataaacctcccaaaaataggaatatccctattaagtggagaggtctgaatgaggggcttacccaaagttgttcagaatgataggcttaatttggaactgtcagggcctgggtaaagatgtgaaaagtgatttcctaagagatattatcaggaaagagagaattgattttattggtttgcaagaaaccaacaagaaaaactttgatgactcttggttgaacttcattggtggcaataggaattttgcttgggtttggtccccccctaatgggaggtctggtggcttactcgtagggtttgatgctgacatctttgatgtgagagaaaaagaattgggagaatttatgattcgtattctggtgattcaaaaggaatcagaatttatttggaatttcattaacgtttatggggctgctcaaaatgaccaaaaacagaaatttctgagtgagttgtccgctttatgctccaaatgctctcatcccatgttgattggtggtgactttaacattcttagaaagaaatcagataaaacaaacctggtggcaccaataggtggagttctttatttaattctattattgatgtgcatgatctgattgaattggagcttagtggtaggctttatacctggtctaataatagaaatccccctacatatgaaaagttggatagatttcttgttagcccggagtgcgatttacattataataatgtgaatgtttctggtcttagtagatctttttctgatcatgtgcctttatgtctcaaaactgattttgctcccccttcagtgagagattttagatatgagttgtgttggatgtttagacctgattttagaaatctggttgagaaaaattgggagttgcctgtcagaggtaaaaagagtattgaaatttggaaagaaaaaacaaagcgtctcaagaaaatgttgaaaggttggaatataaatgttgaaggtagatatttgaaactgaatagagatttgatgagtaaaattgacattttagattaaaaaatgtgaagttatgggcatttcagatgctgaaagaattgaaaaactcgatttggattggaatttgaaaaaaattatggaagaagggtgcaaaaaaagcaaactgtgagagagagattcattaatgagggtgatgagaatactaaattctttcaccttattgcgaaagatcggaaacaacatgttaaaattccttttttgattcatgacggtgcctctgtgaatgattctaaaagtatcaataagattgcgtcttcttattataaagatctttttggcccttctattcattctagtattaatgtttctaatctcaatatgaatcagttgtctgacactgacagatcacttctaacggctccttttaccattaatgaaattaaaaaagtggtgtttgagatgaagcataatagtgctcctggtccggatggttttcctgcggaattttttcaaaatttttgggagctgattcaaatggatgtttggaacttattcaaggacttttatgatggaaatcttgatattgaaagattgaattatgggatggttattcttttacctaaagtggataatgcagttgacattaaaaacttcagacctatctgtcttttgaatgtttgttataaaattatcaccaaagttctaaacaacaggctggctagttgcatcacaactgtgattagtgactcacagtatggtttcattaaaaacagatacataatggacgaggtcgtctctcttaatgaaattcttcatgtggttaagatgaaaaatcaaagtggtgtgttccttaaaattgattttgaaaaagcttatgacaaagtgaattggcatttcctttatgtcatgatggaaaaaggttttgggagtacttggtgtgattgggtgatgagaactgtgcgaggtggcaaagtagccataaaaagtaatgatatgttggggccttacttcactactcacaaaggggttagacaaggggatcttttctctccccttttgtttaatttggtagctgatggcttggcatgtatgattcataaagcacaagatgaggacctgattgagggtcttattccccatatcatccaaaacggatgcagttgcctccaatatgctgatgatactatcttcctcatccaagattgtttagaaggtgcccaaaatcttaaattcattttgtgtttgtttgaaagcatgtcagggttgaaaataaacttccacaaaagtgaaatcttttgcttttggaaaagctaaggaaattgattatctgtatgctgatatcttcacctgtcctattgg

SEQ ID NO: 6646 - DNA, 850 bp, Zea Mays
aagaaaacaagaagaaaagaaacggatggctactttgagggcgacggtgggcatgctgctcggcggcgaggacatgcacaggttcccggggcgctccccgcggatggaccgcggcgacctcatccgcagtcccgccgcgcggcagatcgtgtccaactacttcaggtacccagagcacgcgccgccattattggcacccctgctccgctcgttctttttcgtttccactagccgtccaataatgttgccccgccatcgatggaccgagcagcatgttcgggccggtgcaggacgtgtgcatcccgtaccagcagaagcgcatgttcggcttcgtcaccttcgtgtacgccgagacggtgaaggccatcctgagcaagggcaacccgcacttcgtgtgcgacgcgcgcgtgctcgtcaagccctacaaggagaagggcaaggtccccggcaggttcaggaagctgcagcacgcgcaccatggtggagccgagttcgccggttgtgcgtcgcccactggattgctggattccagggacccctacgccctcctgcttctttcatgtgcccagaatttctccaggttttctcctgggcatgaagccattgggctatgatgtgtgaggtgcacagagcaaaaaaagggggaggggggccctccattcctctaatctgggagtaagtgtcaacaacagccctccttgtgcctgtctttctgatagtgttgtaaccattaataataagctagctgctgctcccatgaccatgatgcatgtatatgccagcatagatcctgaatcatgatggtcataatctgtgtgttgacgggctgttgtgcgcagggaaatactaa

SEQ ID NO: 6647 - DNA, 1710 bp, Zea Mays
cctaatcgcggagcggcggatcaacccaaatggctcctcctacggaaaacaccgctgtcaaggaagaagaaaaagatgaaagaaagggaacgggagacgagacttgtaactgtagaggacgaagcccttagctctgggcattatatatacatatccactcctgctctggtctctcgcaaccaccgtgcgcgcatcaactcggcacaaccgcggccgtgtgcagggccgccggcgagccgctggccatcgaggaggtcgtcgttgacacgcccaaggcgcacgaggtcaggatacggatcatctgcacgtcgctctgccacagcgacgtcacgttctggcgcatgaaggatctccctgacaatatccccagaatatttggccacgaagccttcggggtggtggagagcgtgggtgaacaggtggacgagttcgcggcgggcgacgcggtggtgccgacgttcctggggcagtgcagcgagtgcgtggactgcaggtcggcgcgaagcaacatgtgctccaagtaccggttcgcggtgcgcccggggatgccgcgcgacggcaccacccggttcaccgacggccaggggcgcccgctgcaccacttcttcggcgtgtccagcttcgccgagtacaccgtggtggacgtgaaccaggtcgtcaagctcaaccccgccgtgccgccggcactcgcctgcctgctcagctgcggcgcctccacgggggtcggagccgcatggaagcaggcgaaagttgagcctggatcttcggtcgctatcttcggcctcggcgctgtaggattggcggtggctgaaggagccaggatttgtggggcgtcgaagataatcggcgtggatataaaccctgagaaatgcgagcttggaaagaagttcggcgtgacacatttcatcaatcccaaagagctcggtgaggagaaacctgtccaccaggcgatcgccgagatgaccgacggtggcgcggactactgcttcgagtgcattggactggcggcgctgatgaacgacgcgttccggagctcccgagacgggtggggcaagacgatcattcttggggtggaaatgcacggtgcccccctctgcatctctcctcacgagatcctccacgggaagtctgtcatcgggtccatgttcggcggggtgaagcctaagcaggatatccccattctcgccgacaagtacatgaacaaggagctggagcttgacaagttcataacccatgaagttggcctcaaggacatcaaccaagcttttgacctcctgctgcaagggaagagtctcaggtgcaccatatggatggacaagtgatgcaataaccagagttacgcatcggaacctgaagatgctatgatgcttccacctcgtttcagtgaaaataattgtttcatcagctgccaaaagaaatgttatatgtatcttaaattcgagttttccattccttttcttcacgtcatcactcaaacatgttaaaatgtgcccatgttttgatttttactgctttcaaaagttgtgactatccttatcttattagtgatattttcggaatttatctggcggaagtaggactgaaattaagcaggtgctatcgtgctagtgtaacaaaaatatagcatatatgtagcacatgagtagcaagaaaacattatgtaatatatcattgaggtgctacttgttagccatggacaataatgtgagt

SEQ ID NO: 6648 - DNA, 376 bp, Zea Mays
ttagcctacaacgacggaaaggaagttggcaccttcaagggtcctcaaacattgctgcaccggacgttgtgtcgtgtatcattggttcaaaacgtgaaacgttccaagttgctacattattatcgctgatccaaaatgaaacatgttattccaaacatcataaagaagaggaaacaaatcagtacatgttgcgccccatcgtctgtacctcctgtggaagctcgtcgcatacgtagacaattgttgaatgagcgaaggttaacatcctcaggtgcattcgcatcctctcaacaggcctcaacattacaatgtggtcacttcgacccagattttgttgaagcactcaaaggtacgtctaattctggatgtaacccat

SEQ ID NO: 6649 - DNA, 366 bp, Zea Mays
ttagcctacaacgacggaaaggaagttggcaccttcaagggtcctcaaacattgctgcaccggacgttgtgtcgtgtatcattggttcaaaacgtgaaacgttccaagttgctacattattatcgctgatccaaaatgaaacatgttattccaaacatcataaagaagaggatacatgttgcgccccatcgtctgtacctcctgtggaagctcgtcgcatacgtagacaattgttgaatgagcgaaggttaacatcctcaggtgcattcgcatcctctcaacaggcctcaacattacaatgtggtcacttcgacccagattttgttgaagcactcaaaggtacgtctaattctggatgtaacccat

SEQ ID NO: 6650 - DNA, 740 bp, Zea Mays
gttggaggctgtgctcgacgtctttcggggagcgcatgttcgtcttcgaccaaaggtacagagccgtgactagtgcttattatagaggcgcactgggagctttgctggtctacgacatcaccagacggcagagcttcgatcacataccccgctggctagatgagctccgagcccatgctgacaagaacattgtgataatgctggttggcaacaagagcgatctcgaggagcagcgggccgtgagcactgaagacgccaaggagtttgccgagaaggagaacctcttcttcttggagacctctgcgctccaggcaacaaatgtggagagttcttttcagaccgtcttgacagagatcttcaaaatccacagcaagaagaacatggtgtcggagccaaagagcaacggagccgcgccagcaatgccggggacgaaggtcctcgtcccaggtccggcgcaggaaatcccgaagagcaagtgctgcagttccatgtgacgcttctgcgtttggtgctgggtgtgtcgaaaatattcacgaaatattgttttttttttgctgtaaatccctgctgttatgcttggatttttggaggggttgtgttggaacaccggtgtatttttagatatttgacacaactgtgacacgagggaaggatgtgctgatgtgtattggttctcttgttctctaattgatatgttttatccctgctgcaaatatctgtagcactgattgtttttgaga

SEQ ID NO: 6651 - DNA, 3530 bp, Zea Mays
cggacacttcacagttcacacttctcatctcccatcccatcggctctgcttgccagttccgcggtgagagcccaccacttctgcgtctcaaggggcagaggttgtacggatcgctctggccttcgccgccggttggctcatcaaccaccgcgcgggcacgggcgcacgacgcaggtgccattccggtctccggctctctcctccggaagcgctctctcccagaacagaacgcctacctagttacctactctctcggcaacgtttccaaaagttcgttgaggcatcaaagaattgcctgcctgcgccgtgcgacggcgcggccgggatgggcaagatgagctgcttctccggtctgctcagctgcaagaagaaggcattggagggtaagaacaagggcgcttacgccaagaaggctagcggcaatgattgccccaaggtgaagccggtggaattcatggacatggtggtggcggacgctgttgtcgacgacgtcagcaggtgccgagacagcgttccagcgtctgcatgcagcagtaggcttgtcgctcacgcagccgccgagctggcacgccatgccactggcgagaacggcgacaaggccgcagctaagagggactcgtcctccgccgctggctcctcctcctccggttacagcagcgacggaacaggcgacgatgccaagagcgccgagccggacgacggcgaaccctgcagcctcggccgcatgtcgccgacggcggcatcgccaaagctgatgcgctcctgctccaacatcgagacgacgagatctgtcctgacagggtccgacctgccggcgaagtcacgctcctacgacgacctgaagacgctgccctcccacggaagctcgagcgcccgcagcggcggcgcggtgcgcgcgagcccgacgccggcgtcctccaggacctcgtgctccgctgaccgcgtcatgctgaagaagcggtcgtcgaggcaggtgctcccgtcgcggagccggaagctgtggtggcagctgttcctctggagccaccgcaacgtgcaccgtcgtcggggcgcgagcgcgcccacgcccacgacgctgctgtggccatcgccggggagagaaggcggcggcgccgcgcaccggcgcgacgggtacgcgtccgacacgctgggcacggccactgcggacgacgccaaggagaagggcgtcgccgtggaggaggagggcccccgcgtcccgacccagtgggtggcgttctccgccgaggcctcgccgctggaccgggtcagcgcgtgggtgaacagcctcgggaacggctcgttccacgccgtcgacgaggacggtggcgccacggggcacggcggcgacggcgcctcgcgcctgcgcccgcgaccgcgtcgctctgagattgtggagctgccaacgtcggcggccggcggcaggaggcatccgcagccgcaggcgaggcggcgcgcggcggcggcggcggccgaggctggccaggcgagcggcatcatcgtgcagacgctcaacaccttctcctccgtcgcgcacatcgccggcatggggctccaggccgtcccggcgatcgcggccttctcgaccctccgggccgtcaatctgtctggaaacgtgatcgttcgaatcaccgctggatcgttgcctaagggcctgcactcgctggacctgtcgaggaacaagatcgcaatcatcgaggggctgcgggacctgacgaggctgcgggtgctcaacctcagctacaaccggatctcacggatcgggcacggtaagcaaccatgcatgcatgcccttgtcctggccatgcgacaccactgtttacttctctactgtactgactactactaccagttcggccggcactcccgtgctctgaatacttgccaggcccaggcaggcgagagcacagtgccgagcatgcttggagctatttgcaccgcacgaatattgtccagtgcagcagtaatgtgtgacaccctggatgtttggcatttagagatcttcgtcaggtcctctggtcgagctagcatggtccatgcctgctgtgtttagctcgtcgtgactgaacaggctcaggatttcatttcatttcatatgtatgcggcgtctggatgtggtactggtaaccagaacgccattacgcacgcccgtcgccagcacatgcatgcttcagatatctgacgcggacatttcgcatactactgcctgccttcgatgcccgtgacacgcttcggcgcatcccatgttagtcatgtttggtggtgcagtgcagtggatgttcagaagcatagcatggctgtatgccacgtccatcagctggtccagccgtcagcattgctgtacaggtacagcgcggaacggatgtgggattaacatgtggtttctgcttgctctggttcaggcctgtccagctgcacggcgatcagggagctgtacctggccgggaacaagatcggcgacgtggaggggctgcaccgcctgctcaagctggccgtcctggacgtgagcttcaacaagatcggcacggccaagtccctgggccagctcgtggccaactacggctcgctgcgggcgatcaacctgctgggcaacccggtgcaggccaacgccggcgacgacacgctgcgcagggccgtgtcgggcctgctcccgcggatcgagtacctcaacaagcaggccgtcaagccgcagcgcgcgcgggaggtggccaaggacagcgtcgcgcaggcggcgctcgggaacgccgccggcgccaactcgcgcaggcggccggcgcggcgcctcggccagagccccgccgggtcgtcggccgccaagggccgcaggggcagcaggggcaggtctgtcaccaggccccagagctccagcttgccattgccaaggagatgatgaggcgagcgaaacgtgacgtttcggcctgaagaagaaaaaccccatgcgcttacattgcatgaaaggaaagccctcacgatgcccagcccagcccagctaatacccacgattggtcatgtcatttgtagttgtagattgcagcctagtggagtagtgggcctgcagtccgcagctatgggtaataataataatacggaggtgacaagatccactgcaagcagagaagtttgagtggcgagcgattgtctgaatccaatgaaaaataacttataatattaccttcgttgacaccgttgaattttttcggaaactttaatcactcgttttattcaaaaatataaaattttaaatcaaacataaactaccttaattgataaaataaatcacaaaaaaataaatagtaactcattatcttttgaataagacgagtgataattttttttaaaaaaaaacaacggtgtcatatatttatgaagcgagggacaagttgctaaggagatcatcacgaggaagataacttctagaaagccttgaatttgggcatgagaaaaagaagttcacccccttttccgtgcctttctccattgttcatgtctccacaagagtccgtattcaagcgtgcaattgtgcataatggaag

SEQ ID NO: 6652 - DNA, 2006 bp, Zea Mays
agaacacaaccaaagcatctagtttcgtccctgcttcctgcctacagcgtcgtgcgtatgatacttcttcctaatcattcgcgtgcaccgacaaacaagagagcaggtctccaaaactattgcccccagagatcttgtatcaggagagggtaaataaagtttttgggaagcactctacatggatgctcgatcacttcattgccgtcttcaatctcattgccatggctcatctgtcgccttgtcacgtggacgtttcatgtcgtcggtaacaatgagatggtgttaggcgtcaagttgtcttctctacccgatcgtcggcaaggaacaaacgtataactatctccctttcatcatgtattaaatattgtttaatttaatttgtttagatcagtgcaagttttaatcttagttatctttgtaaagacaattcattatgtaataaatttgtgccattggattctataaactgagtcattatatgtgtgaaatctaattttgacacacatatgagatacatctggatttttccttaaattcgtgtgtgacaataggactgacaattctagatcacttcaaccgcaataacaactcaaaggatgtttaactcaatacttttgaaggttcattcaaatcaaagcgcaagtacccgatgtacaagatgacgtggccatcatagcaacaatcaaaaggtttcatatgggacaaatgcacatcacactttgctcgagaaccaacaagcaacaatataagaactttatgaagtcatgcaaaaacttctgcaagtcaaacatggaccatagaaaaatagtcgaagaagaagctaacttctaaactcaagccaaaagtggtaacaattacaaccaatccaaaactagcaactttgagtgaaggcctctaccttcgtatcaccaactaaaccaaatagacaatcaactactggcgagagcaaccactaagagagaactcattatagtgaaacaacattcaatagaggagggacaaaccacaaaggacagagaggaggtagaattggtggggggtgaaagggaaatgtgcctttgggccatttctaagtattttggtgatttagtgtccaacacaagtgcctaagtgttgatctatgcaaagtggtggacaaagagcaaatcaagtcaaaaggtatgtttctagacttagtacattgttttatggactgatgtattgtgtctaagtgctggaaacaggagaaatcaaattgaaaaagagatggctttattcagccaaagtcagctctgtctgggtgcaccggactgtccggtggcgcaccggacagtgtccggtgcgccaggctggctcaggcgaacttgctgctctcgggaagtaattaacggcgtacggctaaaattcaccggactgtccggtatgcaccggactgtccggtgagccaacggtcggccgcgcgatccgcgcgagacacgtggccgagccaacggtcagaagggggcaccggactgtccggtgtgcaccggacagtgtccggtgcgccaacggctccaaagtgccaacggtcggcttcgctaaagaaggaaagaaatccgcaccggacagtgtccggtggcgcactggactgtccggtgcgccaggcgacagaaggcaagaattgccttcctggaatgctctcaacggctcctagctgccttggggctataaaagggacccctaggcgcatggaagaaagcaccaagcaacctttgagcattgttgatcattcacacttcactcttgcgcactaattcgacattcttagtgatttgagctctgttctagtgagaaccttgagatattgttttgagctcaagttttgatcgtgtgtgcgcgtatttgctgtggttttgagtgtgttgcttccctcccttactcttgtgcttcatattgattcttattgtaagggcgagagactccaagttgtggagattcctcgcaaacgggaaaagagcaaagtaaaaagaacactgatgaggacatcc

SEQ ID NO: 6653 - DNA, 2197 bp, Zea Mays
cactggcgtaaacgcgcgcctcgcagccccaaagcaagaacaactttggttagtttaactgccgcatctaccattcgtccattccaccccccatctgccctcaccagagcttccccttcctcactgtggtggcttggtgggggggatccgcgcctcccccatcgctggccagctcatggcgccccccgccgccggaggatctccaatgcgccgtgaacgtcaagtgcgccgcgccgccggcgctggccgcgggggacggcgagctccggtggctgcggcggtgcgtggaggcggcagcgaagggcttcgccatcggcgcaggcctcaagggcggcctcgcgctcttctccgtcctcgtccgcatccgcagccgccgctcccccagatcgaggaaggccggagctatgaccaacgaggaggccgtggtgctcgcggtcaaggagactgtgaggtatggcttgttcttggggacctttgccggcagctacgtctccgtcgatgagtacatcgccgccgtctggggacgtaagagcaaggtggaggtcatttttagctgggttgattgctggtccttctatgctcctgacaggaccaggaactcagcatactagcttggctatatacattctgatgcgtgcagcagtgcttgcatcccgttgtggaataaagagcaagcgttttggaaagatctgtaaacctttgacttggtcacatggtgatgtcttccttatgtgcctctcatctgcacaaattttgtcagcatacattttaaagcaggacagtttgccatcatcatataaatcatttctaaacaagcatggtggaaaagatcttactattttgcaaggtgtgaaggatgtagtcaaccacactgctttcagtaacttagtgggtatcgagaagtactacaaatctgttggtgttgacataaagctagatccaaacatgaaagtgccttgctcaattgtgcatggtaaccagtcatgtacaggacatgtcttttcattcttgttacaagcatatggaagagcagttcctgtatatgttccagtctacttagtccctgcacttgtagttcataggcagcatctcatgaaaaggccttactcaattatagggaagagttttctaggagtagcaagatctagtctgtttctctcagtatactgtgcatctgcatgggcttggacctgcctgctttttaggatcttccggagagccaatacccctcttgtcatccttggcacgtttccaacaggtctggctttgctcatcgagaagaagagcaggaggattgagatatccctgtactgtcttgccagagctatcgagagttttttcacatggatgaccgatgcaggactctgccctccaatacttcagataaagcgagctgatgtggttgtgttcagcatagctacctctatcattatgcactgctatgcgcaggaaagagaagtcttccggtccaagtacctgaatgtgctggactgggtatttggtgtgccgccaccacccgacagtgaggataagaactgctatctaccagatgaagccaagaaatgccagtgacatactggcttgtagagttcattgcatgatttttgtatggtcacccatgtgatcctagcgcgagactagacccattagagggtttagtgaacgaaccttgtacaggactcttcggaaaatcgggactttagtggatatagcaagatagattttttaattaattgatttgtccaaacgatgccctggtcattaaatgaccatatgtggttgtaacttatgacctttattgttgttgttgtcatgcgaatataacttatggtccttgaaattgtttaaatggaatttctcattcttttgttttcttatagaccgttctggctgaagaacttggagatggagttcagagcttgcacaattgaccacatctcccgcccatagactcactttaccaagccatctccagcaggtcatgtaaatgactgtttataccgtttgcagagtgaagtttgaaataaggagtatgatatggagtatgatggagatagtctacgattttcttaattagagatgagggttaagggtagcaatgggctctaaaatttatactggcaatttaaggattgaactctatttatgtacatttttaactaaaattaattaaggactcgaatgaatcgtggatcca

SEQ ID NO: 6654 - DNA, 2192 bp, Zea Mays
cactggcgtaaacgcgcgcctcgcagccccaaagcaagaacaactttggttagtttaactgccgcatctaccattcgtccattccaccccccatctgccctcaccagagcttccccttcctcactgtggtggcttggtgggggggatccgcgcctcccccatcgctggccagctcatggcgccccccgccgccggaggatctccaatgcgccgtgaacgtcaagtgcgccgcgccgccggcgctggccgcgggggacggcgagctccggtggctgcggcggtgcgtggaggcggcagcgaagggcttcgccatcggcgcaggcctcaagggcggcctcgcgctcttctccgtcctcgtccgcatccgcagccgccgctcccccagatcgaggaaggccggagctatgaccaacgaggaggccgtggtgctcgcggtcaaggagactgtgaggtatggcttgttcttggggacctttgccggcagctacgtctccgtcgatgagtacatcgccgccgtctggggacgtaagagaacagcaaggtggaggtcatttttagctgggttgattgctggtccttctatgctcctgacaggaccaggaactcagcatactagcttggctatatacattctgatgcgtgcagcagtgcttgcatcccgttgtggaataaagagcaagcgttttggaaagatctgtaaacctttgacttggtcacatggtgatgtcttccttatgtgcctctcatctgcacaaattttgtcagcatacattttaaagcaggacagtttgccatcatcatataaatcatttctaaacaagcatggtggaaaagatcttactattttgcaaggtgtgaaggatgtagtcaaccacactgctttcagtaacttagtgggtatcgagaagtactacaaatctgttggtgttgacataaagctagatccaaacatgaaagtgccttgctcaattgtgcatggtaaccagtcatgtacaggacatgtcttttcattcttgttacaagcatatggaagagcagttcctgtatatgttccagtctacttagtccctgcacttgtagttcataggcagcatctcatgaaaaggccttactcaattatagggaagagttttctaggagtagcaagatctagtctgtttctctcagtatactgtgcatctgcatgggcttggacctgcctgctttttaggatcttccggagagccaatacccctcttgtcatccttggcacggtctggctttgctcatcgagaagaagagcaggaggattgagatatccctgtactgtcttgccagagctatcgagagttttttcacatggatgaccgatgcaggactctgccctccaatacttcagataaagcgagctgatgtggttgtgttcagcatagctacctctatcattatgcactgctatgcgcaggaaagagaagtcttccggtccaagtacctgaatgtgctggactgggtatttggtgtgccgccaccacccgacagtgaggataagaactgctatctaccagatgaagccaagaaatgccagtgacatactggcttgtagagttcattgcatgatttttgtatggtcacccatgtgatcctagcgcgagactagacccattagagggtttagtgaacgaaccttgtacaggactcttcggaaaatcgggactttagtggatatagcaagatagattttttaattaattgatttgtccaaacgatgccctggtcattaaatgaccatatgtggttgtaacttatgacctttattgttgttgttgtcatgcgaatataacttatggtccttgaaattgtttaaatggaatttctcattcttttgttttcttatagaccgttctggctgaagaacttggagatggagttcagagcttgcacaattgaccacatctcccgcccatagactcactttaccaagccatctccagcaggtcatgtaaatgactgtttataccgtttgcagagtgaagtttgaaataaggagtatgatatggagtatgatggagatagtctacgattttcttaattagagatgagggttaagggtagcaatgggctctaaaatttatactggcaatttaaggattgaactctatttatgtacatttttaactaaaattaattaaggactcgaatgaatcgtggatcca

SEQ ID NO: 6655 - DNA, 1382 bp, Zea Mays
cgaagacgcgtagagctccgctgacggcaagtcacgctgcctgcactggcgtaaacgcgcgcctcgcagccccaaagcaagaacaactttggttagtttaactgccgcatctaccattcgtccattccaccccccatctgccctcaccagagcttccccttcctcactgtggtggcttggtgggggggatccgcgcctcccccatcgctggccagctcatggcgccccccgccgccggaggatctccaatgcgccgtgaacgtcaagtgcgccgcgccgccggcgctggccgcgggggacggcgagctccggtggctgcggcggtgcgtggaggcggcagcgaagggcttcgccatcggcgcaggcctcaagggcggcctcgcgctcttctccgtcctcgtccgcatccgcagccgccgctcccccagatcgaggaaggccggagctatgaccaacgaggaggccgtggtgctcgcggtcaaggagactgtgaggtatggcttgttcttggggacctttgccggcagctacgtctccgtcgatgagtacatcgccgccgtctggggacgtaagagaacagcaaggtggaggtcatttttagctgggttgattgctggtccttctatgctcctgacaggaccaggaactcagcatactagcttggctatatacattctgatgcgtgcagcagtgcttgcatcccgttgtggaataaagagcaagcgttttggaaagatctgtaaacctttgacttggtcacatggtgatgtcttccttatgtgcctctcatctgcacaaattttgtcagcatacattttaaagcaggacagtttgccatcatcatataaatcatttctaaacaagcatggtggaaaagatcttactattttgcaaggtgtgaaggatgtagtcaaccacactgctttcagtaacttagtgggtatcgagaagtactacaaatctgttggtgttgacataaagctagatccaaacatgaaagtgccttgctcagtaagtcttaagatccatatgaatgatattgagctactatccattgtactttgaagtttgacatatcaagcatccagaaaatagaatcaattctgtggcatacctttctctggtccgaactatctacacctaatctgttttcattttttttgttaattttctttaccctccatgatctaacttcttgtgtttgctttccagattgtgcatggtaaccagtcatgtacaggacatgtcttttcattcttgttacaagcatatggaagagcagttcctgtatatgttccagtctacttagtccctgcacttgtagttcataggcagcatctcatgaaaagtaaggaccaaggtgtataattgtttttttcctt

SEQ ID NO: 6656 - DNA, 2460 bp, Zea Mays
tactggcatagaagtttaataacacatggagtacaaaaaatctacctggtgctatcagctcaattccttcagaggacagtttccagcaaaatgatagatcgttggaggaaactattagttaccctctcttgaaaactcgctcgtctaatctttctgaaatgctgaaggacagctttaagaaaagtgatagtttcacgagatggatgagcaaagcacttggtgaagtagattcccaaattaagtccagttctggagtgtattggaacagtgaagagaccaataatatcattgaaacatcaagttgtgatcagttggatcaatgtactattgacccagtgctcgcacaagagcagctgttcagtatagttgatttttctccaagctggacatatgcgggctccaagactagggttctcattaacggtaaattcttaaattctgctgagcttaaaagatgcaagtggtcatgtatgtttggtgaggtcgaagttccagcagagatttcagctgatgggattctcagatgttattctccgtcacacaaacctggcagggttcctttttatgtcacatgtaccaacaggttggcctgcagcgaaatccgagagtttgagttccggccaagtgttactcaatacatggatgccccaagtccacatggtgctacaaacaaaacatatctccagatgcgtcttgataacctgctgtctttgggacacaatgagtaccaggcaacggtatctaaccccactaaggagatggttgatttgagcaagaagataagctcattgatgacagacaatgattcctggtcgcagttgctaaaattggctagtgataatgagcctgtcactgatgatgatcaggatgagttctttgaaaagcacttaaaggaaaaattgcatatctggcttgtccacaaagcaagcgatggtggcaaaggccccaatgtgttagatgacgaagggcaaggtgtacttcatctggcagctgccctaggttatgattgggtgataaggccagcagtttctgctggtgtgaatataaatttcagagatgctcatggatggactgcactccattgggctgcattttgtggcagagagcgaacagttgttgcacttatcgcacttggtgcggctcctggagctttgacagacccaacgccaattttccctacaggaagcacaccagctgatctggcatcagctaatggatacaaggggatctctggtttcttggccgagtcttctttaacaagtcatcttcagaccctcgatcttaaggaaggcaaggggagcaatccgccagaaatatccggtctgcctggtattggagatgttactgaaagaagagcatcaccattagcaggtgaaggtcttcaagctggatccatgggagattcactaggtgctattcgaaatgctgcccaagctgccgctcgtatatatcaagttttcagggtgcagtctttccagagaaagcaagcagttcagtatgaggatgacaatggtgcagtatcagatgaccgtgccatatcactcttatctgttaaaccatctaaacctgtacagctcgatcccctgcatgctgctgcaactcgaatacagaacaagtaccgtggatggaagggaagaaaggaatttctacttatcagacagcgcattgtcaagatccaggctcatgtgcgaggtcaccaagtgaggaagcattatcgtaaaatcatttggtctgttggaatagtggagaagatcatattgcgttggaggcgaaaaggggccgggttgcgtggatttcggtctacagaaggtgcaacggtgggcagcagtagtaatttgatccaaaataaacctgaggatgattatgatttcttacaacaaggacggaaacaaaccgaagaaaggctgcagaaagctcttgccagagtgaagtcgatggctcagtacccagacgctcgggatcagtatcaaaggattctgactgttgtgactaaaatccaagaatcgaaggccatgcaagaaaagatgctcgaggagtcgaccgagatggacgaaggcttctttatgagcgacttcaaagagctatgggatgacgacataccaatgccttcttggtcatagcaacttgtgtgtttatgcttgtaaattacttacatgtatgttagtgttaccaaactgatgacccgtagttgcattgctaagttaaccatatctagcgtgtatatattttagtttggttcagctcttagtcatttagctgtagtgttttgtacagtatatgttgtacagaaggaaaaacatatttactgaggactccttgggaatgggatggatatatatctacggctgacttgtttaaacttccgaccagtttgcataaacaaatgtttgtgtattaaacatgtcgaattgtccttgattctgtaaagtctgttcagttgagggctttggttcaagcccc

SEQ ID NO: 6657 - DNA, 3607 bp, Zea Mays
ctcgtgttcaagtggctgttgtagcatgaactgaggtctgatggagctgcctttcggcttctggttgggttataagactttccagatctgttgagatattgagcagatattgaaggaagcacaacaccgatggctacgacccgctgagatatgtgaaatacttaaaaattacagaaatttccacattgccccagaaccaccaaatagacctccaagtggttcacttttcttgtttgatcggaaagtattgagatatttccggaaggatggccatagttggaggaagaaaaaggatggaaaaactgtcaaagaagctcatgaaagattaaaatctggaagtgttgatgtgcttcattgctactatgctcatggtgaaggaaatgaaaactttcagaggaggagttattggatgttggaggaggattttatgcacattgtacttgtacattatcttgaagtcaagggcggtaaatcaacttctcgtattagaggacatgatgatatgcttcaagctgctcgtacggatagccctttaagccagttgccttcacaaactacagagggtggaaactctcttagcggacaagcctcagaatacgaggaaacagaatcagcgtatctaaagccaaattcgctgcagcagatatatattcaggaggagccggataccaccctttctcttggacgcagcaccatgaaaatggaggtggacctgtgattggcacttctatcccaagctcctacgttcctgcactgcctctaggccagtagcattatacattttttcctggaagtcatttcaaatagtttatccattatggattgaagttgaattgacatctattcttttgctacacaaaatgtttaggtaaccttcaaggtttcccagctacagtgactaatacagacatttattctcgtcaagatgccttaccagttactcttaatgagcctggacttgcaattgaattcaatggagcagataatcagttggatccatcatcattgaatggccttgttaaacctttcctccaaatgtccacacctcaaagtactgttccctcagaattatttcctttcactgaagaacatggaaatgaatccttcacatttcatgaagtatatagtaatggattgagtatcaaggatgcagagattgtaggcaccaatgaagaatcagtatggaagctacctggtgctatcagctcaattccttcagaggacagtttccagcaaaatgatagatcgttggaggaaactattagttaccctctcttgaaaactcgctcgtctaatctttctgaaatgctgaaggacagctttaagaaaagtgatagtttcacgagatggatgagcaaagcacttggtgaagtagattcccaaattaagtccagttctggagtgtattggaacagtgaagagaccaataatatcattgaaacatcaagttgtgatcagttggatcaatgtactattgacccagtgctcgcacaagagcagctgttcagtatagttgatttttctccaagctggacatatgcgggctccaagactagggttctcattaacggtaaattcttaaattctgctgagcttaaaagatgcaagtggtcatgtatgtttggtgaggtcgaagttccagcagagatttcagctgatgggattctcagatgttattctccgtcacacaaacctggcagggttcctttttatgtcacatgtaccaacaggttggcctgcagcgaaatccgagagtttgagttccggccaagtgttactcaatacatggatgccccaagtccacatggtgctacaaacaaaacatatctccagatgcgtcttgataacctgctgtctttgggacacaatgagtaccaggcaacggtatctaaccccactaaggagatggttgatttgagcaagaagataagctcattgatgacagacaatgattcctggtcgcagttgctaaaattggctagtgataatgagcctgtcactgatgatgatcaggatgagttctttgaaaagcacttaaaggaaaaattgcatatctggcttgtccacaaagcaagcgatggtggcaaaggccccaatgtgttagatgacgaagggcaaggtgtacttcatctggcagctgccctaggttatgattgggtgataaggccagcagtttctgctggtgtgaatataaatttcagagatgctcatggatggactgcactccattgggctgcattttgtggcagagagcgaacagttgttgcacttatcgcacttggtgcggctcctggagctttgacagacccaacgccaattttccctacaggaagcacaccagctgatctggcatcagctaatggatacaaggggatctctggtttcttggccgagtcttctttaacaagtcatcttcagaccctcgatcttaaggaaggcaaggggagcaatccgccagaaatatccggtctgcctggtattggagatgttactgaaagaagagcatcaccattagcaggtgaaggtcttcaagctggatccatgggagattcactaggtgctattcgaaatgctgcccaagctgccgctcgtatatatcaagttttcagggtgcagtctttccagagaaagcaagcagttcagtatgaggatgacaatggtgcagtatcagatgaccgtgccatatcactcttatctgttaaaccatctaaacctgtacagctcgatcccctgcatgctgctgcaactcgaatacagaacaagtaccgtggatggaagggaagaaaggaatttctacttatcagacagcgcattgtcaagatccaggctcatgtgcgaggtcaccaagtgaggaagcattatcgtaaaatcatttggtctgttggaatagtggagaagatcatattgcgttggaggcgaaaaggggccgggttgcgtggatttcggtctacagaaggtgcaacggtgggcagcagtagtaatttgatccaaaataaacctgaggatgattatgatttcttacaacaaggacggaaacaaaccgaagaaaggctgcagaaagctcttgccagagtgaagtcgatggctcagtacccagacgctcgggatcagtatcaaaggattctgactgttgtgactaaaatccaagaatcgaaggccatgcaagaaaagatgctcgaggagtcgaccgagatggacgaaggcttctttatgagcgacttcaaagagctatgggatgacgacataccaatgccttcttggtcatagcaacttgtgtgtttatgcttgtaaattacttacatgtatgttagtgttaccaaactgatgacccgtagttgcattgctaagttaaccatatctagcgtgtatatattttagtttggttcagctcttagtcatttagctgtagtgttttgtacagtatatgttgtacagaaggaaaaacatatttactgaggactccttgggaatgggatggatatatatctacggctgacttgtttaaacttccgaccagtttgcataaacaaatgtttgtgtattaaacatgtcgaattgtccttgattctgtaaagtctgttcagttgagggctttggttcaagcccc

SEQ ID NO: 6658 - DNA, 3631 bp, Zea Mays
gttgcccacaccctcgctgagcccgccctctcctgactcgtcgtcaccccacctcgtcgacggttggctcgtccagttctttcctcctctctccccgcttcaccaccaaaaccccgggatcaagcagaggacgccactcacaggcccccccagcacctctccactcctccacaaaaccctgcgacaaatccgggcgaccgactcacggagcgatcgccatcggaacggtagccactagggccggaggggctcgcgccttgtggtgccgtggtggtggcctcactccgcggcggcgcctggtcttgttccgcttcgttgcgcgcggcgatggcggaggcgcggcgccacgcggtcgcgccgcagctagatattgagcagatattgaaggaagcacaacaccgatggctacgacccgctgagatatgtgaaatacttaaaaattacagaaatttccacattgccccagaaccaccaaatagacctccaagtggttcacttttcttgtttgatcggaaagtattgagatatttccggaaggatggccatagttggaggaagaaaaaggatggaaaaactgtcaaagaagctcatgaaagattaaaatctggaagtgttgatgtgcttcattgctactatgctcatggtgaaggaaatgaaaactttcagaggaggagttattggatgttggaggaggattttatgcacattgtacttgtacattatcttgaagtcaagggcggtaaatcaacttctcgtattagaggacatgatgatatgcttcaagctgctcgtacggatagccctttaagccagttgccttcacaaactacagagggtggaaactctcttagcggacaagcctcagaatacgaggaaacagaatcagatatatattcaggaggagccggataccaccctttctcttggacgcagcaccatgaaaatggaggtggacctgtgattggcacttctatcccaagctcctacgttcctgcactgcctctagataatcagttggatccatcatcattgaatggccttgttaaacctttcctccaaatgtccacacctcaaagtactgttccctcagaattatttcctttcactgaagaacatggaaatgaatccttcacatttcatgaagtatatagtaatggattgagtatcaaggatgcagagattgtaggcaccaatgaagaatcagtatggaagctacctggtgctatcagctcaattccttcagaggacagtttccagcaaaatgatagatcgttggaggaaactattagttaccctctcttgaaaactcgctcgtctaatctttctgaaatgctgaaggacagctttaagaaaagtgatagtttcacgagatggatgagcaaagcacttggtgaagtagattcccaaattaagtccagttctggagtgtattggaacagtgaagagaccaataatatcattgaaacatcaagttgtgatcagttggatcaatgtactattgacccagtgctcgcacaagagcagctgttcagtatagttgatttttctccaagctggacatatgcgggctccaagactagggttctcattaacggtaaattcttaaattctgctgagcttaaaagatgcaagtggtcatgtatgtttggtgaggtcgaagttccagcagagatttcagctgatgggattctcagatgttattctccgtcacacaaacctggcagggttcctttttatgtcacatgtaccaacaggttggcctgcagcgaaatccgagagtttgagttccggccaagtgttactcaatacatggatgccccaagtccacatggtgctacaaacaaaacatatctccagatgcgtcttgataacctgctgtctttgggacacaatgagtaccaggcaacggtatctaaccccactaaggagatggttgatttgagcaagaagataagctcattgatgacagacaatgattcctggtcgcagttgctaaaattggctagtgataatgagcctgtcactgatgatgatcaggatgagttctttgaaaagcacttaaaggaaaaattgcatatctggcttgtccacaaagcaagcgatggtggcaaaggccccaatgtgttagatgacgaagggcaaggtgtacttcatctggcagctgccctaggttatgattgggtgataaggccagcagtttctgctggtgtgaatataaatttcagagatgctcatggatggactgcactccattgggctgcattttgtggcagagagcgaacagttgttgcacttatcgcacttggtgcggctcctggagctttgacagacccaacgccaattttccctacaggaagcacaccagctgatctggcatcagctaatggatacaaggggatctctggtttcttggccgagtcttctttaacaagtcatcttcagaccctcgatcttaaggaaggcaaggggagcaatccgccagaaatatccggtctgcctggtattggagatgttactgaaagaagagcatcaccattagcaggtgaaggtcttcaagctggatccatgggagattcactaggtgctattcgaaatgctgcccaagctgccgctcgtatatatcaagttttcagggtgcagtctttccagagaaagcaagcagttcagtatgaggatgacaatggtgcagtatcagatgaccgtgccatatcactcttatctgttaaaccatctaaacctgtacagctcgatcccctgcatgctgctgcaactcgaatacagaacaagtaccgtggatggaagggaagaaaggaatttctacttatcagacagcgcattgtcaagatccaggctcatgtgcgaggtcaccaagtgaggaagcattatcgtaaaatcatttggtctgttggaatagtggagaagatcatattgcgttggaggcgaaaaggggccgggttgcgtggatttcggtctacagaaggtgcaacggtgggcagcagtagtaatttgatccaaaataaacctgaggatgattatgatttcttacaacaaggacggaaacaaaccgaagaaaggctgcagaaagctcttgccagagtgaagtcgatggctcagtacccagacgctcgggatcagtatcaaaggattctgactgttgtgactaaaatccaagaatcgaaggccatgcaagaaaagatgctcgaggagtcgaccgagatggacgaaggcttctttatgagcgacttcaaagagctatgggatgacgacataccaatgccttcttggtcatagcaacttgtgtgtttatgcttgtaaattacttacatgtatgttagtgttaccaaactgatgacccgtagttgcattgctaagttaaccatatctagcgtgtatatattttagtttggttcagctcttagtcatttagctgtagtgttttgtacagtatatgttgtacagaaggaaaaacatatttactgaggactccttgggaatgggatggatatatatctacggctgacttgtttaaacttccgaccagtttgcataaacaaatgtttgtgtattaaacatgtcgaattgtccttgattctgtaaagtctgttcagttgagggctttggttcaagcccc

SEQ ID NO: 6659 - DNA, 3771 bp, Zea Mays
cgcagtttccacgatgacccagctccaacggaccgcccccttccaatgcccagttgcccacaccctcgctgagcccgccctctcctgactcgtcgtcaccccacctcgtcgacggttggctcgtccagttctttcctcctctctccccgcttcaccaccaaaaccccgggatcaagcagaggacgccactcacaggcccccccagcacctctccactcctccacaaaaccctgcgacaaatccgggcgaccgactcacggagcgatcgccatcggaacggtagccactagggccggaggggctcgcgccttgtggtgccgtggtggtggcctcactccgcggcggcgcctggtcttgttccgcttcgttgcgcgcggcgatggcggaggcgcggcgccacgcggtcgcgccgcagctagatattgagcagatattgaaggaagcacaacaccgatggctacgacccgctgagatatgtgaaatacttaaaaattacagaaatttccacattgccccagaaccaccaaatagacctccaagtggttcacttttcttgtttgatcggaaagtattgagatatttccggaaggatggccatagttggaggaagaaaaaggatggaaaaactgtcaaagaagctcatgaaagattaaaatctggaagtgttgatgtgcttcattgctactatgctcatggtgaaggaaatgaaaactttcagaggaggagttattggatgttggaggaggattttatgcacattgtacttgtacattatcttgaagtcaagaggacatgatgatatgcttcaagctgctcgtacggatagccctttaagccagttgccttcacaaactacagagggtggaaactctcttagcggacaagcctcagaatacgaggaaacagaatcagatatatattcaggaggagccggataccaccctttctcttggacgcagcaccatgaaaatggaggtggacctgtgattggcacttctatcccaagctcctacgttcctgcactgcctctaggtaaccttcaaggtttcccagctacagtgactaatacagacatttattctcgtcaagatgccttaccagttactcttaatgagcctggacttgcaattgaattcaatggagcagataatcagttggatccatcatcattgaatggccttgttaaacctttcctccaaatgtccacacctcaaagtactgttccctcagaattatttcctttcactgaagaacatggaaatgaatccttcacatttcatgaagtatatagtaatggattgagtatcaaggatgcagagattgtaggcaccaatgaagaatcagtatggaagctacctggtgctatcagctcaattccttcagaggacagtttccagcaaaatgatagatcgttggaggaaactattagttaccctctcttgaaaactcgctcgtctaatctttctgaaatgctgaaggacagctttaagaaaagtgatagtttcacgagatggatgagcaaagcacttggtgaagtagattcccaaattaagtccagttctggagtgtattggaacagtgaagagaccaataatatcattgaaacatcaagttgtgatcagttggatcaatgtactattgacccagtgctcgcacaagagcagctgttcagtatagttgatttttctccaagctggacatatgcgggctccaagactagggttctcattaacggtaaattcttaaattctgctgagcttaaaagatgcaagtggtcatgtatgtttggtgaggtcgaagttccagcagagatttcagctgatgggattctcagatgttattctccgtcacacaaacctggcagggttcctttttatgtcacatgtaccaacaggttggcctgcagcgaaatccgagagtttgagttccggccaagtgttactcaatacatggatgccccaagtccacatggtgctacaaacaaaacatatctccagatgcgtcttgataacctgctgtctttgggacacaatgagtaccaggcaacggtatctaaccccactaaggagatggttgatttgagcaagaagataagctcattgatgacagacaatgattcctggtcgcagttgctaaaattggctagtgataatgagcctgtcactgatgatgatcaggatgagttctttgaaaagcacttaaaggaaaaattgcatatctggcttgtccacaaagcaagcgatggtggcaaaggccccaatgtgttagatgacgaagggcaaggtgtacttcatctggcagctgccctaggttatgattgggtgataaggccagcagtttctgctggtgtgaatataaatttcagagatgctcatggatggactgcactccattgggctgcattttgtggcagagagcgaacagttgttgcacttatcgcacttggtgcggctcctggagctttgacagacccaacgccaattttccctacaggaagcacaccagctgatctggcatcagctaatggatacaaggggatctctggtttcttggccgagtcttctttaacaagtcatcttcagaccctcgatcttaaggaaggcaaggggagcaatccgccagaaatatccggtctgcctggtattggagatgttactgaaagaagagcatcaccattagcaggtgaaggtcttcaagctggatccatgggagattcactaggtgctattcgaaatgctgcccaagctgccgctcgtatatatcaagttttcagggtgcagtctttccagagaaagcaagcagttcagtatgaggatgacaatggtgcagtatcagatgaccgtgccatatcactcttatctgttaaaccatctaaacctgtacagctcgatcccctgcatgctgctgcaactcgaatacagaacaagtaccgtggatggaagggaagaaaggaatttctacttatcagacagcgcattgtcaagatccaggctcatgtgcgaggtcaccaagtgaggaagcattatcgtaaaatcatttggtctgttggaatagtggagaagatcatattgcgttggaggcgaaaaggggccgggttgcgtggatttcggtctacagaaggtgcaacggtgggcagcagtagtaatttgatccaaaataaacctgaggatgattatgatttcttacaacaaggacggaaacaaaccgaagaaaggctgcagaaagctcttgccagagtgaagtcgatggctcagtacccagacgctcgggatcagtatcaaaggattctgactgttgtgactaaaatccaagaatcgaaggccatgcaagaaaagatgctcgaggagtcgaccgagatggacgaaggcttctttatgagcgacttcaaagagctatgggatgacgacataccaatgccttcttggtcatagcaacttgtgtgtttatgcttgtaaattacttacatgtatgttagtgttaccaaactgatgacccgtagttgcattgctaagttaaccatatctagcgtgtatatattttagtttggttcagctcttagtcatttagctgtagtgttttgtacagtatatgttgtacagaaggaaaaacatatttactgaggactccttgggaatgggatggatatatatctacggctgacttgtttaaacttccgaccagtttgcataaacaaatgtttgtgtattaaacatgtcgaattgtccttgattctgtaaagtctgttcagttgagggctttggttcaagcccc

SEQ ID NO: 6660 - DNA, 3969 bp, Zea Mays
tctacctctacgcctacgcttggcgcgaccgccaaccgcccgccaggcgcccacggccccacgccacgccttccgcggcggcaccccgccaacctctccggaacccggaaaaggccaagcggcaagggcccctcttcccatttcgcagtttccacgatgacccagctccaacggaccgcccccttccaatgcccagttgcccacaccctcgctgagcccgccctctcctgactcgtcgtcaccccacctcgtcgacggttggctcgtccagttctttcctcctctctccccgcttcaccaccaaaaccccgggatcaagcagaggacgccactcacaggcccccccagcacctctccactcctccacaaaaccctgcgacaaatccgggcgaccgactcacggagcgatcgccatcggaacggtagccactagggccggaggggctcgcgccttgtggtgccgtggtggtggcctcactccgcggcggcgcctggtcttgttccgcttcgttgcgcgcggcgatggcggaggcgcggcgccacgcggtcgcgccgcagctagatattgagcagatattgaaggaagcacaacaccgatggctacgacccgctgagatatgtgaaatacttaaaaattacagaaatttccacattgccccagaaccaccaaatagacctccaagtggttcacttttcttgtttgatcggaaagtattgagatatttccggaaggatggccatagttggaggaagaaaaaggatggaaaaactgtcaaagaagctcatgaaagattaaaatctggaagtgttgatgtgcttcattgctactatgctcatggtgaaggaaatgaaaactttcagaggaggagttattggatgttggaggaggattttatgcacattgtacttgtacattatcttgaagtcaagggcggtaaatcaacttctcgtattagaggacatgatgatatgcttcaagctgctcgtacggatagccctttaagccagttgccttcacaaactacagagggtggaaactctcttagcggacaagcctcagaatacgaggaaacagaatcagcgtatctaaagccaaattcgctgcagcagatatatattcaggaggagccggataccaccctttctcttggacgcagcaccatgaaaatggaggtggacctgtgattggcacttctatcccaagctcctacgttcctgcactgcctctaggtaaccttcaaggtttcccagctacagtgactaatacagacatttattctcgtcaagatgccttaccagttactcttaatgagcctggacttgcaattgaattcaatggagcagataatcagttggatccatcatcattgaatggccttgttaaacctttcctccaaatgtccacacctcaaagtactgttccctcagaattatttcctttcactgaagaacatggaaatgaatccttcacatttcatgaagtatatagtaatggattgagtatcaaggatgcagagattgtaggcaccaatgaagaatcagtatggaagctacctggtgctatcagctcaattccttcagaggacagtttccagcaaaatgatagatcgttggaggaaactattagttaccctctcttgaaaactcgctcgtctaatctttctgaaatgctgaaggacagctttaagaaaagtgatagtttcacgagatggatgagcaaagcacttggtgaagtagattcccaaattaagtccagttctggagtgtattggaacagtgaagagaccaataatatcattgaaacatcaagttgtgatcagttggatcaatgtactattgacccagtgctcgcacaagagcagctgttcagtatagttgatttttctccaagctggacatatgcgggctccaagactagggttctcattaacggtaaattcttaaattctgctgagcttaaaagatgcaagtggtcatgtatgtttggtgaggtcgaagttccagcagagatttcagctgatgggattctcagatgttattctccgtcacacaaacctggcagggttcctttttatgtcacatgtaccaacaggttggcctgcagcgaaatccgagagtttgagttccggccaagtgttactcaatacatggatgccccaagtccacatggtgctacaaacaaaacatatctccagatgcgtcttgataacctgctgtctttgggacacaatgagtaccaggcaacggtatctaaccccactaaggagatggttgatttgagcaagaagataagctcattgatgacagacaatgattcctggtcgcagttgctaaaattggctagtgataatgagcctgtcactgatgatgatcaggatgagttctttgaaaagcacttaaaggaaaaattgcatatctggcttgtccacaaagcaagcgatggtggcaaaggccccaatgtgttagatgacgaagggcaaggtgtacttcatctggcagctgccctaggttatgattgggtgataaggccagcagtttctgctggtgtgaatataaatttcagagatgctcatggatggactgcactccattgggctgcattttgtggcagagagcgaacagttgttgcacttatcgcacttggtgcggctcctggagctttgacagacccaacgccaattttccctacaggaagcacaccagctgatctggcatcagctaatggatacaaggggatctctggtttcttggccgagtcttctttaacaagtcatcttcagaccctcgatcttaaggaaggcaaggggagcaatccgccagaaatatccggtctgcctggtattggagatgttactgaaagaagagcatcaccattagcaggtgaaggtcttcaagctggatccatgggagattcactaggtgctattcgaaatgctgcccaagctgccgctcgtatatatcaagttttcagggtgcagtctttccagagaaagcaagcagttcagtatgaggatgacaatggtgcagtatcagatgaccgtgccatatcactcttatctgttaaaccatctaaacctgtacagctcgatcccctgcatgctgctgcaactcgaatacagaacaagtaccgtggatggaagggaagaaaggaatttctacttatcagacagcgcattgtcaagatccaggctcatgtgcgaggtcaccaagtgaggaagcattatcgtaaaatcatttggtctgttggaatagtggagaagatcatattgcgttggaggcgaaaaggggccgggttgcgtggatttcggtctacagaaggtgcaacggtgggcagcagtagtaatttgatccaaaataaacctgaggatgattatgatttcttacaacaaggacggaaacaaaccgaagaaaggctgcagaaagctcttgccagagtgaagtcgatggctcagtacccagacgctcgggatcagtatcaaaggattctgactgttgtgactaaaatccaagaatcgaaggccatgcaagaaaagatgctcgaggagtcgaccgagatggacgaaggcttctttatgagcgacttcaaagagctatgggatgacgacataccaatgccttcttggtcatagcaacttgtgtgtttatgcttgtaaattacttacatgtatgttagtgttaccaaactgatgacccgtagttgcattgctaagttaaccatatctagcgtgtatatattttagtttggttcagctcttagtcatttagctgtagtgttttgtacagtatatgttgtacagaaggaaaaacatatttactgaggactccttgggaatgggatggatatatatctacggctgacttgtttaaacttccgaccagtttgcataaacaaatgtttgtgtattaaacatgtcgaattgtccttgattctgtaaagtctgttcagttgagggctttggttcaagcccc

SEQ ID NO: 6661 - DNA, 1467 bp, Zea Mays
gccgactggtttgatgttgcgcgcggctggtgcaattctttctgggagtgagaatgtgcgggcgaggagttgagccgtgagtggacaatgcacgagctggatacggcgtgttaacagagtttctgtctgtgttagcgtgtggtagtgttgggaaactgaacatgcatcaatctaacagttgttgctcctcttgagaggttaaagttggagtatatagttcgtggtgagcagaggaatctatttgagcttatgcatgctattgcaacaacacaagggttgaaaggcttttggaaagggaactttgtcaacatcctccgcactgctccattcaaggcagtcaacttctacgcatatgacagttacagaaagcaactgctcaaatggtctggtaacgaagaatctgcaaactttgagagatttattgctggtgcttttgctggtgttacagcaacgattatgtgcatacctatggatacaatcaggacaaagatggtagctcctggtggtgaagctttaggcggggtcattggtgttgcccgccacatgatccaaactgaaggattcttctcgctgtataagggattggtgccttctcttatcagcatggcaccctctggcgctgtattctatggagtgtatgacatactgaagatggcttatctgcattctcctgaaggaaagaaaagggtatcgatgatgaagcaacaaaaacaagagacaaatgcattggatcaacttgaactgggtactgtgaggactttactctatggggccattgctggttgctgtgctgaagctgctacatacccatttgaagtggtccgtaggcagctacagatgcaagtaaaagcaaccagaatgaatgcgcttgcaacatgccttaagattgttgaccaaggtggggtaccagcactgtatgctggtctaatccccagcttgttacaggttctaccatcagcatcgatcagctattttgtttatgagttaatgaagatagttctgaaagtggagtgaatacaaattcattggtgagcctacaagcaagttcaaatggctaccacgtatcttgatgaaattgccgggcatccccagtaacttatgctgtgagggtagtttcaggttggtaaaatggttgttcagctgaagctttgcacactagttgactaaattgcacacgcggtcctattcgagacccgattcagtggcttaatagaagattgttctcttcgactccgtcctagggaaaacatctcggccctgcccaatttccgttgacaaattttacatactttatcgttgatgtatgtgacacattgacagcaagccagagtgacatttgagtgatttcagttgtgactttctaattcacagttgagatagggattgggacatatatacaggtattagatgtgattgtagttgacgcacgttgggtctatgtgcagtttcgtgatcttgacctgtgag

SEQ ID NO: 6662 - DNA, 2289 bp, Zea Mays
ttcgctgttcgttggcctttcctgccccaagggtgcaccggtgcggtacaggcagggcggcaagatcaaccaccagcaaatcacaagaacaagagaagaatcaatccgacagcacccctctccctcgcatctacttgctcgcccagcagccgccccaaccctcgcgtccgcatcgattcgaggcagctcgctcttatatatcccattccgctcggttggattcagcttcccctcgccctccctcgtcgataaaaccgatgcaccgtgccgcctcgcgaaccctagcggcggcgggacgaggggaagaaggttacaggcacggcgcgtgaagggtcctgtcctgcccagtcccgtctggtccgccgcgatgccgtggcccgagatgtggctgcctcccgcggccggggagggggcggtggcggcggggctgtttctcgatggcgtcgatgggacggcgcacggcgcgctcctcgcggccatgcccgggtgctccctgtcgttcgggcaccagcatcggcgccgacgtggggcgccgctggggtttctgtcgctgacaatgtcggtgaaggggggtagggggttcgcgccggccccggttgggttgctccccgacgcggaggagaaggccagggcggaggagtcggacgcgctggtcgcggggaagagggctgtggaagtggccgcggaggcggagggagtgattctgctgcaggagaaggagaagaaggacggtcgtgctggagctggagcgatgaacgtgagcaagcatctctgggctggagcagttgctgccatgatctcgaggagttgcaaatggaacaatacatgccgactggtttgatgttgcgcgcggctggtgcaattctttctgggagtgagaatgtgcgggcgaggagttgagccgtgagtggacaatgcacgagctggatacggcgtgttaacagagtttctgtctgtgttagcgtgtggtagtgttgggaaactgaacatgcatcaatctttgttgctcctcttgagaggttaaagttggagtatatagttcgtggtgagcagaggaatctatttgagcttatgcatgctattgcaacaacacaagggttgaaaggcttttggaaagggaactttgtcaacatcctccgcactgctccattcaaggcagtcaacttctacgcatatgacagttacagaaagcaactgctcaaatggtctggtaacgaagaatctgcaaactttgagagatttattgctggtgcttttgctggtgttacagcaacgattatgtgcatacctatggatacaatcaggacaaagatggtagctcctggtggtgaagctttaggcggggtcattggtgttgcccgccacatgatccaaactgaaggattcttctcgctgtataagggattggtgccttctcttatcagcatggcaccctctggcgctgtattctatggagtgtatgacatactgaagatggcttatctgcattctcctgaaggaaagaaaagggtatcgatgatgaagcaacaaaaacaagagacaaatgcattggatcaacttgaactgggtactgtgaggactttactctatggggccattgctggttgctgtgctgaagctgctacatacccatttgaagtggtccgtaggcagctacagatgcaagtaaaagcaaccagaatgaatgcgcttgcaacatgccttaagattgttgaccaaggtggggtaccagcactgtatgctggtctaatccccagcttgttacaggttctaccatcagcatcgatcagctattttgtttatgagttaatgaagatagttctgaaagtggagtgaatacaaattcattggtgagcctacaagcaagttcaaatggctaccacgtatcttgatgaaattgccgggcatccccagtaacttatgctgtgagggtagtttcaggttggtaaaatggttgttcagctgaagctttgcacactagttgactaaattgcacacgcggtcctattcgagacccgattcagtggcttaatagaagattgttctcttcgactccgtcctagggaaaacatctcggccctgcccaatttccgttgacaaattttacatactttatcgttgatgtatgtgacacattgacagcaagccagagtgacatttgagtgatttcagttgtgactttctaattcacagttgagatagggattgggacatatatacaggtattagatgtgattgtagttgacgcacgttgggtctatgtgcagtttcgtgatcttgacctgtgag

SEQ ID NO: 6663 - DNA, 1733 bp, Zea Mays
ttcgctgttcgttggcctttcctgccccaagggtgcaccggtgcggtacaggcagggcggcaagatcaaccaccagcaaatcacaagaacaagagaagaatcaatccgacagcacccctctccctcgcatctacttgctcgcccagcagccgccccaaccctcgcgtccgcatcgattcgaggcagctcgctcttatatatcccattccgctcggttggattcagcttcccctcgccctccctcgtcgataaaaccgatgcaccgtgccgcctcgcgaaccctagcggcggcgggacgaggggaagaaggttacaggcacggcgcggagggagtgattctgctgcaggagaaggagaagaaggacggtcgtgctggagctggagcgatgaacgtgagcaagcatctctgggctggagcagttgctgccatgatctcgagaacagttgttgctcctcttgagaggttaaagttggagtatatagttcgtggtgagcagaggaatctatttgagcttatgcatgctattgcaacaacacaagggttgaaaggcttttggaaagggaactttgtcaacatcctccgcactgctccattcaaggcagtcaacttctacgcatatgacagttacagaaagcaactgctcaaatggtctggtaacgaagaatctgcaaactttgagagatttattgctggtgcttttgctggtgttacagcaacgattatgtgcatacctatggatacaatcaggacaaagatggtagctcctggtggtgaagctttaggcggggtcattggtgttgcccgccacatgatccaaactgaaggattcttctcgctgtataagggattggtgccttctcttatcagcatggcaccctctggcgctgtattctatggagtgtatgacatactgaagatggcttatctgcattctcctgaaggaaagaaaagggtatcgatgatgaagcaacaaaaacaagagacaaatgcattggatcaacttgaactgggtactgtgaggactttactctatggggccattgctggttgctgtgctgaagctgctacatacccatttgaagtggtccgtaggcagctacagatgcaagtaaaagcaaccagaatgaatgcgcttgcaacatgccttaagattgttgaccaaggtggggtaccagcactgtatgctggtctaatccccagcttgttacaggttctaccatcagcatcgatcagctattttgtttatgagttaatgaagatagttctgaaagtggagtgaatacaaattcattggtgagcctacaagcaagttcaaatggctaccacgtatcttgatgaaattgccgggcatccccagtaacttatgctgtgagggtagtttcaggttggtaaaatggttgttcagctgaagctttgcacactagttgactaaattgcacacgcggtcctattcgagacccgattcagtggcttaatagaagattgttctcttcgactccgtcctagggaaaacatctcggccctgcccaatttccgttgacaaattttacatactttatcgttgatgtatgtgacacattgacagcaagccagagtgacatttgagtgatttcagttgtgactttctaattcacagttgagatagggattgggacatatatacaggtattagatgtgattgtagttgacgcacgttgggtctatgtgcagtttcgtgatcttgacctgtgag

SEQ ID NO: 6664 - DNA, 2115 bp, Zea Mays
ctcgttcgctgttcgttggcctttcctgccccaagggtgcaccggtgcggtacaggcagggcggcaagatcaaccaccagcaaatcacaagaacaagagaagaatcaatccgacagcacccctctccctcgcatctacttgctcgcccagcagccgccccaaccctcgcgtccgcatcgattcgaggcagctcgctcttatatatcccattccgctcggttggattcagcttcccctcgccctccctcgtcgataaaaccgatgcaccgtgccgcctcgcgaaccctagcggcggcgggacgaggggaagaaggttacaggcacggcgcgtgaagggtcctgtcctgcccagtcccgtctggtccgccgcgatgccgtggcccgagatgtggctgcctcccgcggccggggagggggcggtggcggcggggctgtttctcgatggcgtcgatgggacggcgcacggcgcgctcctcgcggccatgcccgggtgctccctgtcgttcgggcaccagcatcggcgccgacgtggggcgccgctggggtttctgtcgctgacaatgtcggtgaaggggggtagggggttcgcgccggccccggttgggttgctccccgacgcggaggagaaggccagggcggaggagtcggacgcgctggtcgcggggaagagggctgtggaagtggccgcggaggcggagggagtgattctgctgcaggagaaggagaagaaggacggtcgtgctggagctggagcgatgaacgtgagcaagcatctctgggctggagcagttgctgccatgatctcgagaacagttgttgctcctcttgagaggttaaagttggagtatatagttcgtggtgagcagaggaatctatttgagcttatgcatgctattgcaacaacacaagggttgaaaggcttttggaaagggaactttgtcaacatcctccgcactgctccattcaaggcagtcaacttctacgcatatgacagttacagaaagcaactgctcaaatggtctggtaacgaagaatctgcaaactttgagagatttattgctggtgcttttgctggtgttacagcaacgattatgtgcatacctatggatacactgttggtttcagatcaggacaaagatggtagctcctggtggtgaagctttaggcggggtcattggtgttgcccgccacatgatccaaactgaaggattcttctcgctgtataagggattggtgccttctcttatcagcatggcaccctctggcgctgtattctatggagtgtatgacatactgaagatggcttatctgcattctcctgaaggaaagaaaagggtatcgatgatgaagcaacaaaaacaagagacaaatgcattggatcaacttgaactgggtactgtgaggactttactctatggggccattgctggttgctgtgctgaagctgctacatacccatttgaagtggtccgtaggcagctacagatgcaagtaaaagcaaccagaatgaatgcgcttgcaacatgccttaagattgttgaccaaggtggggtaccagcactgtatgctggtctaatccccagcttgttacaggttctaccatcagcatcgatcagctattttgtttatgagttaatgaagatagttctgaaagtggagtgaatacaaattcattggtgagcctacaagcaagttcaaatggctaccacgtatcttgatgaaattgccgggcatccccagtaacttatgctgtgagggtagtttcaggttggtaaaatggttgttcagctgaagctttgcacactagttgactaaattgcacacgcggtcctattcgagacccgattcagtggcttaatagaagattgttctcttcgactccgtcctagggaaaacatctcggccctgcccaatttccgttgacaaattttacatactttatcgttgatgtatgtgacacattgacagcaagccagagtgacatttgagtgatttcagttgtgactttctaattcacagttgagatagggattgggacatatatacaggtattagatgtgattgtagttgacgcacgttgggtctatgtgcagtttcgtgatcttgacctgtgag

SEQ ID NO: 6665 - DNA, 1880 bp, Zea Mays
gttaaaaccacccacccttcttctccagttcctcatcaccactgagtcacgactccagatctcgcaccgctcgccatggacctcctcgacgcgaggcaccgccacacgccggatttgagctcctcccaagatgccgcctccaacatggggctcccgctcgccggtgccgcctaccagccctacgtttctgagcttctttccttctccatcgagcgcctccacaaggagccggagcttttgagggtcgacgcggagcgggtgcggcggcagatgcaggaggtggcggtggaaaactacgccgcgttcatcgccgcctctgaggcgctctccttcgtccgcgcgcagcttgagagcttcgacggccacctcgaggccatgatagaggagataccaaacttaacatctggctgcactgagtttgttgaatccgcacaacaaattttggaggagaggaagcttaatcaaacattactagccaaccacactacattgcttgacttgcttgaaattccacaattgatggacacgtgtatacggaatgggaactatgatgaagcacttgacctagaagcttttgtgagcaaaatctggaagttgcaccctgatttacctgttgtccaaggattagccactgaagtcaagaagacagtgcaatcattagtttcacagcttctccagaaacttcgatcaaatattcagttacctgagtgcctacgaattgtagcacatctgcgccgaattggagttttcagcgagtcagaattgcgcttacagttcctgaggtgcagggaagcttggctttctggaattcttgaagatctggaccaaaggaatgtttatgattacctgaaaggcatggtgacttgccacagggtacatctatttgatgttgttaatcaatatcgagcaatattcaacaatgataaatctggaaatgatgagaactatgacggcgggctgcttttcagctgggcaatgcaacaagttagtaatcacctcactactcttcaagttatgttaccaaacataacagaaggtggttctctgtccaacattcttgaacaatgcatgtattgtgcaatgggtcttggcttagtcggattggattttcgtggccttcttccaccgatctttgagaatgcggttctaaatttattctcaaagaatatgagtacggcggtcgaaaattttcaggtcattttggattcacactgttgggttccgatgccatctgttggttttgtagcaaatggtgttgtcgatgagacttctgatgatgtgactccaccttccgttttaatggagcatccacctcttgcagtgtttgtcaacggtgtttcagcagcaatgaatgagctaagaccgtgcgcaccattgagcttgaaagttgtccttgctcaggaggtggtcaagggactacatgcagtctctgactccctagtaagatacaaagctatgcggatgcttcgtggaaatgagtccgcccttttcctttcactatgccaggcattcatcgaggttgcatatccttattgtgccgcatgttttggccgatgctacccaaacggggcaacattgatctcagagcgtcaaggcacatttgacgctgtccgtcagctattgaccgtgccggcaagatctaacagttccagcatcgaaagaaggcagtcaggaggcatcgaaagaaggcagtcaggagccattgaaagaaagcagtctgttgagagcactgggatagcggtcactgataacgggctctcagccgatggacctgggctagagacgaacagttctgctgcaaccaccacctcaccggtagacgacggtccaccagcgactctagattaaattgagcagaaaaaggtgcaagctgagtatca

SEQ ID NO: 6666 - DNA, 1971 bp, Zea Mays
atcaccactgagtcacgactccagatctcgcaccgctcgccatggacctcctcgacgcgaggcaccgccacacgccggatttgagctcctcccaagatgccgcctccaacatggggctcccgctcgccggtgccgcctaccagccctacgtttctgagcttctttccttctccatcgagcgcctccacaaggagccggagcttttgagggtcgacgcggagcgggtgcggcggcagatgcaggaggtggcggtggaaaactacgccgcgttcatcgccgcctctgaggcgctctccttcgtccgcgcgcagcttgagagcttcgacggccacctcgaggccatggtgtatacggaatgggaactatgatgaagcacttgacctagaagcttttgtgagcaaaatctggaagttgcaccctgatttacctgttgtccaaggattagccactgaagtcaagaagacagtgcaatcattagtttcacagcttctccagaaacttcgatcaaatattcagttacctgagtgcctacgaattgtagcacatctgcgccgaattggagttttcagcgagtcagaattgcgcttacagggaagcttggctttctggaattcttgaagatctggaccaaaggaatgtttatgattacctgaaaggcatggtgacttgccacagggtacatctatttgatgttgttaatcaatatcgagcaatattcaacaatgataaatctggaaatgatgagaactatgacggcgggctgcttttcagctgggcaatgcaacaagttagtaatcacctcactactcttcaagttatgttaccaaacataacagaaggtggttctctgtccaacattcttgaacaatgcatgtattgtgcaatgggtcttggcttagtcggattggattttcgtggccttcttccaccgatctttgagaatgcggttctaaatttattctcaaagaatatgagtacggcggtcgaaaattttcaggtcattttggattcacactgttgggttccgatgccatctgttggttttgtagcaaatggtgttgtcgatgagacttctgatgatgtgactccaccttccgttttaatggagcatccacctcttgcagtgtttgtcaacggtgtttcagcagcaatgaatgagctaagaccgtgcgcaccattgagcttgaaagttgtccttgctcaggaggtggtcaagggactacatgcagtctctgactccctagtaagatacaaagctatgcggatgcttcgtggaaatgagtccgcccttttcctttcactatgccaggcattcatcgaggttgcatatccttattgtgccgcatgttttggccgatgctacccaaacggggcaacattgatctcagagcgtcaaggcacatttgacgctgtccgtcagctattgaccgtgccggcaagatctaacagttccagcatcgaaagaaggcagtcaggaggcatcgaaagaaggcagtcaggagccattgaaagaaagcagtctgttgagagcactgggatagcggtcactgataacgggctctcagccgatggacctgggctagagacgaacagttctgctgcaaccaccacctcaccggtagacgacggtccaccagcgagtaagtagcttggacctccgtttgaatcgtcaaagtccttcatcaaggcctggtttagtcaaccagagaaaaaattgctgcaaagttatattaatagagaattattcatagttttgttctcagtcttacagtgcacacaagatctcactggatatctgtatctcacttttttatcactcgaacaattaaacttctagctgttcattgttatactcgatacctagatgttgtagagtttccaaccggaacattcaataatctgattaagtgattagtacaaaccgtgttcaccgtgttgactacacttttgaagtcaaagaactgattcatg

SEQ ID NO: 6667 - DNA, 2154 bp, Zea Mays
gttaaaaccacccacccttcttctccagttcctcatcaccactgagtcacgactccagatctcgcaccgctcgccatggacctcctcgacgcgaggcaccgccacacgccggatttgagctcctcccaagatgccgcctccaacatggggctcccgctcgccggtgccgcctaccagccctacgtttctgagcttctttccttctccatcgagcgcctccacaaggagccggagcttttgagggtcgacgcggagcgggtgcggcggcagatgcaggaggtggcggtggaaaactacgccgcgttcatcgccgcctctgaggcgctctccttcgtccgcgcgcagcttgagagcttcgacggccacctcgaggccatgatagaggagataccaaacttaacatctggctgcactgagtttgttgaatccgcacaacaaattttggaggagaggaagcttaatcaaacattactagccaaccacactacattgcttgacttgcttgaaattccacaattgatggacacgtgtatacggaatgggaactatgatgaagcacttgacctagaagcttttgtgagcaaaatctggaagttgcaccctgatttacctgttgtccaaggattagccactgaagtcaagaagacagtgcaatcattagtttcacagcttctccagaaacttcgatcaaatattcagttacctgagtgcctacgaattgtagcacatctgcgccgaattggagttttcagcgagtcagaattgcgcttacagggaagcttggctttctggaattcttgaagatctggaccaaaggaatgtttatgattacctgaaaggcatggtgacttgccacagggtacatctatttgatgttgttaatcaatatcgagcaatattcaacaatgataaatctggaaatgatgagaactatgacggcgggctgcttttcagctgggcaatgcaacaagttagtaatcacctcactactcttcaagttatgttaccaaacataacagaaggtggttctctgtccaacattcttgaacaatgcatgtattgtgcaatgggtcttggcttagtcggattggattttcgtggccttcttccaccgatctttgagaatgcggttctaaatttattctcaaagaatatgagtacggcggtcgaaaattttcaggtcattttggattcacactgttgggttccgatgccatctgttggttttgtagcaaatggtgttgtcgatgagacttctgatgatgtgactccaccttccgttttaatggagcatccacctcttgcagtgtttgtcaacggtgtttcagcagcaatgaatgagctaagaccgtgcgcaccattgagcttgaaagttgtccttgctcaggaggtggtcaagggactacatgcagtctctgactccctagtaagatacaaagctatgcggatgcttcgtggaaatgagtccgcccttttcctttcactatgccaggcattcatcgaggttgcatatccttattgtgccgcatgttttggccgatgctacccaaacggggcaacattgatctcagagcgtcaaggcacatttgacgctgtccgtcagctattgaccgtgccggcaagatctaacagttccagcatcgaaagaaggcagtcaggaggcatcgaaagaaggcagtcaggagccattgaaagaaagcagtctgttgagagcactgggatagcggtcactgataacgggctctcagccgatggacctgggctagagacgaacagttctgctgcaaccaccacctcaccggtagacgacggtccaccagcgagtaagtagcttggacctccgtttgaatcgtcaaagtccttcatcaaggcctggtttagtcaaccagagaaaaaattgctgcaaagttatattaatagagaattattcatagttttgttctcagtcttacagtgcacacaagatctcactggatatctgtatctcacttttttatcactcgaacaattaaacttctagctgttcattgttatactcgatacctagatgttgtagagtttccaaccggaacattcaataatctgattaagtgattagtacaaaccgtgttcaccgtgttgactacacttttgaagtcaaagaactgattcatg

SEQ ID NO: 6668 - DNA, 2433 bp, Zea Mays
tgcacccgaatccagttccaaacccatcgcccccacactcctatcgcgtcgcatatatatatatatatatatatactcctacacatcaccaggaggttgcgaccaagccaagtacgtagtacgctagctagccaccaccagcaagcgcgcgccgtggctctccctcgtcggcagcgccgtcgcctcctccaccaccaccacgggttccgcgcccaacggcaagaagcggaagcgggacggcagcgacgaagacgactgcggcgaggtcgtggacgggatcgagctcaatttcgacgccgcgccgctgccccccgagtggcaacgctgcctcgacatcaagtcggggcagatccactactacaacacgaggacgcagaagcggacgtggaaggaccccaggggggagccggagtaccgcgccgccgccgaggaggaggaggaggaggactccgcgaattgcgcgccgccagggctggacctggagctgaacctcacgttcgagccgcgccgggctgtggcccacgagaagaagaggcccaaaccccccgcggctaataaggcgacacatgaccgtcgtcgtcagcccgcggaggaggccgaggacagcagcagcggcagcagcagggagatggtggccggcgtgtgcatgcgctgccacatgctggtgatgatgtgccgcgccagcccggcgtgtcccaactgcaagttcctgcacgcgccgagccgccccgtcgccccggagccggagccggagccgccggtgccactgctcaagctcggcctccagctgctctgctgccgggactagctggctggctacatacgctgcatgccccaccggcagcgtcgatcatcaaatcaaattaaacgggagcgcgtcgtccgaccgacctaccatggatggttctattctataccgtgctcccccccggcctagccatgcgtggaacgaagtggaacacagtagagcgcgcgcgcacgtgtgtgcgtccgcatgtgcaaggggtggggtggaggggctcaggatcacgttacgtaattatattagaggcagcgtaatccaatcggacagctagcgtggaggagcgaggaggagttgcatggttaatggcgagggttttttaaattggtgccctcagttttggttgtgtgctcacttatacccttagtcgtgtttttgctcagctgtgcccttcctattctatagaatagaagggcacagctgagcaaaaaacacaagtaagggtatagatgagcacacaaccaaaactaagggcaccaatttaaaaaaaccctaatggcgacgccgacgccgtccgaccgatcgatcagctgtacgtacggttcggttcaccaaggggccgggccgggtatatcgtatcatatagtatggcgatgagtggtgatgtagatatacaagtgcatagcatgggtgcagctcggaactttcgggtgtccgtcacgcattgtccgcgcgcgtgcgtgcaatgcatgtactactccgatcctcctcctacatgctgtacgtacgtaatcctaatcctaatcgatcgaacgaacttgcggaaagctggtcggcccttgtggactgtggtgtacatatatgtcattgttgcattgcgctcgctctcaatcgatcagtcttcgagagagagagagagagagactctgacctgtctatctcgatcgcattgatactgccactagaagcagtagcgattagtagcattttagcaagagagatggagaaaacgtaatataagcacggcacggccatatgcaaacttcggccagagtgagtgggagcggccgctgggaaattcgaaccggtattagttcgatctcttcagttccgtggcgctgccatatagtaagtagtatatttgccaatgccataccggtagcgctgtcgtgcataccaagctagggcgtgcacccgcatacgggtgcgcgtgtgtagatggatcatggaaggcgcgcgagctgattcggcaaccggggtcgaattagtgcaaggagttttgaatgcgcctcaattactgtactagctagctagctctgggtctgggtggcggatgcaacgaaccgtcctctcacgtattcaatcgcacatatccagactgtagtgctgtgccatcgtcgttctcttgtcatgacaatgagacgattcattgcgtgcagcagtaggaggaccggaggatgtgtgtgtatacagcccggtgtcgcgatcgagagcttagcaaagctctggatgatgcagtacgtacgtacgtacgtggacgacattaaactctgtcaggggttttcttcattaccccctgtttccaggaaaaggaaaggcacgagtgtaacgttcatctgtttcgtccccccatcattttttttttcttcttcttctcctcctcatcagctgccaacgcaaaaggatttctt

SEQ ID NO: 6669 - DNA, 5442 bp, Zea Mays
atggggatggtgcccaacgggctcctgcccagtgcgtccgccagggtgacgcggcgactggaccccgagcgctgggcggttgctgagggccgcacggcggagttgatcgcgcgcatccagcccaacgcgtactccgaggggcgaaggctggccgtgtaccactacgtgcagcggctcatcatgaactgcctctcctgccaggtttttacctttgggtcagtccctctcaagacttacttacctgatggtgacattgatgtcactgcttttagtaatagtgaagaactaaaggagatttgggcaaatcttgtccgggatgcattggagcgcgaagagaagaatgaaaatgctgaatttcatgtaaaggaagtccaatatattcaggcagaggtcaagattataaagtgtcttgtggaaaacattgttgttgacatctcatttaatcaagttggtggactatgcacactatgttttcttgaagagattgacaacttgatcagcgaaaatcatttattcaagaggagtatcatattaataaaggcatggtgtttctatgagagtcgtattcttggagctcaccatggtcttatatctacttacgcattggagacgcttgttctgtacatatttcatatattcaacaactctttcaccgggcctcttgaggtgttgtaccgcttcttagaatttttcagcaactttgattgggagaaattttgtttgagcttgtggggcccagttcctattagttcacttccagatatgactgcggaacccccacggattgacagtggtgaattgttgctgaacaagtccttcttggatacctgtagttctgcatatggagttgtgcctcacacccaggagaaccacagtcaaccatttatttcaaagcactttaatgttattgatcctttacgtacaaacaacaatcttggaagaagtgtcagtaaaggaaatttctttagaatacgcagtgcttttgcgtatggggcaaaaagacttggaaaattacttgaatgtccaaaagaagatttaattggtgaattaaaccagttcttcacaaatacatggataagacatgggagtggcagtcgtcctgatgtgcctaccccaagtatagttgatgtgcggcctctgaaggttgttccttctgtagtttcaagcagccagagaagtgtaacatcattcaagaaaaaggctgaaaatcctaagctccatgctactcaggataatcttcgtctgaatcaagataatctcactgaagatggtcacatttatactgacccttctcagccaattcacaaaagtgacatacattatcgtaatctaccaagagcagttaatccatctgtttctcatgttcagcaccaaaaaagttacacagcacaaggcagtgctaaggtctctgaacagcttgaaagaaataattcagctggattgatgcaaagtgaaagggataagagagtgccaaatggtctctttgtcaatgacagaaatgggcagaacaggtctagatttgcaagaacccgatcaagtcctgaactcacagactcttctgcagaaggatttcgtggcaggcggactaatgcagttggtatggaaaaatctttgggtgttgattacagcagcagaagaaacatcctggttccagaaatgtctagcaaccacagcactaagtcttcacaggatgaatcagtgtcttccttgaactgtttatctcaccctagtgcagcagcttcggactcaaatagtgtttcaagcagctatcgtgatgataatggttttgtaatgaatgaagaactcccttctgtttctgaatcgtcggatatgcaccatgacgaacaagttctggttaatttaatggaatccgtgaagttgcatggattcaatggacagattcaattgccaatgcaaataccttctcatatgtctgtagcgcatcccccactgttggctccaacatctttttcacaaaagcatttgaccggggttccaccagctaacttaattgggacaccatggttacccaatatgcagttcctccatggatttgttccacctcctatggcccattacatacacaatccaaattttgcaccaaacattgaggatggtactgagactgaaaagcctaatacatcagatgtgaatcatgatgctggcaaaacctggcatgagtatggtgttgggttttctggacagttcgatcctgaagcaagagatcctcacatctatgatattgatggcaaagaacatttgtctttgcctaatggtgtagcaggtgctcccttggaaaggcagatgaaatttacagttgagaataatggtgtagatgatgaaacctatactggcatgttccaaaatcatacaagtagagaagctgctgtagattactctaagaggagtggctatgtaaatgttccttcttcacatgccagttcatccaaaggcaaaactctggattcgagtccatgggatgaaatgactgcacatacaacaagaccaccaagagaaaaatggggaaaaagatctgcctttgcagcacctgccacgaccacacatgtcaagactgggtggcagatgggaaataccactgagcatctctcgaccgaagttaatgatggccccagaaatgggacagtggtaccaatcattactgaagcttctgagatagtaacagggtctgattctttttcaacacaatcaagaactagtcaagtaccaaatgattttgatccatcacaaattggcatgcctaatccagtgtttgcaccttttcttattggatccccacagcataggcaagctgatagctctggacttacttttgttccaacaggtccaccagttccttttgttgtgctcccgtttgtctcagggaatagcgatggttctggtccccagtttgagagaagcgaaggaattgatcagcttcctgccaatactgtaggtcatttcgttggctcacttcatgatgttcaccaacaagattccagtgctacctcaacagtatcatccagtactatgactgagccatctggtgatcacaagcctgacatcttgaatagtgattttgtcagtcattggcacaatttgcagtatgggcgactctgccagaatcctcgtcccatgggtcctgttttataccctgttccggtgccgccaatgtatttacatggccatgctacatgggatggtcctggaagaccagctgcaccaaatgttaactggacacaaatggtgggcggtcaacgagtatttcctgttatgcctgtacaacctgctacagaaagaaccggtgttcttcagcactatagtgaagatacaccaagataccgtggaggcacaggaacctacttgccaaatcctaaggttcattttagggaccgacactcaaattcaagaaactacagaggaggttataatggtgacaggggtgactatagtgataaggagggaagctgggtaaactcaaaacagcgaaatctgaaccgcggctatggacgtagtcagtcagagaggtccagcatgaggtctgatagacagactactgatgagagccagtctgatagacaaaggcgaacttatagaactgactcgtaccggcatgaggcaagttctcagtatcttgtgcagggccaaccttttggatccacaagttctatgcgcaaacaaggaaacacatcacatggggtttatacaccaccatctacgtcttcaaatggtcccagtgctttatctggccctccaggaccaccattttttatggtgtactcttatgaacaaggctcaaatcatggtgctactgctacctcatctgaaccaattgaatttggatctcttgggccacttcctgcagcagatggtgatgacataccaaggtcgacacgccaaataatggctaatgggttttatgggcaaagacgtggtccatataggggcggttcctctcattcgtctcctgatcaaccatcctcacctcagcctcgtcgccttgtgcatttgcgggagaatggcttgtctctgtttattccttctttatagccctctcatgtgagcctccggcactgggtctgcctgcacaagcagggattgaagagataggctgcttcatataagcatgtttcatgttgataaacaatggtatattcaagccacataacagaagttccaaatcattttattttcattcctcagtgggtctttcagagtctgatgagaatagtcatggttactttgtcaaattggtgataatggccagtaacctcattttcataaattatcaacgtgtgctcatttttggttgcctgtggcctacatgaagtccaaagtatgcacaaaaccaagcgtgttgaaccgacactcatagctgttagccgtaattagtaaattggctcctggtatctagtttcaaatgtactcacatcaaactagcacatcagggaatatggttaccatcatttatgcagtttgcttgtatgagttgatttatgtatttacctgcaagtatttagcaccatttgtgtgctgaagtttgtgtttctgtttgctttgaaggtagttgagtcttcatatgatggcttgatcacttggtttctgtcattgaaaccttgcgatagcaatattttggttcacccctcgtgatcatattctgcatgggtgaagatggttgggccatcagcagccacaaaaaaaaaaacacaagtatatgccctagttggttcttggtgctttgtgatctctcagaagcactgaattgtgaataccgtcaaaagcaattatcggcaggttattttaccagtcacaatggtgcttcttggattcaaaacaattatcttcagaagaaatcatggaaccatcaaacccagaatatcttcacacagaaatcagaattgaatagaagattatgagcaaggacgaactctgctctggccgtctcattatatgaattgtgtcaagggtaataacaatattagtatggatggagcaggaacaagcattgtggcgctgcatcagaaacaatctggaatgctttgggttttaatgtgtctgggcgtgcgtaagtgaaagctaataatgaattctcgtaccatttttaggtaggattaagctcatgtaacacacagcacactattcactaagatgtactatgagctaagtgaaacgtaggaacaaaggtgccgtttggtcacatatttgtaacgtaatgagtaactaataatcttaaattatgtttgtttaagtctaatcgtaattagataccacactagaaattgataccggtctatttaaatttttaccaccggtacttgagtcatcggccatggagtgtaaatcatcaacggcacccaaattcttgtgctgaagggagggatgactcctgaatacgcacgattaaaaagttatccatgccaatcttcctcggttccattcatgatt

SEQ ID NO: 6670 - DNA, 5104 bp, Zea Mays
ctcatccccacaaccgcatcaatcaatcgctcgcgctagggtttctgcccgcccccatcctggggctccacggccctggctcgatttgctgtgagggtggttgctccgagctcttagccatccgtcgccgctgtagcccactgctgcgggggtgctcgcggctgccgctggtgtcggagactagggttttgggtctgccaggcggaggagggtgcattggttggcgtgcgcatggggatggtgcccaacgggctcctgcccagtgcgtccgccagggtgacgcggcgactggaccccgagcgctgggcggttgctgagggccgcacggcggagttgatcgcgcgcatccagcccaacgcgtactccgaggggcgaaggctggccgtgtaccactacgtgcagcggctcatcatgaactgcctctcctgccaggtttttacctttgggtcagtccctctcaagacttacttacctgatggtgacattgatgtcactgcttttagtaatagtgaagaactaaaggagatttgggcaaatcttgtccgggatgcattggagcgcgaagagaagaatgaaaatgctgaatttcatgtaaaggaagtccaatatattcaggcagaggtcaagattataaagtgtcttgtggaaaacattgttgttgacatctcatttaatcaagttggtggactatgcacactatgttttcttgaagagattgacaacttgatcagcgaaaatcatttattcaagaggagtatcatattaataaaggcatggtgtttctatgagagtcgtattcttggagctcaccatggtcttatatctacttacgcattggagacgcttgttctgtacatatttcatatattcaacaactctttcaccgggcctcttgaggtgttgtaccgcttcttagaatttttcagcaactttgattgggagaaattttgtttgagcttgtggggcccagttcctattagttcacttccagatatgactgcggaacccccacggattgacagtggtgaattgttgctgaacaagtccttcttggatacctgtagttctgcatatggagttgtgcctcacacccaggagaaccacagtcaaccatttatttcaaagcactttaatgttattgatcctttacgtacaaacaacaatcttggaagaagtgtcagtaaaggaaatttctttagaatacgcagtgcttttgcgtatggggcaaaaagacttggaaaattacttgaatgtccaaaagaagatttaattggtgaattaaaccagttcttcacaaatacatggataagacatgggagtggcagtcgtcctgatgtgcctaccccaagtatagttgatgtgcggcctctgaaggttgttccttctgtagtttcaagcagccagagaagtgtaacatcattcaagaaaaaggctgaaaatcctaagctccatgctactcaggataatcttcgtctgaatcaagataatctcactgaagatggtcacatttatactgacccttctcagccaattcacaaaagtgacatacattatcgtaatctaccaagagcagttaatccatctgtttctcatgttcagcaccaaaaaagttacacagcacaaggcagtgctaaggtctctgaacagcttgaaagaaataattcagctggattgatgcaaagtgaaagggataagagagtgccaaatggtctctttgtcaatgacagaaatgggcagaacaggtctagatttgcaagaacccgatcaagtcctgaactcacagactcttctgcagaaggatttcgtggcaggcggactaatgcagttggtatggaaaaatctttgggtgttgattacagcagcagaagaaacatcctggttccagaaatgtctagcaaccacagcactaagtcttcacaggatgaatcagtgtcttccttgaactgtttatctcaccctagtgcagcagcttcggactcaaatagtgtttcaagcagctatcgtgatgataatggttttgtaatgaatgaagaactcccttctgtttctgaatcgtcggatatgcaccatgacgaacaagttctggttaatttaatggaatccgtgaagttgcatggattcaatggacagattcaattgccaatgcaaataccttctcatatgtctgtagcgcatcccccactgttggctccaacatctttttcacaaaagcatttgaccggggttccaccagctaacttaattgggacaccatggttacccaatatgcagttcctccatggatttgttccacctcctatggcccattacatacacaatccaaattttgcaccaaacattgaggatggtactgagactgaaaagcctaatacatcagatgtgaatcatgatgctggcaaaacctggcatgagtatggtgttgggttttctggacagttcgatcctgaagcaagagatcctcacatctatgatattgatggcaaagaacatttgtctttgcctaatggtgtagcaggtgctcccttggaaaggcagatgaaatttacagttgagaataatggtgtagatgatgaaacctatactggcatgttccaaaatcatacaagtagagaagctgctgtagattactctaagaggagtggctatgtaaatgttccttcttcacatgccagttcatccaaaggcaaaactctggattcgagtccatgggatgaaatgactgcacatacaacaagaccaccaagagaaaaatggggaaaaagatctgcctttgcagcacctgccacgaccacacatgtcaagactgggtggcagatgggaaataccactgagcatctctcgaccgaagttaatgatggccccagaaatgggacagtggtaccaatcattactgaagcttctgagatagtaacagggtctgattctttttcaacacaatcaagaactagtcaagtaccaaatgattttgatccatcacaaattggcatgcctaatccagtgtttgcaccttttcttattggatccccacagcataggcaagctgatagctctggacttacttttgttccaacaggtccaccagttccttttgttgtgctcccgtttgtctcagggaatagcgatggttctggtccccagtttgagagaagcgaaggaattgatcagcttcctgccaatactgtaggtcatttcgttggctcacttcatgatgttcaccaacaagattccagtgctacctcaacagtatcatccagtactatgactgagccatctggtgatcacaagcctgacatcttgaatagtgattttgtcagtcattggcacaatttgcagtatgggcgactctgccagaatcctcgtcccatgggtcctgttttataccctgttccggtgccgccaatgtatttacatggccatgctacatgggatggtcctggaagaccagctgcaccaaatgttaactggacacaaatggtgggcggtcaacgagtatttcctgttatgcctgtacaacctgctacagaaagaaccggtgttcttcagcactatagtgaagatacaccaagataccgtggaggcacaggaacctacttgccaaatcctaaggttcattttagggaccgacactcaaattcaagaaactacagaggaggttataatggtgacaggggtgactatagtgataaggagggaagctgggtaaactcaaaacagcgaaatctgaaccgcggctatggacgtagtcagtcagagaggtccagcatgaggtctgatagacagactactgatgagagccagtctgatagacaaaggcgaacttatagaactgactcgtaccggcatgaggcaagttctcagtatcttgtgcagggccaaccttttggatccacaagttctatgcgcaaacaaggaaacacatcacatggggtttatacaccaccatctacgtcttcaaatggtcccagtgctttatctggccctccaggaccaccattttttatggtgtactcttatgaacaaggctcaaatcatggtgctactgctacctcatctgaaccaattgaatttggatctcttgggccacttcctgcagcagatggtgatgacataccaaggtcgacacgccaaataatggctaatgggttttatgggcaaagacgtggtccatataggggcggttcctctcattcgtctcctgatcaaccatcctcacctcagcctcgtcgttgagtcttcatatgatggcttgatcacttggtttctgtcattgaaaccttgcgatagcaatattttggttcacccctcgtgatcatattctgcatgggtgaagatggttgggccatcagcagccacaaaaaaaaaaacacaagtatatgccctagttggttcttggtgctttgtgatctctcagaagcactgaattgtgaataccgtcaaaagcaattatcggcaggttattttaccagtcacaatggtgcttcttggattcaaaacaattatcttcagaagaaatcatggaaccatcaaacccagaatatcttcacacagaaatcagaattgaatagaagattatgagcaaggacgaactctgctctggccgtctcattatatgaattgtgtcaagggtaataacaatattagtatggatggagcaggaacaagcattgtggcgctgcatcagaaacaatctggaatgctttgggttttaatgtgtctgggcgtgcgtaagtgaaagctaataatgaattctcgtaccatttttaggtaggattaagctcatgtaacacacagcacactattcactaagatgtactatgagctaagtgaaacgtaggaacaaaggtgccgtttggtcacatatttgtaacgtaatgagtaactaataatcttaaattatgtttgtttaagtctaatcgtaattagataccacactagaaattgataccggtctatttaaatttttaccaccggtacttgagtcatcggccatggagtgtaaatcatcaacggcacccaaattcttgtgctgaagggagggatgactcctgaatacgcacgattaaaaagttatccatgccaatcttcctcggttccattcatgatt

SEQ ID NO: 6671 - DNA, 4459 bp, Zea Mays
cccaaaccgaacacaccgacccgaaccgcacgtctcctccggtcctccccctaaacttcccctcctctcctcacgccgaccactccctacctggtcgccgccgccgccgccgccgccgccgccgccgccgccgccgccgccgccgccgccgccgccgactactcatccccacaaccgcatcaatcaatcgctcgcgctagggtttctgcccgcccccatcctggggctccacggccctggctcgatttgctgtgagggtggttgctccgagctcttagccatccgtcgccgctgtagcccactgctgcgggggtgctcgcggctgccgctggtgtcggagactagggttttgggtctgccaggcggaggagggtgcattggttggcgtgcgcatggggatggtgcccaacgggctcctgcccagtgcgtccgccagggtgacgcggcgactggaccccgagcgctgggcggttgctgagggccgcacggcggagttgatcgcgcgcatccagcccaacgcgtactccgaggggcgaaggctggccgtgtaccactacgtgcagcggctcatcatgaactgcctctcctgccaggtttttacctttgggtcagtccctctcaagacttacttacctgatggtgacattgatgtcactgcttttagtaatagtgaagaactaaaggagatttgggcaaatcttgtccgggatgcattggagcgcgaagagaagaatgaaaatgctgaatttcatgtaaaggaagtccaatatattcaggcagaggtcaagattataaagtgtcttgtggaaaacattgttgttgacatctcatttaatcaagttggtggactatgcacactatgttttcttgaagagattgacaacttgatcagcgaaaatcatttattcaagaggagtatcatattaataaaggcatggtgtttctatgagagtcgtattcttggagctcaccatggtcttatatctacttacgcattggagacgcttgttctgtacatatttcatatattcaacaactctttcaccgggcctcttgaggtgttgtaccgcttcttagaatttttcagcaactttgattgggagaaattttgtttgagcttgtggggcccagttcctattagttcacttccagatatgactgcggaacccccacggattgacagtggtgaattgttgctgaacaagtccttcttggatacctgtagttctgcatatggagttgtgcctcacacccaggagaaccacagtcaaccatttatttcaaagcactttaatgttattgatcctttacgtacaaacaacaatcttggaagaagtgtcagtaaaggaaatttctttagaatacgcagtgcttttgcgtatggggcaaaaagacttggaaaattacttgaatgtccaaaagaagatttaattggtgaattaaaccagttcttcacaaatacatggataagacatgggagtggcagtcgtcctgatgtgcctaccccaagtatagttgatgtgcggcctctgaaggttgttccttctgtagtttcaagcagccagagaagtgtaacatcattcaagaaaaaggctgaaaatcctaagctccatgctactcaggataatcttcgtctgaatcaagataatctcactgaagatggtcacatttatactgacccttctcagccaattcacaaaagtgacatacattatcgtaatctaccaagagcagttaatccatctgtttctcatgttcagcaccaaaaaagttacacagcacaaggcagtgctaaggtctctgaacagcttgaaagaaataattcagctggattgatgcaaagtgaaagggataagagagtgccaaatggtctctttgtcaatgacagaaatgggcagaacaggtctagatttgcaagaacccgatcaagtcctgaactcacagactcttctgcagaaggatttcgtggcaggcggactaatgcagttggtatggaaaaatctttgggtgttgattacagcagcagaagaaacatcctggttccagaaatgtctagcaaccacagcactaagtcttcacaggatgaatcagtgtcttccttgaactgtttatctcaccctagtgcagcagcttcggactcaaatagtgtttcaagcagctatcgtgatgataatggttttgtaatgaatgaagaactcccttctgtttctgaatcgtcggatatgcaccatgacgaacaagttctggttaatttaatggaatccgtgaagttgcatggattcaatggacagattcaattgccaatgcaaataccttctcatatgtctgtagcgcatcccccactgttggctccaacatctttttcacaaaagcatttgaccggggttccaccagctaacttaattgggacaccatggttacccaatatgcagttcctccatggatttgttccacctcctatggcccattacatacacaatccaaattttgcaccaaacattgaggatggtactgagactgaaaagcctaatacatcagatgtgaatcatgatgctggcaaaacctggcatgagtatggtgttgggttttctggacagttcgatcctgaagcaagagatcctcacatctatgatattgatggcaaagaacatttgtctttgcctaatggtgtagcaggtgctcccttggaaaggcagatgaaatttacagttgagaataatggtgtagatgatgaaacctatactggcatgttccaaaatcatacaagtagagaagctgctgtagattactctaagaggagtggctatgtaaatgttccttcttcacatgccagttcatccaaaggcaaaactctggattcgagtccatgggatgaaatgactgcacatacaacaagaccaccaagagaaaaatggggaaaaagatctgcctttgcagcacctgccacgaccacacatgtcaagactgggtggcagatgggaaataccactgagcatctctcgaccgaagttaatgatggccccagaaatgggacagtggtaccaatcattactgaagcttctgagatagtaacagggtctgattctttttcaacacaatcaagaactagtcaagtaccaaatgattttgatccatcacaaattggcatgcctaatccagtgtttgcaccttttcttattggatccccacagcataggcaagctgatagctctggacttacttttgttccaacaggtccaccagttccttttgttgtgctcccgtttgtctcagggaatagcgatggttctggtccccagtttgagagaagcgaaggaattgatcagcttcctgccaatactgtaggtcatttcgttggctcacttcatgatgttcaccaacaagattccagtgctacctcaacagtatcatccagtactatgactgagccatctggtgatcacaagcctgacatcttgaatagtgattttgtcagtcattggcacaatttgcagtatgggcgactctgccagaatcctcgtcccatgggtcctgttttataccctgttccggtgccgccaatgtatttacatggccatgctacatgggatggtcctggaagaccagctgcaccaaatgttaactggacacaaatggtgggcggtcaacgagtatttcctgttatgcctgtacaacctgctacagaaagaaccggtgttcttcagcactatagtgaagatacaccaagataccgtggaggcacaggaacctacttgccaaatcctaaggttcattttagggaccgacactcaaattcaagaaactacagaggaggttataatggtgacaggggtgactatagtgataaggagggaagctgggtaaactcaaaacagcgaaatctgaaccgcggctatggacgtagtcagtcagagaggtccagcatgaggtctgatagacagactactgatgagagccagtctgatagacaaaggcgaacttatagaactgactcgtaccggcatgaggcaagttctcagtatcttgtgcagggccaaccttttggatccacaagttctatgcgcaaacaaggaaacacatcacatggggtttatacaccaccatctacgtcttcaaatggtcccagtgctttatctggccctccaggaccaccattttttatggtgtactcttatgaacaaggctcaaatcatggtgctactgctacctcatctgaaccaattgaatttggatctcttgggccacttcctgcagcagatggtgatgacataccaaggtcgacacgccaaataatggctaatgggttttatgggcaaagacgtggtccatataggggcggttcctctcattcgtctcctgatcaaccatcctcacctcagcctcgtcgactgatggattgctgaaaattcaaatatgttaaattctcatgcgttgatgaatctggcacatgaacatgcag

SEQ ID NO: 6672 - DNA, 482 bp, Zea Mays
agaagacttccccactgagttgtgtagtggttcagtgaacactttcctacatctgcagtgccttaggtgcaggttcagtgaagctctcctccttgcctcgagtctagccatggttcactgctttgggtggtgatcctaaagtctgcaggtctctgtagccctctccagttcatcgcacgccattcccctgtgctagtggccgcgccagcagttctcccacctcgccatggcttggacgtcctaaggagttgctggcccgtatgaagcttgttccgtaatcatctcaggtgatgagaagtattctaggagttcctgtggctggagggcgtttccagttctggagaaggactagctaggtttatgtataagctttggagggtttctaccttcctgcttttgtaataagttatgcactctgagtatatcaggacttgtaataaatattactctttcgaaacatgtaaaacttgagttttgaaaag

SEQ ID NO: 6673 - DNA, 787 bp, Zea Mays
agctggaatgtgtctgtttgtaggtgcagttttgactgcttgctccttatccatatcaaatagaccagattcagtgttttagtgatatttgtgagttgtgtgctgtgccagcaaggtttgtgcatgggagccatgtgtgttagccatgcagtgctggcatccccagaagacttccccactgagttgtgtagtggttcagtgaacactttcctacatctgcagtgccttaggtgcaggttcagtgaagctctcctccttgcctcgagtctagccatggttcactgctttgggtggtgatcctaaagtctgcaggtctctgtagccctctccagttcatcgcacgccattcccctgtgctagtggccgcgccagcagttctcccacctcgccatggcttggacgtcctaaggagttgctggcccgtatgaagcttgttccgtaatcatctcagagctcccaaaacaaagagtgaagattcaagatgaagtggttgctaaagaggagtctactccagtgtcttctcattaagaggatggagctatctaatcgatggttgggtagagggatctagaacctcttcactgcaacaaaggtgatgagaagtattctaggagttcctgtggctggagggcgtttccagttctggagaaggactagctaggtttatgtataagctttggagggtttctaccttcctgcttttgtaataagttatgcactctgagtatatcaggacttgtaataaatattactctttcgaaacatgtaaaacttgagttttgaaaag

SEQ ID NO: 6674 - DNA, 1620 bp, Zea Mays
atcattgaggactagaagtctcgctccccattaataagtctcaaggtgagctggaatgtgtctgtttgtaggtgcagttttgactgcttgctccttatccatatcaaatagaccagattcagtgttttagtgatatttgtgagttgtgtgctgtgccagcaaggtttgtgcatgggagccatgtgtgttagccatgcagtgctggcatccccagaagacttccccactgagttgtgtagtggttcagtgaacactttcctacatctgcagtgccttaggtgcaggttcagtgaagctctcctccttgcctcgagtctagccatggttcactgctttgggtggtgatcctaaagtctgcaggtctctgtagccctctccagttcatcgcacgccattcccctgtgctagtggccgcgccagcagttctcccacctcgccatggcttggacgtcctaaggagttgctggcccgtatgaagcttgttccgtaatcatctcagagctcccaaaacaaagagtgaagattcaagatgaagtggttgctaaagaggagtctactccagtgtcttctcattaagaggatggagctatctaatcgatggttgggtagagggatctagaacctcttcactgcaacaaaggcaagccccggtgcatttacccctttccttgtatttttaaaagacttttatacactttaagtctagtgaaatgtgcattaagttataggagttgcttgaaaactatttgatgcattgactaccttgatatccattcctgttatagatacttctttggaagtatcaaatattgtttacaaaaatgcttagccctgcttagatcttgtggatagaagttgtcttttgcaataatgcctagctcaggggttgtcctgaggaaggatggcttctacctgcaagaatattttcattgggagcatggtgggatcttactgcaaagttccctgtaatgctcttctcatcccaaggaacacaaaacaatcctaaggatggaaatacttaaatcgagacttgggctaggaacaggtgatgctccacccaggttaattaaggattggatgcgtatgtaggcctgtatgatcaaggactatcttaactggctacatgccctggatatgggacagggtaagcttgaacccggctattccatacgtgaaaagacaaccgcgcactgggcgtgggagatggtgggagtagcgtgtaccctcctggctggaggctggacggaggagtactgtgctcccgggtagcgcggaccggttcacgttgtggaggatctgtgggaacggttgacatatgcaagggttaagtgctacatatgtcgtgtggttagagatcctcagctgagtaaatcgattcggatcgccgttatatccccggagagtggagacttgatcgctgccctgcaacctaagtcaggatgtgaacattatgaataaaaatgatgttgtattgatgagatggtgaaattagactagatgcaaacagagtctattaatatttaatctggcattaaaatattgaaagtaaggactcactttagtaagctttttctgcaaaagtatctaagttgattcttgctaaaagcctctccttgattc

SEQ ID NO: 6675 - DNA, 1681 bp, Zea Mays
cctgtctctcgctttggcttccccagtcatcgcagccgaccagccgtcggccgtgcgcccgtgtttcgtacgcggcttcccatcccacgctttgccgagaccgagagggaacctcccaccgtcccacgacggccgcgggcggggcaagaacatatacccgcgtcactgaaccgccccgacggcatcgcaggcaccacccaaagcaaaaccccatttgttcgcttatctttctctagatccacccccgaagaaaatggcctcctacgatggcgacgaggactccggtcgccgccgcccttcccagcaccgtccgtccggcgggggcagcggcgaccttgcctcgagcgcgaagctcgtggcggaggcggcaaagctggccctccaggaccacagcctggagaaggtggacaagggccgcgtcgccggcgcggcggccgacctgctccacgccgcctcccagtacggcaagctcgagggcaagcccgtcggtgggtacctcgagaaggccgaggagtacctccaccagtacggccgcaaggacggggccggcggcaagcatcagggggacggggaaggcaagtacggtaagaatcccggcggtggccacggagggggaaggtatgaggaggaggaggggtacaagaagaagcctagtggcgggaggtatgaggaggatgagtacaagaagaagcctggtggtggtagtggatatggaggtggaaggtacgaggaagaagaaggctacaagaagaagccaggcagcggtggctatggaggaggaaaatacgaggatgaagatgactacaggaagaaaccaagcagtggtagctatggtgggggaaggtacgaggatgaagatgattacaagaagaaacccacaagtggtggctatggtggtgggaggtatgaacaagaagataattacaagaagcctacaggtggcggctttggtgacgggaggtatgagcaggaagatgaatacaagaggcctctgagtggtggtggcagtagctatggtggaggcaggtatgaagatgatgaatatcggaagaagccgagtggtggtggctatggcggaggaaggtatgaggacgaagatgattataggaagaaacctagtgctggtggatatggaggtggaggaagatatgaagatgagtacagcaagaagccagctggtggtcatggcggagggaggtatgaggaagatgatgagtacaggaagccgagtggtggtggatatggttatggagcttccagtggtggaggtcatggaggaaggtacgaagaagaggactacaagaagaagcctagtggacactcagggggacgctatgaggaagaggaggggaacaagaaggctagtggctatagtggagggaagtatggcaaggaggaagacgacaagaagaagaagcatggcgaggatggatcagagagtggtggtattggagattacctgaagttggcacagggtttcatgaagaaacaggatggggaaggggacagtgggggcggcatgggagactacttaaagcttgcagaaggtttcttgaagaagcgctgattaatcttccatatcatgattcaggaaggacttgtttggaaatctgggacagccgttcttgaagaagcaaggtcaacatgctggcatggagtcggaaggggaacagaatgattg

SEQ ID NO: 6676 - DNA, 1813 bp, Zea Mays
cacacgtctcctgtctctcgctttggcttccccagtcatcgcagccgaccagccgtcggccgtgcgcccgtgtttcgtacgcggcttcccatcccacgctttgccgagaccgagagggaacctcccaccgtcccacgacggccgcgggcggggcaagaacatatacccgcgtcactgaaccgccccgacggcatcgcaggcaccacccaaagcaaaaccccatttgttcgcttatctttctctagatccacccccgaagaaaatggcctcctacgatggcgacgaggactccggtcgccgccgcccttcccagcaccgtccgtccggcgggggcagcggcgaccttgcctcgagcgcgaagctcgtggcggaggcggcaaagctggccctccaggaccacagcctggagaaggtggacaagggccgcgtcgccggcgcggcggccgacctgctccacgccgcctcccagtacggcaagctcgagggcaagcccgtcggtgggtacctcgagaaggccgaggagtacctccaccagtacggccgcaaggacggggccggcggcaagcatcagggggacggggaaggcaagtacggtaagaatcccggcggtggccacggagggggaaggtatgaggaggaggaggggtacaagaagaagcctagtggcgggaggtatgaggaggatgagtacaagaagaagcctggtggtggtagtggatatggaggtggaaggtacgaggaagaagaaggctacaagaagaagccaggcagcggtggctatggaggaggaaaatacgaggatgaagatgactacaggaagaaaccaagcagtggtagctatggtgggggaaggtacgaggatgaagatgattacaagaagaaacccacaagtggtggctatggtggtgggaggtatgaacaagaagataattacaagaagcctacaggtggcggctttggtgacgggaggtatgagcaggaagatgaatacaagaggcctctgagtggtggtggcagtagctatggtggaggcaggtatgaagatgatgaatatcggaagaagccgagtggtggtggctatggcggaggaaggtatgaggacgaagatgattataggaagaaacctagtgctggtggatatggaggtggaggaagatatgaagatgagtacagcaagaagccagctggtggtcatggcggagggaggtatgaggaagatgatgagtacaggaagccgagtggtggtggatatggttatggagcttccagtggtggaggtcatggaggaaggtacgaagaagaggactacaagaagaagcctagtggacactcagggggacgctatgaggaagaggaggggaacaagaaggctagtggctatagtggagggaagtatggcaaggaggaagacgacaagaagaagaagcatggcgaggatggatcagagagtggtggtattggagattacctgaagttggcacagggtttcatgaagaaacaggatggggaaggggacagtgggggcggcatgggagactacttaaagcttgcagaaggtttcttgaagaagcgctgattaatcttccatatcatgattcaggaaggacttgtttgtcacacttcaacaggatacttaatcttttgccatctttacgggcggcgcacacacaaatgccagttttaaaggggactcaacaaataattaaatatttaaatatccacacttcatcgtggaaggaaatctgggacagccgttcttgaagaagcaaggtcaacatgctggcatggagtcggaaggggaacagaatgattg

SEQ ID NO: 6677 - DNA, 1749 bp, Zea Mays
cacacgtctcctgtctctcgctttggcttccccagtcatcgcagccgaccagccgtcggccgtgcgcccgtgtttcgtacgcggcttcccatcccacgctttgccgagaccgagagggaacctcccaccgtcccacgacggccgcgggcggggcaagaacatatacccgcgtcactgaaccgccccgacggcatcgcaggcaccacccaaagcaaaaccccatttgttcgcttatctttctctagatccacccccgaagaaaatggcctcctacgatggcgacgaggactccggtcgccgccgcccttcccagcaccgtccgtccggcgggggcagcggcgaccttgcctcgagcgcgaagctcgtggcggaggcggcaaagctggccctccaggaccacagcctggagaaggtggacaagggccgcgtcgccggcgcggcggccgacctgctccacgccgcctcccagtacggcaagctcgagggcaagcccgtcggtgggtacctcgagaaggccgaggagtacctccaccagtacggccgcaaggacggggccggcggcaagcatcagggggacggggaaggcaagtacggtaagaatcccggcggtggccacggagggggaaggtatgaggaggaggaggggtacaagaagaagcctagtggcgggaggtatgaggaggatgagtacaagaagaagcctggtggtggtagtggatatggaggtggaaggtacgaggaagaagaaggctacaagaagaagccaggcagcggtggctatggaggaggaaaatacgaggatgaagatgactacaggaagaaaccaagcagtggtagctatggtgggggaaggtacgaggatgaagatgattacaagaagaaacccacaagtggtggctatggtggtgggaggtatgaacaagaagataattacaagaagcctacaggtggcggctttggtgacgggaggtatgagcaggaagatgaatacaagaggcctctgagtggtggtggcagtagctatggtggaggcaggtatgaagatgatgaatatcggaagaagccgagtggtggtggctatggcggaggaaggtatgaggacgaagatgattataggaagaaacctagtgctggtggatatggaggtggaggaagatatgaagatgagtacagcaagaagccagctggtggtcatggcggagggaggtatgaggaagatgatgagtacaggaagccgagtggtggtggatatggttatggagcttccagtggtggaggtcatggaggaaggtacgaagaagaggactacaagaagaagcctagtggacactcagggggacgctatgaggaagaggaggggaacaagaaggctagtggctatagtggagggaagtatggcaaggaggaagacgacaagaagaagaagcatggcgaggatggatcagagagtggtggtattggagattacctgaagttggcacagggtttcatgaagaaacaggatggggaaggggacagtgggggcggcatgggagactacttaaagcttgcagaaggtttcttgaagaagcgctgattaatcttccatatcatgattcaggaaggacttgtttgttttaaaggggactcaacaaataattaaatatttaaatatccacacttcatcgtggaaggaaatctgggacagccgttcttgaagaagcaaggtcaacatgctggcatggagtcggaaggggaacagaatgattg

SEQ ID NO: 6678 - DNA, 1893 bp, Zea Mays
cacacgtctcctgtctctcgctttggcttccccagtcatcgcagccgaccagccgtcggccgtgcgcccgtgtttcgtacgcggcttcccatcccacgctttgccgagaccgagagggaacctcccaccgtcccacgacggccgcgggcggggcaagaacatatacccgcgtcactgaaccgccccgacggcatcgcaggcaccacccaaagcaaaaccccatttgttcgcttatctttctctagatccacccccgaagaaaatggcctcctacgatggcgacgaggactccggtcgccgccgcccttcccagcaccgtccgtccggcgggggcagcggcgaccttgcctcgagcgcgaagctcgtggcggaggcggcaaagctggccctccaggaccacagcctggagaaggtggacaagggccgcgtcgccggcgcggcggccgacctgctccacgccgcctcccagtacggcaagctcgagggcaagcccgtcggtgggtacctcgagaaggccgaggagtacctccaccagtacggccgcaaggacggggccggcggcaagcatcagggggacggggaaggcaagtacggtaagaatcccggcggtggccacggagggggaaggtatgaggaggaggaggggtacaagaagaagcctagtggcgggaggtatgaggaggatgagtacaagaagaagcctggtggtggtagtggatatggaggtggaaggtacgaggaagaagaaggctacaagaagaagccaggcagcggtggctatggaggaggaaaatacgaggatgaagatgactacaggaagaaaccaagcagtggtagctatggtgggggaaggtacgaggatgaagatgattacaagaagaaacccacaagtggtggctatggtggtgggaggtatgaacaagaagataattacaagaagcctacaggtggcggctttggtgacgggaggtatgagcaggaagatgaatacaagaggcctctgagtggtggtggcagtagctatggtggaggcaggtatgaagatgatgaatatcggaagaagccgagtggtggtggctatggcggaggaaggtatgaggacgaagatgattataggaagaaacctagtgctggtggatatggaggtggaggaagatatgaagatgagtacagcaagaagccagctggtggtcatggcggagggaggtatgaggaagatgatgagtacaggaagccgagtggtggtggatatggttatggagcttccagtggtggaggtcatggaggaaggtacgaagaagaggactacaagaagaagcctagtggacactcagggggacgctatgaggaagaggaggggaacaagaaggctagtggctatagtggagggaagtatggcaaggaggaagacgacaagaagaagaagcatggcgaggatggatcagagagtggtggtattggagattacctgaagttggcacagggtttcatgaagaaacaggatggggaaggggacagtgggggcggcatgggagactacttaaagcttgcagaaggtttcttgaagaagcgctgattaatcttccatatcatgattcaggaaggacttgtttggtggtcttatgtcatcggcttcaagcagtgtcagaactattagtattttacctttcctgattccatagcaaacagaaaatgcacaagtctatggaatattttcgcaagtgcacccatttcagctgcttatttattcaatcaagcagttttttgctcctctttgtatgacctctcaggctcacaataccttgattccaatgcgctcattcatctatttgataaaaaacctaggactctttaagtgattgaacacctatggctgcagaccttatgtatcct

SEQ ID NO: 6679 - DNA, 1637 bp, Zea Mays
cacgtctcctgtctctcgctttggcttccccagtcatcgcagccgaccagccgtcggccgtgcgcccgtgtttcgtacgcggcttcccatcccacgctttgccgagaccgagagggaacctcccaccgtcccacgacggccgcgggcggggcaagaacatatacccgcgtcactgaaccgccccgacggcatcgcaggcaccacccaaagcaaaaccccatttgttcgcttatctttctctagatccacccccgaagaaaatggcctcctacgatggcgacgaggactccggtcgccgccgcccttcccagcaccgtccgtccggcgggggcagcggcgaccttgcctcgagcgcgaagctcgtggcggaggcggcaaagctggccctccaggaccacagcctggagaaggtggacaagggccgcgtcgccggcgcggcggccgacctgctccacgccgcctcccagtacggcaagctcgagggcaagcccgtcggtgggtacctcgagaaggccgaggagtacctccaccagtacggccgcaaggacggggccggcggcaagcatcagggggacggggaaggcaagtacggtaagaatcccggcggtggccacggagggggaaggtatgaggaggaggaggggtacaagaagaagcctagtggcgggaggtatgaggaggatgagtacaagaagaagcctggtggtggtagtggatatggaggtggaaggtacgaggaagaagaaggctacaagaagaagccaggcagcggtggctatggaggaggaaaatacgaggatgaagatgactacaggaagaaaccaagcagtggtagctatggtgggggaaggtacgaggatgaagatgattacaagaagaaacccacaagtggtggctatggtggtgggaggtatgaacaagaagataattacaagaagcctacaggtggcggctttggtgacgggaggtatgagcaggaagatgaatacaagaggcctctgagtggtggtggcagtagctatggtggaggcaggtatgaagatgatgaatatcggaagaagccgagtggtggtggctatggcggaggaaggtatgaggacgaagatgattataggaagaaacctagtgctggtggatatggaggtggaggaagatatgaagatgagtacagcaagaagccagctggtggtcatggcggagggaggtatgaggaagatgatgagtacaggaagccgagtggtggtggatatggttatggagcttccagtggtggaggtcatggaggaaggtacgaagaagaggactacaagaagaagcctagtggacactcagggggacgctatgaggaagaggaggggaacaagaaggctagtggctatagtggagggaagtatggcaaggaggaagacgacaagaagaagaagcatggcgaggatggatcagagagtggtggtattggagattacctgaagttggcacagggtttcatgaagaaacaggatggggaaggggacagtgggggcggcatgggagactacttaaagcttgcagaaggtttcttgaagaagcgctgattaatcttccatatcatgattcaggaaggacttgtttgtgacactaatcagccatgaagatac

SEQ ID NO: 6680 - DNA, 1708 bp, Zea Mays
cggcttcccatcccacgctttgccgagaccgagagggaacctcccaccgtcccacgacggccgcgggcggggcaagaacatatacccgcgtcactgaaccgccccgacggcatcgcaggcaccacccaaagcaaaaccccatttgttcgcttatctttctctagatccacccccgaagaaaatggcctcctacgatggcgacgaggactccggtcgccgccgcccttcccagcaccgtccgtccggcgggggcagcggcgaccttgcctcgagcgcgaagctcgtggcggaggcggcaaagctggccctccaggaccacagcctggagaaggtggacaagggccgcgtcgccggcgcggcggccgacctgctccacgccgcctcccagtacggcaagctcgagggcaagcccgtcggtgggtacctcgagaaggccgaggagtacctccaccagtacggccgcaaggacggggccggcggcaagcatcagggggacggggaaggcaagtacggtaagaatcccggcggtggccacggagggggaaggtatgaggaggatgagtacaagaagaagcctggtggtggtagtggatatggaggtggaaggtacgaggaagaagaaggctacaagaagaagccaggcagcggtggctatggaggaggaaaatacgaggatgaagatgactacaggaagaaaccaagcagtggtagctatggtgggggaaggtacgaggatgaagatgattacaagaagaaacccacaagtggtggctatggtggtgggaggtatgaacaagaagataattacaagaagcctacaggtggcggctttggtgacgggaggtatgagcaggaagatgaatacaagaggcctctgagtggtggtggcagtagctatggtggaggaaggtatgaggacgaagatgattataggaagaaacctagtgctggtggatatggaggtggaggaagatatgaagatgagtacagcaagaagccagctggtggtcatggcggagggaggtatgaggaagatgatgagtacaggaagccgagtggtggtggatatggttatggagcttccagtggtggaggtcatggaggaaggtacgaagaagaggactacaagaagaagcctagtggacactcagggggacgctatgaggaagaggaggggaacaagaaggctagtggctatagtggagggaagtatggcaaggaggaagacgacaagaagaagaagcatggcgaggatggatcagagagtggtggtattggagattacctgaagttggcacagggtttcatgaagaaacaggatggggaaggggacagtgggggcggcatgggagactacttaaagcttgcagaaggtttcttgaagaagcgctgattaatcttccatatcatgattcaggaaggacttgtttggttagtcacttgtcctgtttattgtctccaagtagtgacattttcgaggtttccatcataggatgtaatacaagtgcattgcttatgttgtctgtgtgttgtgacatgaatgcttaatgtgctgctgggataataaaagcttggatgctctgctattcatgttgtatattagttctgactaaaataatatgtatcctatgttatcgtgcttacaataagtgaaactcttgaatacattttcattgattatctattgctgttagggtcctattgtttg

SEQ ID NO: 6681 - DNA, 1201 bp, Zea Mays
caggcccagaggccacgaccctctcgatccgcgagccgttgcctatttatcggggtccgccgggccgagcgccgcagctttgaacctggttctcctgtcgctcttcgtgcgggcgtgcggcacaccaccagaagagcggccgagcggcgcagagaagagagaaccagccgagcggagcggctgcgcttccggagggaggaaggaggatggagaaggctctcaccaagctcggcagcttcacaatctcccgcaaggccaagcaggagctctccgccatcggtgacgacatctccggcacaagaagtcgctccctgatctactgcgcgagcacaacctccctccaggtctcttccctcgtaacatcatctgctacgagtacgacgaatcgacctcgaagctggtggtgcacctgtccaagccctgcgaggtgagcttcaaggattcctccaccgtaaggtatgctcctcgtgtcaaggcgactctgtcccgaggcaagctttccggggttgaaggcatgaagaccaaggtggtggtatgggtgaaggtggccagcgtgagcatcgagagctacaagtctgacaagatatgcttcatcgccggtgtgaagaagctgagaccgaaggatgcttatgaggtccctcgtgaagccatctctgtcgaggagttctgagctcaactcaactccattggtttgcctacgtagtatcattcattcgtagcatttttcgggtcccatgtgatcggcgattgatgtgctgtgatttggtagctttgtactgatattggaagcatgtggatctgttctgcctggcagaagataacccgtgcatgttatctgacgtgacgagtccttcacatgtgtcctggtcctggttctgcattggctgctcctagagttcacgtgttcctgttttattttatatatatggtattgcactgcatgtggttagttgcacggtgttggacaccaaaatgagttgacggtccggtccttgggcccggaccgtctgcgtatcccgagattagattaactcggatatttatccttatctcgtacgtggttattcatctaatcacgtaggagtttgttggctatctcttagaaaaaggtcaagacctccttctctataaatataaaggggtacacgttggggacttactctcaaatgctataaattgagaacaagacaacaccaaaaca

SEQ ID NO: 6682 - DNA, 1036 bp, Zea Mays
cttgcttttggaaactgagcttactcctgagcagcgtctaatggtggaaacagtactgaaaagcagcaatttgttagcaacactcatcaatgaccatgaatgcaataatagccctttcctccttgcttttggaaactgagcttactcctgagcagcgtctaatggtggaaacagtactgaaaagcagcaatttgttagcaacactcatcaatgatgttctggatctttccaaactcgaggatggaagccttgaactggagattaaagcatttaatcttcatactgttttcaaagaagtgatgggtttcattaaaccaattgcatctatcaagaggatatctgtatcggttatgttggcaccagatctgccgttatgtgcaattggtgatgaaaagagactcatgcaaactattctgaacatctctggcaatgctgtaaagtttaccaaggagggacacatcacgcttgtagcttccattatgaaggctgactctttgagagagttcagaaccccagaatttcatccaactgcaagtgatgaacatttctatttgaaagttcaggtaaaagatacaggctgtggagttagtcctcaggatctacctcatgtattcacaaagtttgctcatcctcaaagtggaggaaaccgaggggttaatggtagtggtcttggccttgccatatgcaagaggtttgttagtcttatgggagggcacatctggatcgacaacgaaggaaccggaagaggttgcaccgcaacattcgtcatcaagctgggcgtgtgtgacaacacaaacacctaccagcaacagctgataatgaagtgcatctgagcatttgaaacaaatctagattctagctctagctaaggttatacagatattgtgctgaaccttgatgctactattatgtgtagtaaaattttgggggtcggaattgaccaaacttatggatttattcaacgtttcaattcagtgacaaatgctactattttctatattcagacacttgggctgaagacacgcctacattgtgg

SEQ ID NO: 6683 - DNA, 2278 bp, Zea Mays
atttcccccgtctctcatcctcgaatcctaccccctttctccgaaaacctagcgtgtggcaagaagccccttcggaaacctcggttcatgaatttgctgctcgggaattacgtgcatgtagacttttaaacgaaattcagaagtcaggtcaggtgcagtggggcttccaagcgccgggaacgcgtgaggctggtaaccggttgtatgtgggggcttccaaggcgctggcgacacgtgaggttgtatgtgggggcttccaaggcgcttgctccagactttgtggtgataggtttatgtgtggtgctagactgttggtttattattcaattggcgttgggattattgacttagcatggatcaacttgcttgtgaatttaagagattagtcatttggaaattccttgaagtgcttaagtatttataggttagtcgatcagaataatagggttctttcataatcgacagtcaaagcaaatctgaacaaaacattccaagcttgtgttctggttcaaggtagcagtttcagccatctgattgctttacctttagataagccttgatattaatcacgtactgaagatccatttattatgggatgcattggtcaatatttagcagctgatgtaataatttaatggtgaataattcaaaaattaggaaccacctattagcagctggatccaaatggtttcttgctaaaaattagcagcaatttgctatctattgtttagtgccaatggatccaaacatgtcctaagtctgtactttttttacagtttcaagtttgcaaactgtcactctctctcattcatggtttttgaggtgttgcagcgtcgtgtggtgctggaggtacgcctggatgcctaagtgatatggcgtaattagggtacgcctcagcgcctagggtacgagtaggcgacacctcaaaaaccatggtctcattatttttctcctgaccgataaaggataaacttcattacataaaacataaggacttctttcttttgcataaccgccccttcacaaccaaattctgtagcactgtaggtctgtgcatgtgacgccggttgcaaaagagggaaataaatggaactgtcaaacttggatgaggacatccaaatggtgaactgttgttggggcccaccttgctgccttattatgcgcagtttggcaatgtgacctggtatagagagctgtagcggtgacagaagacaaactcaaatggaggtgcttctttctgggtagcacaggggactaatgacaggcgccaggtgattggtgtggcgtgattacagtactacacgcaactggttacaacattgaactgtcaagattacatagctgaaaaaggtaaccgctgagcagtctcggagggaacatcggataaaggctggccagcttcgtgttgtaggacgactggacgagatagcattgtcggccaggccgagatggaagtgtccagcgataatcagtggatcatgagttcacgagagaagacccttgatgatgtcttagatcttgttccgttgcgtctggatcaaaggtgatgggtttcattaaaccaattgcatctatcaagaggatatctgtatcggttatgttggcaccagatctgccgttatgtgcaattggtgatgaaaagagactcatgcaaactattctgaacatctctggcaatgctgtaaagtttaccaaggagggacacatcacgcttgtagcttccattatgaaggctgactctttgagagagttcagaaccccagaatttcatccaactgcaagtgatgaacatttctatttgaaagttcaggtaaaagatacaggctgtggagttagtcctcaggatctacctcatgtattcacaaagtttgctcatcctcaaagtggaggaaaccgaggggttaatggtagtggtcttggccttgccatatgcaagaggtttgttagtcttatgggagggcacatctggatcgacaacgaaggaaccggaagaggttgcaccgcaacattcgtcatcaagctgggcgtgtgtgacaacacaaacacctaccagcaacagctgataatgaagtgcatctgagcatttgaaacaaatctagattctagctctagctaaggttatacagatattgtgctgaaccttgatgctactattatgtgtagtaaaattttgggggtcggaattgaccaaacttatggatttattcaacgtttcaattcagtgacaaatgctactattttctatattcagacacttggtactaatttcttgatcaaa

SEQ ID NO: 6684 - DNA, 1261 bp, Zea Mays
tccctggacctctccttcttagcactgtaggtctgtgcatgtgacgccggttgcaaaagagggaaataaatggaactgtcaaacttggatgaggacatccaaatggtgaactgttgttggggcccaccttgctgccttattatgcgcagtttggcaatgtgacctggtatagagagctgtagcggtgacagaagacaaactcaaatggaggtgcttctttctgggtagcacaggggactaatgacaggcgccaggtgattggtgtggcgtgattacagtactacacgcaactggttacaacattgaactgtcaagattacatagctgaaaaaggtaaccgctgagcagtctcggagggaacatcggataaaggctggccagcttcgtgttgtaggacgactggacgagatagcattgtcggccaggccgagatggaagtgtccagcgataatcagtggatcatgagttcacgagagaagacccttgatgatgtcttagatcttgttccgttgcgtctggatcaaaggtgatgggtttcattaaaccaattgcatctatcaagaggatatctgtatcggttatgttggcaccagatctgccgttatgtgcaattggtgatgaaaagagactcatgcaaactattctgaacatctctggcaatgctgtaaagtttaccaaggagggacacatcacgcttgtagcttccattatgaaggctgactctttgagagagttcagaaccccagaatttcatccaactgcaagtgatgaacatttctatttgaaagttcaggtaaaagatacaggctgtggagttagtcctcaggatctacctcatgtattcacaaagtttgctcatcctcaaagtggaggaaaccgaggggttaatggtagtggtcttggccttgccatatgcaagaggtttgttagtcttatgggagggcacatctggatcgacaacgaaggaaccggaagaggttgcaccgcaacattcgtcatcaagctgggcgtgtgtgacaacacaaacacctaccagcaacagctgataatgaagtgcatctgagcatttgaaacaaatctagattctagctctagctaaggttatacagatattgtgctgaaccttgatgctactattatgtgtagtaaaattttgggggtcggaattgaccaaacttatggatttattcaacgtttcaattcagtgacaaatgctactattttctatattcagacacttggtactaatttcttgatcaaa

SEQ ID NO: 6685 - DNA, 1262 bp, Zea Mays
gcctccctggacctctccttcttagcactgtaggtctgtgcatgtgacgccggttgcaaaagagggaaataaatggaactgtcaaacttggatgaggacatccaaatggtgaactgttgttggggcccaccttgctgccttattatgcgcagtttggcaatgtgacctggtatagagagctgtagcggtgacagaagacaaactcaaatggaggtgcttctttctgggtagcacaggggactaatgacagtatgggcgccaggtgattggtgtggcgtgattacagtactacacgcaactggttacaacattgaactgtcaagattacatagctgaaaaaggtaaccgctgagcagtctcggagggaacatcggataaaggctggccagcttcgtgttgtaggacgactggacgagatagcattgtcggccaggccgagatggaagtgtccagcgataatcagtggatcatgagttcacgagagaagacccttgatgatgtcttagatcttgttccgttgcgtctggatcaaaggtgatgggtttcattaaaccaattgcatctatcaagaggatatctgtatcggttatgttggcaccagatctgccgttatgtgcaattggtgatgaaaagagactcatgcaaactattctgaacatctctggcaatgctgtaaagtttaccaaggagggacacatcacgcttgtagcttccattatgaaggctgactctttgagagagttcagaaccccagaatttcatccaactgcaagtgatgaacatttctatttgaaagttcagatacaggctgtggagttagtcctcaggatctacctcatgtattcacaaagtttgctcatcctcaaagtggaggaaaccgaggggttaatggtagtggtcttggccttgccatatgcaagaggtttgttagtcttatgggagggcacatctggatcgacaacgaaggaaccggaagaggttgcaccgcaacattcgtcatcaagctgggcgtgtgtgacaacacaaacacctaccagcaacagctgataatgaagtgcatctgagcatttgaaacaaatctagattctagctctagctaaggttatacagatattgtgctgaaccttgatgctactattatgtgtagtaaaattttgggggtcggaattgaccaaacttatggatttattcaacgtttcaattcagtgacaaatgctactattttctatattcagacacttggtactaatttcttgatcaaa

SEQ ID NO: 6686 - DNA, 1268 bp, Zea Mays
gaggcctccctggacctctccttcttagcactgtaggtctgtgcatgtgacgccggttgcaaaagagggaaataaatggaactgtcaaacttggatgaggacatccaaatggtgaactgttgttggggcccaccttgctgccttattatgcgcagtttggcaatgtgacctggtatagagagctgtagcggtgacagaagacaaactcaaatggaggtgcttctttctgggtagcacaggggactaatgacagtatgggcgccaggtgattggtgtggcgtgattacagtactacacgcaactggttacaacattgaactgtcaagattacatagctgaaaaaggtaaccgctgagcagtctcggagggaacatcggataaaggctggccagcttcgtgttgacgactggacgagatagcattgtcggccaggccgagatggaagtgtccagcgataatcagtggatcatgagttcacgagagaagacccttgatgatgtcttagatcttgttccgttgcgtctggatcaaaggtgatgggtttcattaaaccaattgcatctatcaagaggatatctgtatcggttatgttggcaccagatctgccgttatgtgcaattggtgatgaaaagagactcatgcaaactattctgaacatctctggcaatgctgtaaagtttaccaaggagggacacatcacgcttgtagcttccattatgaaggctgactctttgagagagttcagaaccccagaatttcatccaactgcaagtgatgaacatttctatttgaaagttcaggtaaaagatacaggctgtggagttagtcctcaggatctacctcatgtattcacaaagtttgctcatcctcaaagtggaggaaaccgaggggttaatggtagtggtcttggccttgccatatgcaagaggtttgttagtcttatgggagggcacatctggatcgacaacgaaggaaccggaagaggttgcaccgcaacattcgtcatcaagctgggcgtgtgtgacaacacaaacacctaccagcaacagctgataatgaagtgcatctgagcatttgaaacaaatctagattctagctctagctaaggttatacagatattgtgctgaaccttgatgctactattatgtgtagtaaaattttgggggtcggaattgaccaaacttatggatttattcaacgtttcaattcagtgacaaatgctactattttctatattcagacacttggtactaatttcttgatcaaa

SEQ ID NO: 6687 - DNA, 1270 bp, Zea Mays
cccgacgaggcctccctggacctctccttcttaggtctgtgcatgtgacgccggttgcaaaagagggaaataaatggaactgtcaaacttggatgaggacatccaaatggtgaactgttgttggggcccaccttgctgccttattatgcgcagtttggcaatgtgacctggtatagagagctgtagcggtgacagaagacaaactcaaatggaggtgcttctttctgggtagcacaggggactaatgacagtatgggcgccaggtgattggtgtggcgtgattacagtactacacgcaactggttacaacattgaactgtcaagattacatagctgaaaaaggtaaccgctgagcagtctcggagggaacatcggataaaggctggccagcttcgtgttgtaggacgactggacgagatagcattgtcggccaggccgagatggaagtgtccagcgataatcagtggatcatgagttcacgagagaagacccttgatgatgtcttagatcttgttccgttgcgtctggatcaaaggtgatgggtttcattaaaccaattgcatctatcaagaggatatctgtatcggttatgttggcaccagatctgccgttatgtgcaattggtgatgaaaagagactcatgcaaactattctgaacatctctggcaatgctgtaaagtttaccaaggagggacacatcacgcttgtagcttccattatgaaggctgactctttgagagagttcagaaccccagaatttcatccaactgcaagtgatgaacatttctatttgaaagttcaggtaaaagatacaggctgtggagttagtcctcaggatctacctcatgtattcacaaagtttgctcatcctcaaagtggaggaaaccgaggggttaatggtagtggtcttggccttgccatatgcaagaggtttgttagtcttatgggagggcacatctggatcgacaacgaaggaaccggaagaggttgcaccgcaacattcgtcatcaagctgggcgtgtgtgacaacacaaacacctaccagcaacagctgataatgaagtgcatctgagcatttgaaacaaatctagattctagctctagctaaggttatacagatattgtgctgaaccttgatgctactattatgtgtagtaaaattttgggggtcggaattgaccaaacttatggatttattcaacgtttcaattcagtgacaaatgctactattttctatattcagacacttggtactaatttcttgatcaaa

SEQ ID NO: 6688 - DNA, 1212 bp, Zea Mays
ccaaccccgacgaggcctccctggacctctccttcttaggacatccaaatggtgaactgttgttggggcccaccttgctgccttattatgcgcagtttggcaatgtgacctggtatagagagctgtagcggtgacagaagacaaactcaaatggaggtgcttctttctgggtagcacaggggactaatgacagtatgggcgccaggtgattggtgtggcgtgattacagtactacacgcaactggttacaacattgaactgtcaagattacatagctgaaaaaggtaaccgctgagcagtctcggagggaacatcggataaaggctggccagcttcgtgttgtaggacgactggacgagatagcattgtcggccaggccgagatggaagtgtccagcgataatcagtggatcatgagttcacgagagaagacccttgatgatgtcttagatcttgttccgttgcgtctggatcaaaggtgatgggtttcattaaaccaattgcatctatcaagaggatatctgtatcggttatgttggcaccagatctgccgttatgtgcaattggtgatgaaaagagactcatgcaaactattctgaacatctctggcaatgctgtaaagtttaccaaggagggacacatcacgcttgtagcttccattatgaaggctgactctttgagagagttcagaaccccagaatttcatccaactgcaagtgatgaacatttctatttgaaagttcaggtaaaagatacaggctgtggagttagtcctcaggatctacctcatgtattcacaaagtttgctcatcctcaaagtggaggaaaccgaggggttaatggtagtggtcttggccttgccatatgcaagaggtttgttagtcttatgggagggcacatctggatcgacaacgaaggaaccggaagaggttgcaccgcaacattcgtcatcaagctgggcgtgtgtgacaacacaaacacctaccagcaacagctgataatgaagtgcatctgagcatttgaaacaaatctagattctagctctagctaaggttatacagatattgtgctgaaccttgatgctactattatgtgtagtaaaattttgggggtcggaattgaccaaacttatggatttattcaacgtttcaattcagtgacaaatgctactattttctatattcagacacttggtactaatttcttgatcaaa

SEQ ID NO: 6689 - DNA, 1285 bp, Zea Mays
ctccaaccccgacgaggcctccctggacctctccttcttagcactgtaggtctgtgcatgtgacgccggttgcaaaagagggaaataaatggaactgtcaaacttggatgaggacatccaaatggtgaactgttgttggggcccaccttgctgccttattatgcgcagtttggcaatgtgacctggtatagagagctgtagcggtgacagaagacaaactcaaatggaggtgcttctttctgggtagcacaggggactaatgacagtatgggcgccaggtgattggtgtggcgtgattacagtactacacgcaactggttacaacattgaactgtcaagattacatagctgaaaaaggtaaccgctgagcagtctcggagggaacatcggataaaggctggccagcttcgtgttgtaggacgactggacgagatagcattgtcggccaggccgagatggaagtgtccagcgataatcagtggatcatgagttcacgagagaagacccttgatgatgtcttagatcttgttccgttgcgtctggatcaaaggtgatgggtttcattaaaccaattgcatctatcaagaggatatctgtatcggttatgttggcaccagatctgccgttatgtgcaattggtgatgaaaagagactcatgcaaactattctgaacatctctggcaatgctgtaaagtttaccaaggagggacacatcacgcttgtagcttccattatgaaggctgactctttgagagagttcagaaccccagaatttcatccaactgcaagtgatgaacatttctatttgaaagttcaggtaaaagatacaggctgtggagttagtcctcaggatctacctcatgtattcacaaagtttgctcatcctcaaagtggaggaaaccgaggggttaatggtagtggtcttggccttgccatatgcaagaggtttgttagtcttatgggagggcacatctggatcgacaacgaaggaaccggaagaggttgcaccgcaacattcgtcatcaagctgggcgtgtgtgacaacacaaacacctaccagcaacagctgataatgaagtgcatctgagcatttgaaacaaatctagattctagctctagctaaggttatacagatattgtgctgaaccttgatgctactattatgtgtagtaaaattttgggggtcggaattgaccaaacttatggatttattcaacgtttcaattcagtgacaaatgctactattttctatattcagacacttggtactaatttcttgatcaaa

SEQ ID NO: 6690 - DNA, 754 bp, Zea Mays
catgtcctaagtctgtactttttttacagtttcaagtttgcaaactgtcactctctctcattcatggtttttgaggtgttgcagcgtcgtgtggtgctggaggtacgcctggatgcctaagtgatatggcgtaattagggtctgtgcatgtgacgccggttgcaaaagagggaaataaatggaactgtcaaacttggatgaggacatccaaatggtgaactgttgttggggcccaccttgctgccttattatgcgcagtttggcaatgtgacctggtatagagagctgtagcggtgacagaagacaaactcaaatggaggtgcttctttctgggtagcacaggggactaatgacagtatgggcgccaggtgattggtgtggcgtgattacagtactacacgcaactggttacaacattgaactgtcaagattacatagctgaaaaaggtaaccgctgagcagtctcggagggaacatcggataaaggctggccagcttcgtgttgtaggacgactggacgagatagcattgtcggccaggccgagatggaagtgtccagcgataatcagtggatcatgagttcacgagagaagacccttgatgatgtcttagatcttgttccgttgcgtctggatcaaagagtccatgcagttatctcatgcaactattcttgaagagtccatgcgggctattcttgaagagtccatgcgggcacgtgatttactaatggagcagaatgttgccctggatttag

SEQ ID NO: 6691 - DNA, 635 bp, Zea Mays
cctggacctctccttcttaggtctgtgcatgtgacgccggttgcaaaagagggaaataaatggaactgtcaaacttggatgaggacatccaaatggtgaactgttgttggggcccaccttgctgccttattatgcgcagtttggcaatgtgacctggtatagagagctgtagcggtgacagaagacaaactcaaatggaggtgcttctttctgggtagcacaggggactaatgacagtatgggcgccaggtgattggtgtggcgtgattacagtactacacgcaactggttacaacattgaactgtcaagattacatagctgaaaaaggtaaccgctgagcagtctcggagggaacatcggataaaggctggccagcttcgtgttgtaggacgactggacgagatagcattgtcggccaggccgagatggaagtgtccagcgataatcagtggatcatgagttcacgagagaagacccttgatgatgtcttagatcttgttccgttgcgtctggatcaaagagtccatgcagttatctcatgcaactattcttgaagagtccatgcgggctattcttgaagagtccatgcgggcacgtgatttactaatggagcagaatgttgccctggatttag

SEQ ID NO: 6692 - DNA, 3100 bp, Zea Mays
ccacgccgctgcgcttccgatgcaaccctaaccacctcatcgccggcacgatcttccccgcccccactccccggctattgcctctgattggcggctctccgggattcacgttggtccggggtacggctcctgcgattttcacgcaatggagcaagatcagagcgtggttgtcggcagcgcggactctggtgctgcggcttttggttttgcgactggcaacccccctagcttggctgtgaccggcggaagcgccgtggcccccgacggtggagctcaggcagctgatgcctctgcgtaccaggccgagcacacggcgttgaatgggactgtcggcgatatgggtaattacccatctacaggagctgcagagaacggcgaagccgtccccaacgagacgggcgagccggttcctgagctatcgtacgaagaagcagaagaggctaggttatggagtgttgttaccgcgaattccttagattttaatgcctggaccgcacttattgaggaaacagagaaaaatgctgagaacaatattttgaagatacggaaagtgtatgattcgtttcttgcggaattccctctttgctttgggtattggaagaaatatgctgaccatgaagcgagacttgatggtgtgagtaaagttatagaggtgtatgaacgagcagttctcgcagttacttattcagtggacatttggtataactattgtcagtttgcaatttcaacatatgatgattcagatatcatacgaagactgtttgaacgtggcttggcatatgttggaacagattatcattccaatattttgtgggatgagtatattaagtatgaagagtcactggaggcttggagtcatctagctgatatatatacaagagtattggagcatcccatccagcagcttgatcggtattttaattgcctcaaggaattggcttcgaagcacagtttatcagaaatacttactgcagaagaagcctcgttgtatgttgtcacatctgagaccactgctcaagcgcctgatggtgaggcacatcctgatgatgttgataagcttggtcaaccagaaatttcgtcttcaacagacgcagaaagccttgcaaagtatgtctccatgagggaagagatgtacaggaaggctaaagagtatgaatctaagatcattggttttgagctagctattagaaggccatattttcatgtcaagcctcttgacaatccagagcttgaaaattggcataactaccttgactacatcgagaaggaagaagacattaataagtatttggacgaagcttcctttgtaatgggatattgaactgaggatagagcgtggacataatgtttggtttcgatgaggctaagtatttgcttaatgctcaccttcttaaccatctatctatcgagcaggatggtccctcctttcttatggaggggcctccgtaatcagctaatggagttataaaattgtatgaaaggtgtgtgattgcatgtgctagttattcagaattctggatccgctatgtgcaatgtatggaggataaaaggagtctagacctagcaaacaatgccctggctcgtgctactcatgtgtttgtcaagaagcagccggagatccatctgtttagtgcgcgctttaaggagcttaatggcgatatttttggagcacgtgcagaatatcagcatctgtattcagatttatgccctggctttctagaggccattgtgaagcattctaatatggaacaccgactgggagataaagaattgtcctgttcagtttatgaaaaggtcatcgctgctgagaagggaaaggaacagagccagctcttaccaacattgcttattcagtactcccgtttcttatttttggccatcagagacttggagaaggcaagggagatattaactgtgctgcatgagcagttaaatttaacaaaaccagtgcttgaggctgtcatccatctagagtcgatttttccatgcgaaaagcgtattgaatttttagactcacttgtggagaagtttgttacacctgaatcatctcagggagagttggcaagtctagttgacaaagaagaaatatcttccatatttttagagtttttggatctctttggtgatgcaaagtcaatcaggaaggcttcaactcggcatacaactcttttttcatgtaagagaagcattctgccatcaaagaaacggaaggctgatgatgctgttgtgtcagacagggacaagtttgctaaaactgggtctgttcagtcagccacaggaactgatccaaatgcttccaatcctcctgtttggcctgcgacttctgaaacatctggacatcaatggggagcttcttatgctcagcaggctgcatatcctgcatatggaacttatgactacagccatcaaatgccacagcctgctcctcaaacagctgcctatggcgcttatcctccaacatactctgttcaggcctatacacaacaaagctacacacaacctgcagcaattccggcagcaccagtgccagcagtggtaccagcacctacaccggcgtcagcttaccctcagcaacctgcggcagctcctcaaccttattatggaacaacctactactgacaagtagagtaatcttcgatggcgatctgacgagcctgttaatcagcaggtttgtcgatacgaggtcaaaggcatcacaaaaccctctgtactgccattgtttagccccccttcagacagatgccgtcgacgagatgatcacttgagaacaaatttgagattggtatagtctgcatttttgtcgttagcatgtgtcgctagggattgctattgtttttcttgtaatagcataatctttactgtagaagaggcagcgggtgctaaccaatcctatgaacatataattaacattattcactgtttcatgccacctttcggagtgctttttttttcaaccactgatgatagcgggattcctgtcaagcacgctcactggtgaagtcctcggaacaaaattgtcaagatctgcgactacacagttcactgatttctactgtcactgtaggtcaaactatcttgatttgactaatttggaagggag

SEQ ID NO: 6693 - DNA, 3097 bp, Zea Mays
ccacgccgctgcgcttccgatgcaaccctaaccacctcatcgccggcacgatcttccccgcccccactccccggctattgcctctgattggcggctctccgggattcacgttggtccggggtacggctcctgcgattttcacgcaatggagcaagatcagagcgtggttgtcggcagcgcggactctggtgctgcggcttttggttttgcgactggcaacccccctagcttggctgtgaccggcggaagcgccgtggcccccgacggtggagctcaggcagctgatgcctctgcgtaccaggccgagcacacggcgttgaatgggactgtcggcgatatgggtaattacccatctacaggagctgcagagaacggcgaagccgtccccaacgagacgggcgagccggttcctgagctatcgtacgaagaagaagaggctaggttatggagtgttgttaccgcgaattccttagattttaatgcctggaccgcacttattgaggaaacagagaaaaatgctgagaacaatattttgaagatacggaaagtgtatgattcgtttcttgcggaattccctctttgctttgggtattggaagaaatatgctgaccatgaagcgagacttgatggtgtgagtaaagttatagaggtgtatgaacgagcagttctcgcagttacttattcagtggacatttggtataactattgtcagtttgcaatttcaacatatgatgattcagatatcatacgaagactgtttgaacgtggcttggcatatgttggaacagattatcattccaatattttgtgggatgagtatattaagtatgaagagtcactggaggcttggagtcatctagctgatatatatacaagagtattggagcatcccatccagcagcttgatcggtattttaattgcctcaaggaattggcttcgaagcacagtttatcagaaatacttactgcagaagaagcctcgttgtatgttgtcacatctgagaccactgctcaagcgcctgatggtgaggcacatcctgatgatgttgataagcttggtcaaccagaaatttcgtcttcaacagacgcagaaagccttgcaaagtatgtctccatgagggaagagatgtacaggaaggctaaagagtatgaatctaagatcattggttttgagctagctattagaaggccatattttcatgtcaagcctcttgacaatccagagcttgaaaattggcataactaccttgactacatcgagaaggaagaagacattaataagtatttggacgaagcttcctttgtaatgggatattgaactgaggatagagcgtggacataatgtttggtttcgatgaggctaagtatttgcttaatgctcaccttcttaaccatctatctatcgagcaggatggtccctcctttcttatggaggggcctccgtaatcagctaatggagttataaaattgtatgaaaggtgtgtgattgcatgtgctagttattcagaattctggatccgctatgtgcaatgtatggaggataaaaggagtctagacctagcaaacaatgccctggctcgtgctactcatgtgtttgtcaagaagcagccggagatccatctgtttagtgcgcgctttaaggagcttaatggcgatatttttggagcacgtgcagaatatcagcatctgtattcagatttatgccctggctttctagaggccattgtgaagcattctaatatggaacaccgactgggagataaagaattgtcctgttcagtttatgaaaaggtcatcgctgctgagaagggaaaggaacagagccagctcttaccaacattgcttattcagtactcccgtttcttatttttggccatcagagacttggagaaggcaagggagatattaactgtgctgcatgagcagttaaatttaacaaaaccagtgcttgaggctgtcatccatctagagtcgatttttccatgcgaaaagcgtattgaatttttagactcacttgtggagaagtttgttacacctgaatcatctcagggagagttggcaagtctagttgacaaagaagaaatatcttccatatttttagagtttttggatctctttggtgatgcaaagtcaatcaggaaggcttcaactcggcatacaactcttttttcatgtaagagaagcattctgccatcaaagaaacggaaggctgatgatgctgttgtgtcagacagggacaagtttgctaaaactgggtctgttcagtcagccacaggaactgatccaaatgcttccaatcctcctgtttggcctgcgacttctgaaacatctggacatcaatggggagcttcttatgctcagcaggctgcatatcctgcatatggaacttatgactacagccatcaaatgccacagcctgctcctcaaacagctgcctatggcgcttatcctccaacatactctgttcaggcctatacacaacaaagctacacacaacctgcagcaattccggcagcaccagtgccagcagtggtaccagcacctacaccggcgtcagcttaccctcagcaacctgcggcagctcctcaaccttattatggaacaacctactactgacaagtagagtaatcttcgatggcgatctgacgagcctgttaatcagcaggtttgtcgatacgaggtcaaaggcatcacaaaaccctctgtactgccattgtttagccccccttcagacagatgccgtcgacgagatgatcacttgagaacaaatttgagattggtatagtctgcatttttgtcgttagcatgtgtcgctagggattgctattgtttttcttgtaatagcataatctttactgtagaagaggcagcgggtgctaaccaatcctatgaacatataattaacattattcactgtttcatgccacctttcggagtgctttttttttcaaccactgatgatagcgggattcctgtcaagcacgctcactggtgaagtcctcggaacaaaattgtcaagatctgcgactacacagttcactgatttctactgtcactgtaggtcaaactatcttgatttgactaatttggaagggag

SEQ ID NO: 6694 - DNA, 3138 bp, Zea Mays
cagtcctccaaccccaatcctctcctttccatccacgccgctgcgcttccgatgcaaccctaaccacctcatcgccggcacgatcttccccgcccccactccccggctattgcctctgattggcggctctccgggattcacgttggtccggggtacggctcctgcgattttcacgcaatggagcaagatcagagcgtggttgtcggcagcgcggactctggtgctgcggcttttggttttgcgactggcaacccccctagcttggctgtgaccggcggaagcgccgtggcccccgacggtggagctcaggcagctgatgcctctgcgtaccaggccgagcacacggcgttgaatgggactgtcggcgatatgggtaattacccatctacaggagctgcagagaacggcgaagccgtccccaacgagacgggcgagccggttcctgagctatcgtacgaagaagccgtgctttcagcagaagaggctaggttatggagtgttgttaccgcgaattccttagattttaatgcctggaccgcacttattgaggaaacagagaaaaatgctgagaacaatattttgaagatacggaaagtgtatgattcgtttcttgcggaattccctctttgctttgggtattggaagaaatatgctgaccatgaagcgagacttgatggtgtgagtaaagttatagaggtgtatgaacgagcagttctcgcagttacttattcagtggacatttggtataactattgtcagtttgcaatttcaacatatgatgattcagatatcatacgaagactgtttgaacgtggcttggcatatgttggaacagattatcattccaatattttgtgggatgagtatattaagtatgaagagtcactggaggcttggagtcatctagctgatatatatacaagagtattggagcatcccatccagcagcttgatcggtattttaattgcctcaaggaattggcttcgaagcacagtttatcagaaatacttactgcagaagaagcctcgttgtatgttgtcacatctgagaccactgctcaagcgcctgatggtgaggcacatcctgatgatgttgataagcttggtcaaccagaaatttcgtcttcaacagacgcagaaagccttgcaaagtatgtctccatgagggaagagatgtacaggaaggctaaagagtatgaatctaagatcattggttttgagctagctattagaaggccatattttcatgtcaagcctcttgacaatccagagcttgaaaattggcataactaccttgactacatcgagaaggaagaagacattaataagcttcctttgtaatgggatattgaactgaggatagagcgtggacataatgtttggtttcgatgaggctaagtatttgcttaatgctcaccttcttaaccatctatctatcgagcaggatggtccctcctttcttatggaggggcctccgtaatcagctaatggagtaatctgttataaaattgtatgaaaggtgtgtgattgcatgtgctagttattcagaattctggatccgctatgtgcaatgtatggaggataaaaggagtctagacctagcaaacaatgccctggctcgtgctactcatgtgtttgtcaagaagcagccggagatccatctgtttagtgcgcgctttaaggagcttaatggcgatatttttggagcacgtgcagaatatcagcatctgtattcagatttatgccctggctttctagaggccattgtgaagcattctaatatggaacaccgactgggagataaagaattgtcctgttcagtttatgaaaaggtcatcgctgctgagaagggaaaggaacagagccagctcttaccaacattgcttattcagtactcccgtttcttatttttggccatcagagacttggagaaggcaagggagatattaactgtgctgcatgagcagttaaatttaacaaaaccagtgcttgaggctgtcatccatctagagtcgatttttccatgcgaaaagcgtattgaatttttagactcacttgtggagaagtttgttacacctgaatcatctcagggagagttggcaagtctagttgacaaagaagaaatatcttccatatttttagagtttttggatctctttggtgatgcaaagtcaatcaggaaggcttcaactcggcatacaactcttttttcatgtaagagaagcattctgccatcaaagaaacggaaggctgatgatgctgttgtgtcagacagggacaagtttgctaaaactgggtctgttcagtcagccacaggaactgatccaaatgcttccaatcctcctgtttggcctgcgacttctgaaacatctggacatcaatggggagcttcttatgctcagcaggctgcatatcctgcatatggaacttatgactacagccatcaaatgccacagcctgctcctcaaacagctgcctatggcgcttatcctccaacatactctgttcaggcctatacacaacaaagctacacacaacctgcagcaattccggcagcaccagtgccagcagtggtaccagcacctacaccggcgtcagcttaccctcagcaacctgcggcagctcctcaaccttattatggaacaacctactactgacaagtagagtaatcttcgatggcgatctgacgagcctgttaatcagcaggtttgtcgatacgaggtcaaaggcatcacaaaaccctctgtactgccattgtttagccccccttcagacagatgccgtcgacgagatgatcacttgagaacaaatttgagattggtatagtctgcatttttgtcgttagcatgtgtcgctagggattgctattgtttttcttgtaatagcataatctttactgtagaagaggcagcgggtgctaaccaatcctatgaacatataattaacattattcactgtttcatgccacctttcggagtgctttttttttcaaccactgatgatagcgggattcctgtcaagcacgctcactggtgaagtcctcggaacaaaattgtcaagatctgcgactacacagttcactgatttctactgtcactgtaggtcaaactatcttgatttgactaatttggaagggag

SEQ ID NO: 6695 - DNA, 3147 bp, Zea Mays
cccatctccagtcctccaaccccaatcctctcctttccatccacgccgctgcgcttccgatgcaaccctaaccacctcatcgccggcacgatcttccccgcccccactccccggctattgcctctgattggcggctctccgggattcacgttggtccggggtacggctcctgcgattttcacgcaatggagcaagatcagagcgtggttgtcggcagcgcggactctggtgctgcggcttttggttttgcgactggcaacccccctagcttggctgtgaccggcggaagcgccgtggcccccgacggtggagctcaggcagctgatgcctctgcgtaccaggccgagcacacggcgttgaatgggactgtcggcgatatgggtaattacccatctacaggagctgcagagaacggcgaagccgtccccaacgagacgggcgagccggttcctgagctatcgtacgaagaagccgtgctttcagcagaagaggctaggttatggagtgttgttaccgcgaattccttagattttaatgcctggaccgcacttattgaggaaacagagaaaaatgctgagaacaatattttgaagatacggaaagtgtatgattcgtttcttgcggaattccctctttgctttgggtattggaagaaatatgctgaccatgaagcgagacttgatggtgtgagtaaagttatagaggtgtatgaacgagcagttctcgcagttacttattcagtggacatttggtataactattgtcagtttgcaatttcaacatatgatgattcagatatcatacgaagactgtttgaacgtggcttggcatatgttggaacagattatcattccaatattttgtgggatgagtatattaagtatgaagagtcactggaggcttggagtcatctagctgatatatatacaagagtattggagcatcccatccagcagcttgatcggtattttaattgcctcaaggaattggcttcgaagcacagtttatcagaaatacttactgcagaagaagcctcgttgtatgttgtcacatctgagaccactgctcaagcgcctgatggtgaggcacatcctgatgatgttgataagcttggtcaaccagaaatttcgtcttcaacagacgcagaaagccttgcaaagtatgtctccatgagggaagagatgtacaggaaggctaaagagtatgaatctaagatcattggttttgagctagctattagaaggccatattttcatgtcaagcctcttgacaatccagagcttgaaaattggcataactaccttgactacatcgagaaggaagaagacattaataagtatttggacgaagcttcctttgtaatgggatattgaactgaggatagagcgtggacataatgtttggtttcgatgaggtatttgcttaatgctcaccttcttaaccatctatctatcgagcaggatggtccctcctttcttatggaggggcctccgtaatcagctaatggagttataaaattgtatgaaaggtgtgtgattgcatgtgctagttattcagaattctggatccgctatgtgcaatgtatggaggataaaaggagtctagacctagcaaacaatgccctggctcgtgctactcatgtgtttgtcaagaagcagccggagatccatctgtttagtgcgcgctttaaggagcttaatggcgatatttttggagcacgtgcagaatatcagcatctgtattcagatttatgccctggctttctagaggccattgtgaagcattctaatatggaacaccgactgggagataaagaattgtcctgttcagtttatgaaaaggtcatcgctgctgagaagggaaaggaacagagccagctcttaccaacattgcttattcagtactcccgtttcttatttttggccatcagagacttggagaaggcaagggagatattaactgtgctgcatgagcagttaaatttaacaaaaccagtgcttgaggctgtcatccatctagagtcgatttttccatgcgaaaagcgtattgaatttttagactcacttgtggagaagtttgttacacctgaatcatctcagggagagttggcaagtctagttgacaaagaagaaatatcttccatatttttagagtttttggatctctttggtgatgcaaagtcaatcaggaaggcttcaactcggcatacaactcttttttcatgtaagagaagcattctgccatcaaagaaacggaaggctgatgatgctgttgtgtcagacagggacaagtttgctaaaactgggtctgttcagtcagccacaggaactgatccaaatgcttccaatcctcctgtttggcctgcgacttctgaaacatctggacatcaatggggagcttcttatgctcagcaggctgcatatcctgcatatggaacttatgactacagccatcaaatgccacagcctgctcctcaaacagctgcctatggcgcttatcctccaacatactctgttcaggcctatacacaacaaagctacacacaacctgcagcaattccggcagcaccagtgccagcagtggtaccagcacctacaccggcgtcagcttaccctcagcaacctgcggcagctcctcaaccttattatggaacaacctactactgacaagtagagtaatcttcgatggcgatctgacgagcctgttaatcagcaggtttgtcgatacgaggtcaaaggcatcacaaaaccctctgtactgccattgtttagccccccttcagacagatgccgtcgacgagatgatcacttgagaacaaatttgagattggtatagtctgcatttttgtcgttagcatgtgtcgctagggattgctattgtttttcttgtaatagcataatctttactgtagaagaggcagcgggtgctaaccaatcctatgaacatataattaacattattcactgtttcatgccacctttcggagtgctttttttttcaaccactgatgatagcgggattcctgtcaagcacgctcactggtgaagtcctcggaacaaaattgtcaagatctgcgactacacagttcactgatttctactgtcactgtaggtcaaactatcttgatttgactaatttggaagggag

SEQ ID NO: 6696 - DNA, 3060 bp, Zea Mays
ctctttacccatctccagtcctccaaccccaatcctctcctttccatccacgccgctgcgcttccgatgcaaccctaaccacctcatcgccggcacgatcttccccgcccccactccccggctattgcctctgattggcggctctccgggattcacgttggtccggggtacggctcctgcgattttcacgcaatggagcaagatcagagcgtggttgtcggcagcgcggactctggtgctgcggcttttggttttgcgactggcaacccccctagcttggctgtgaccggcggaagcgccgtggcccccgacggtggagctcaggcagctgatgcctctgcgtaccaggccgagcacacggcgttgaatgggactgtcggcgatatgggtaattacccatctacaggagctgcagagaacggcgaagccgtccccaacgagacgggcgagccggttcctgagctatcgtacgaagaagccgtgctttcagcagaagaggctaggttatggagtgttgttaccgcgaattccttagattttaatgcctggaccgcacttattgaggaaacagagaaaaatgctgagaacaatattttgaagatacggaaagtgtatgattcgtttcttgcggaattccctctttgctttgggtattggaagaaatatgctgaccatgaagcgagacttgatggtgtgagtaaagttatagaggtgtatgaacgagcagttctcgcagttacttattcagtggacatttggtataactattgtcagtttgcaatttcaacatatgatgattcagatatcatacgaagactgtttgaacgtggcttggcatatgttggaacagattatcattccaatattttgtgggatgagtatattaagtatgaagagtcactggaggcttggagtcatctagctgatatatatacaagagtattggagcatcccatccagcagcttgatcggtattttaattgcctcaaggaattggcttcgaagcacagtttatcagaaatacttactgcagaagaagcctcgttgtatgttgtcacatctgagaccactgctcaagcgcctgatggtgaggcacatcctgatgatgttgataagcttggtcaaccagaaatttcgtcttcaacagacgcagaaagccttgcaaagtatgtctccatgagggaagagatgtacaggaaggctaaagagtatgaatctaagatcattggttttgagctagctattagaaggccatattttcatgtcaagcctcttgacaatccagagcttgaaaattggcataactaccttgactacatcgagaaggaagaagacattaataagtatttggacgaagcttcctttgtaatgggatattgaactgaggatagagcgtggacataatgtttggtttcgatgaggttataaaattgtatgaaaggtgtgtgattgcatgtgctagttattcagaattctggatccgctatgtgcaatgtatggaggataaaaggagtctagacctagcaaacaatgccctggctcgtgctactcatgtgtttgtcaagaagcagccggagatccatctgtttagtgcgcgctttaaggagcttaatggcgatatttttggagcacgtgcagaatatcagcatctgtattcagatttatgccctggctttctagaggccattgtgaagcattctaatatggaacaccgactgggagataaagaattgtcctgttcagtttatgaaaaggtcatcgctgctgagaagggaaaggaacagagccagctcttaccaacattgcttattcagtactcccgtttcttatttttggccatcagagacttggagaaggcaagggagatattaactgtgctgcatgagcagttaaatttaacaaaaccagtgcttgaggctgtcatccatctagagtcgatttttccatgcgaaaagcgtattgaatttttagactcacttgtggagaagtttgttacacctgaatcatctcagggagagttggcaagtctagttgacaaagaagaaatatcttccatatttttagagtttttggatctctttggtgatgcaaagtcaatcaggaaggcttcaactcggcatacaactcttttttcatgtaagagaagcattctgccatcaaagaaacggaaggctgatgatgctgttgtgtcagacagggacaagtttgctaaaactgggtctgttcagtcagccacaggaactgatccaaatgcttccaatcctcctgtttggcctgcgacttctgaaacatctggacatcaatggggagcttcttatgctcagcaggctgcatatcctgcatatggaacttatgactacagccatcaaatgccacagcctgctcctcaaacagctgcctatggcgcttatcctccaacatactctgttcaggcctatacacaacaaagctacacacaacctgcagcaattccggcagcaccagtgccagcagtggtaccagcacctacaccggcgtcagcttaccctcagcaacctgcggcagctcctcaaccttattatggaacaacctactactgacaagtagagtaatcttcgatggcgatctgacgagcctgttaatcagcaggtttgtcgatacgaggtcaaaggcatcacaaaaccctctgtactgccattgtttagccccccttcagacagatgccgtcgacgagatgatcacttgagaacaaatttgagattggtatagtctgcatttttgtcgttagcatgtgtcgctagggattgctattgtttttcttgtaatagcataatctttactgtagaagaggcagcgggtgctaaccaatcctatgaacatataattaacattattcactgtttcatgccacctttcggagtgctttttttttcaaccactgatgatagcgggattcctgtcaagcacgctcactggtgaagtcctcggaacaaaattgtcaagatctgcgactacacagttcactgatttctactgtcactgtaggtcaaactatcttgatttgactaatttggaagggag

SEQ ID NO: 6697 - DNA, 3278 bp, Zea Mays
ctctttacccatctccagtcctccaaccccaatcctctcctttccatccacgccgctgcgcttccgatgcaaccctaaccacctcatcgccggcacgatcttccccgcccccactccccggctattgcctctgattggcggctctccgggattcacgttggtccggggtacggctcctgcgattttcacgcaatggagcaagatcagagcgtggttgtcggcagcgcggactctggtgctgcggcttttggttttgcgactggcaacccccctagcttggctgtgaccggcggaagcgccgtggcccccgacggtggagctcaggcagctgatgcctctgcgtaccaggccgagcacacggcgttgaatgggactgtcggcgatatgggtaattacccatctacaggagctgcagagaacggcgaagccgtccccaacgagacgggcgagccggttcctgagctatcgtacgaagaagccgtgctttcagcagaagaggctaggttatggagtgttgttaccgcgaattccttagattttaatgcctggaccgcacttattgaggaaacagagaaaaatgctgagaacaatattttgaagatacggaaagtgtatgattcgtttcttgcggaattccctctttgctttgggtattggaagaaatatgctgaccatgaagcgagacttgatggtgtgagtaaagttatagaggtgtatgaacgagcagttctcgcagttacttattcagtggacatttggtataactattgtcagtttgcaatttcaacatatgatgattcagatatcatacgaagactgtttgaacgtggcttggcatatgttggaacagattatcattccaatattttgtgggatgagtatattaagtatgaagagtcactggaggcttggagtcatctagctgatatatatacaagagtattggagcatcccatccagcagcttgatcggtattttaattgcctcaaggaattggcttcgaagcacagtttatcagaaatacttactgcagaagaagcctcgttgtatgttgtcacatctgagaccactgctcaagcgcctgatggtgaggcacatcctgatgatgttgataagcttggtcaaccagaaatttcgtcttcaacagacgcagaaagccttgcaaagtatgtctccatgagggaagagatgtacaggaaggctaaagagtatgaatctaagatcattggttttgagctagctattagaaggccatattttcatgtcaagcctcttgacaatccagagcttgaaaattggcataactaccttgactacatcgagaaggaagaagacattaataaggtatgcttttacacttctagaaaccccttgtccttatttactagtttttattatcgaacgcttggaatcctataacttacaatccagtcttattggttccactatatcctttaacggctagtatttggacgaagcttcctttgtaatgggatattgaactgaggatagagcgtggacataatgtttggtttcgatgaggttataaaattgtatgaaaggtgtgtgattgcatgtgctagttattcagaattctggatccgctatgtgcaatgtatggaggataaaaggagtctagacctagcaaacaatgccctggctcgtgctactcatgtgtttgtcaagaagcagccggagatccatctgtttagtgcgcgctttaaggagcttaatggcgatatttttggagcacgtgcagaatatcagcatctgtattcagatttatgccctggctttctagaggccattgtgaagcattctaatatggaacaccgactgggagataaagaattgtcctgttcagtttatgaaaaggtcatcgctgctgagaagggaaaggaacagagccagctcttaccaacattgcttattcagtactcccgtttcttatttttggccatcagagacttggagaaggcaagggagatattaactgtgctgcatgagcagttaaatttaacaaaaccagtgcttgaggctgtcatccatctagagtcgatttttccatgcgaaaagcgtattgaatttttagactcacttgtggagaagtttgttacacctgaatcatctcagggagagttggcaagtctagttgacaaagaagaaatatcttccatatttttagaggtaacacaatagaagttgtatatagatgtggaactctccttaaagtcaaagttacaattaatcctgatgatctatgtatgcacaactatcaaatatgtttttggatctctttggtgatgcaaagtcaatcaggaaggcttcaactcggcatacaactcttttttcatgtaagagaagcattctgccatcaaagaaacggaaggctgatgatgctgttgtgtcagacagggacaagtttgctaaaactgggtctgttcagtcagccacaggaactgatccaaatgcttccaatcctcctgtttggcctgcgacttctgaaacatctggacatcaatggggagcttcttatgctcagcaggctgcatatcctgcatatggaacttatgactacagccatcaaatgccacagcctgctcctcaaacagctgcctatggcgcttatcctccaacatactctgttcaggcctatacacaacaaagctacacacaacctgcagcaattccggcagcaccagtgccagcagtggtaccagcacctacaccggcgtcagcttaccctcagcaacctgcggcagctcctcaaccttattatggaacaacctactactgacaagtagagtaatcttcgatggcgatctgacgagcctgttaatcagcaggtttgtcgatacgaggtcaaaggcatcacaaaaccctctgtactgccattgtttagccccccttcagacagatgccgtcgacgagatgatcacttgagaacaaatttgagattggtatagtctgcatttttgtcgttagcatgtgtcgctagggattgctattgtttttcttgtaatagcataatctttactgtagaagaggcagcgggtgctaaccaatcctatgaacatataattaacattattcactgtttcatgccacctttcggagtgctttttttttcaaccactgatgatagcgggattcctgtcaagcacgctcactggtgaagtcctcggaacaaaattgtcaagatctgcgactacacagttcactgatttctactgtcactgtaggtcaaactatcttgatttgactaatttggaagggag

SEQ ID NO: 6698 - DNA, 3176 bp, Zea Mays
ctcgggctctctttacccatctccagtcctccaaccccaatcctctcctttccatccacgccgctgcgcttccgatgcaaccctaaccacctcatcgccggcacgatcttccccgcccccactccccggctattgcctctgattggcggctctccgggattcacgttggtccggggtacggctcctgcgattttcacgcaatggagcaagatcagagcgtggttgtcggcagcgcggactctggtgctgcggcttttggttttgcgactggcaacccccctagcttggctgtgaccggcggaagcgccgtggcccccgacggtggagctcaggcagctgatgcctctgcgtaccaggccgagcacacggcgttgaatgggactgtcggcgatatgggtaattacccatctacaggagctgcagagaacggcgaagccgtccccaacgagacgggcgagccggttcctgagctatcgtacgaagaagccgtgctttcagcagaagaggctaggttatggagtgttgttaccgcgaattccttagattttaatgcctggaccgcacttattgaggaaacagagaaaaatgctgagaacaatattttgaagatacggaaagtgtatgattcgtttcttgcggaattccctctttgctttgggtattggaagaaatatgctgaccatgaagcgagacttgatggtgtgagtaaagttatagaggtgtatgaacgagcagttctcgcagttacttattcagtggacatttggtataactattgtcagtttgcaatttcaacatatgatgattcagatatcatacgaagactgtttgaacgtggcttggcatatgttggaacagattatcattccaatattttgtgggatgagtatattaagtatgaagagtcactggaggcttggagtcatctagctgatatatatacaagagtattggagcatcccatccagcagcttgatcggtattttaattgcctcaaggaattggcttcgaagcacagtttatcagaaatacttactgcagaagaagcctcgttgtatgttgtcacatctgagaccactgctcaagcgcctgatggtgaggcacatcctgatgatgttgataagcttggtcaaccagaaatttcgtcttcaacagacgcagaaagccttgcaaagtatgtctccatgagggaagagatgtacaggaaggctaaagagtatgaatctaagatcattggttttgagctagctattagaaggccatattttcatgtcaagcctcttgacaatccagagcttgaaaattggcataactaccttgactacatcgagaaggaagaagacattaataagtatttggacgaagcttcctttgtaatgggatattgaactgaggatagagcgtggacataatgtttggtttcgatgaggctaagtatttgcttaatgctcaccttcttaaccatctatctatcgagcaggatggtccctcctttcttatggaggggcctccgtaatcagctaatggagtaatctgtgttataaaattgtatgaaaggtgtgtgattgcatgtgctagttattcagaattctggatccgctatgtgcaatgtatggaggataaaaggagtctagacctagcaaacaatgccctggctcgtgctactcatgtgtttgtcaagaagcagccggagatccatctgtttagtgcgcgctttaaggagcttaatggcgatatttttggagcacgtgcagaatatcagcatctgtattcagatttatgccctggctttctagaggccattgtgaagcattctaatatggaacaccgactgggagataaagaattgtcctgttcagtttatgaaaaggtcatcgctgctgagaagggaaaggaacagagccagctcttaccaacattgcttattcagtactcccgtttcttatttttggccatcagagacttggagaaggcaagggagatattaactgtgctgcatgagcagttaaatttaacaaaaccagtgcttgaggctgtcatccatctagagtcgatttttccatgcgaaaagcgtattgaatttttagactcacttgtggagaagtttgttacacctgaatcatctcagggagagttggcaagtctagttgacaaagaagaaatatcttccatatttttagagtttttggatctctttggtgatgcaaagtcaatcaggaaggcttcaactcggcatacaactcttttttcatgtaagagaagcattctgccatcaaagaaacggaaggctgatgatgctgttgtgtcagacagggacaagtttgctaaaactgggtctgttcagtcagccacaggaactgatccaaatgcttccaatcctcctgtttggcctgcgacttctgaaacatctggacatcaatggggagcttcttatgctcagcaggctgcatatcctgcatatggaacttatgactacagccatcaaatgccacagcctgctcctcaaacagctgcctatggcgcttatcctccaacatactctgttcaggcctatacacaacaaagctacacacaacctgcagcaattccggcagcaccagtgccagcagtggtaccagcacctacaccggcgtcagcttaccctcagcaacctgcggcagctcctcaaccttattatggaacaacctactactgacaagtagagtaatcttcgatggcgatctgacgagcctgttaatcagcaggtttgtcgatacgaggtcaaaggcatcacaaaaccctctgtactgccattgtttagccccccttcagacagatgccgtcgacgagatgatcacttgagaacaaatttgagattggtatagtctgcatttttgtcgttagcatgtgtcgctagggattgctattgtttttcttgtaatagcataatctttactgtagaagaggcagcgggtgctaaccaatcctatgaacatataattaacattattcactgtttcatgccacctttcggagtgctttttttttcaaccactgatgatagcgggattcctgtcaagcacgctcactggtgaagtcctcggaacaaaattgtcaagatctgcgactacacagttcactgatttctactgtcactgtaggtcaaactatcttgatttgactaatttggaagggag

SEQ ID NO: 6699 - DNA, 3174 bp, Zea Mays
ctcgggctctctttacccatctccagtcctccaaccccaatcctctcctttccatccacgccgctgcgcttccgatgcaaccctaaccacctcatcgccggcacgatcttccccgcccccactccccggctattgcctctgattggcggctctccgggattcacgttggtccggggtacggctcctgcgattttcacgcaatggagcaagatcagagcgtggttgtcggcagcgcggactctggtgctgcggcttttggttttgcgactggcaacccccctagcttggctgtgaccggcggaagcgccgtggcccccgacggtggagctcaggcagctgatgcctctgcgtaccaggccgagcacacggcgttgaatgggactgtcggcgatatgggtaattacccatctacaggagctgcagagaacggcgaagccgtccccaacgagacgggcgagccggttcctgagctatcgtacgaagaagccgtgctttcagcagaagaggctaggttatggagtgttgttaccgcgaattccttagattttaatgcctggaccgcacttattgaggaaacagagaaaaatgctgagaacaatattttgaagatacggaaagtgtatgattcgtttcttgcggaattccctctttgctttgggtattggaagaaatatgctgaccatgaagcgagacttgatggtgtgagtaaagttatagaggtgtatgaacgagcagttctcgcagttacttattcagtggacatttggtataactattgtcagtttgcaatttcaacatatgatgattcagatatcatacgaagactgtttgaacgtggcttggcatatgttggaacagattatcattccaatattttgtgggatgagtatattaagtatgaagagtcactggaggcttggagtcatctagctgatatatatacaagagtattggagcatcccatccagcagcttgatcggtattttaattgcctcaaggaattggcttcgaagcacagtttatcagaaatacttactgcagaagaagcctcgttgtatgttgtcacatctgagaccactgctcaagcgcctgatggtgaggcacatcctgatgatgttgataagcttggtcaaccagaaatttcgtcttcaacagacgcagaaagccttgcaaagtatgtctccatgagggaagagatgtacaggaaggctaaagagtatgaatctaagatcattggttttgagctagctattagaaggccatattttcatgtcaagcctcttgacaatccagagcttgaaaattggcataactaccttgactacatcgagaaggaagaagacattaataagtatttggacgaagcttcctttgtaatgggatattgaactgaggatagagcgtggacataatgtttggtttcgatgaggctaagtatttgcttaatgctcaccttcttaaccatctatctatcgagcaggatggtccctcctttcttatggaggggcctccgtaatcagctaatggagtaatctgttataaaattgtatgaaaggtgtgtgattgcatgtgctagttattcagaattctggatccgctatgtgcaatgtatggaggataaaaggagtctagacctagcaaacaatgccctggctcgtgctactcatgtgtttgtcaagaagcagccggagatccatctgtttagtgcgcgctttaaggagcttaatggcgatatttttggagcacgtgcagaatatcagcatctgtattcagatttatgccctggctttctagaggccattgtgaagcattctaatatggaacaccgactgggagataaagaattgtcctgttcagtttatgaaaaggtcatcgctgctgagaagggaaaggaacagagccagctcttaccaacattgcttattcagtactcccgtttcttatttttggccatcagagacttggagaaggcaagggagatattaactgtgctgcatgagcagttaaatttaacaaaaccagtgcttgaggctgtcatccatctagagtcgatttttccatgcgaaaagcgtattgaatttttagactcacttgtggagaagtttgttacacctgaatcatctcagggagagttggcaagtctagttgacaaagaagaaatatcttccatatttttagagtttttggatctctttggtgatgcaaagtcaatcaggaaggcttcaactcggcatacaactcttttttcatgtaagagaagcattctgccatcaaagaaacggaaggctgatgatgctgttgtgtcagacagggacaagtttgctaaaactgggtctgttcagtcagccacaggaactgatccaaatgcttccaatcctcctgtttggcctgcgacttctgaaacatctggacatcaatggggagcttcttatgctcagcaggctgcatatcctgcatatggaacttatgactacagccatcaaatgccacagcctgctcctcaaacagctgcctatggcgcttatcctccaacatactctgttcaggcctatacacaacaaagctacacacaacctgcagcaattccggcagcaccagtgccagcagtggtaccagcacctacaccggcgtcagcttaccctcagcaacctgcggcagctcctcaaccttattatggaacaacctactactgacaagtagagtaatcttcgatggcgatctgacgagcctgttaatcagcaggtttgtcgatacgaggtcaaaggcatcacaaaaccctctgtactgccattgtttagccccccttcagacagatgccgtcgacgagatgatcacttgagaacaaatttgagattggtatagtctgcatttttgtcgttagcatgtgtcgctagggattgctattgtttttcttgtaatagcataatctttactgtagaagaggcagcgggtgctaaccaatcctatgaacatataattaacattattcactgtttcatgccacctttcggagtgctttttttttcaaccactgatgatagcgggattcctgtcaagcacgctcactggtgaagtcctcggaacaaaattgtcaagatctgcgactacacagttcactgatttctactgtcactgtaggtcaaactatcttgatttgactaatttggaagggag

SEQ ID NO: 6700 - DNA, 3087 bp, Zea Mays
ctcgggctctctttacccatctccagtcctccaaccccaatcctctcctttccatccacgccgctgcgcttccgatgcaaccctaaccacctcatcgccggcacgatcttccccgcccccactccccggctattgcctctgattggcggctctccgggattcacgttggtccggggtacggctcctgcgattttcacgcaatggagcaagatcagagcgtggttgtcggcagcgcggactctggtgctgcggcttttggttttgcgactggcaacccccctagcttggctgtgaccggcggaagcgccgtggcccccgacggtggagctcaggcagctgatgcctctgcgtaccaggccgagcacacggcgttgaatgggactgtcggcgatatgggtaattacccatctacaggagctgcagagaacggcgaagccgtccccaacgagacgggcgagccggttcctgagctatcgtacgaagaagccgtgctttcagcagaagaggctaggttatggagtgttgttaccgcgaattccttagattttaatgcctggaccgcacttattgaggaaacagagaaaaatgctgagaacaatattttgaagatacggaaagtgtatgattcgtttcttgcggaattccctctttgctttgggtattggaagaaatatgctgaccatgaagcgagacttgatggtgtgagtaaagttatagaggtgtatgaacgagcagttctcgcagttacttattcagtggacatttggtataactattgtcagtttgcaatttcaacatatgatgattcagatatcatacgaagactgtttgaacgtggcttggcatatgttggaacagattatcattccaatattttgtgggatgagtatattaagtatgaagagtcactggaggcttggagtcatctagctgatatatatacaagagtattggagcatcccatccagcagcttgatcggtattttaattgcctcaaggaattggcttcgaagcacagtttatcagaaatacttactgcagaagaagcctcgttgtatgttgtcacatctgagaccactgctcaagcgcctgatggtgaggcacatcctgatgatgttgataagcttggtcaaccagaaatttcgtcttcaacagacgcagaaagccttgcaaagtatgtctccatgagggaagagatgtacaggaaggctaaagaagcttgaaaattggcataactaccttgactacatcgagaaggaagaagacattaataagtatttggacgaagcttcctttgtaatgggatattgaactgaggatagagcgtggacataatgtttggtttcgatgaggctaagtactccaaactttcatttggcagtggtcgttctgggttcatgtatatgataccaaataccagttttgaatttttaatctcatatatgcaggttataaaattgtatgaaaggtgtgtgattgcatgtgctagttattcagaattctggatccgctatgtgcaatgtatggaggataaaaggagtctagacctagcaaacaatgccctggctcgtgctactcatgtgtttgtcaagaagcagccggagatccatctgtttagtgcgcgctttaaggagcttaatggcgatatttttggagcacgtgcagaatatcagcatctgtattcagatttatgccctggctttctagaggccattgtgaagcattctaatatggaacaccgactgggagataaagaattgtcctgttcagtttatgaaaaggtcatcgctgctgagaagggaaaggaacagagccagctcttaccaacattgcttattcagtactcccgtttcttatttttggccatcagagacttggagaaggcaagggagatattaactgtgctgcatgagcagttaaatttaacaaaaccagtgcttgaggctgtcatccatctagagtcgatttttccatgcgaaaagcgtattgaatttttagactcacttgtggagaagtttgttacacctgaatcatctcagggagagttggcaagtctagttgacaaagaagaaatatcttccatatttttagagtttttggatctctttggtgatgcaaagtcaatcaggaaggcttcaactcggcatacaactcttttttcatgtaagagaagcattctgccatcaaagaaacggaaggctgatgatgctgttgtgtcagacagggacaagtttgctaaaactgggtctgttcagtcagccacaggaactgatccaaatgcttccaatcctcctgtttggcctgcgacttctgaaacatctggacatcaatggggagcttcttatgctcagcaggctgcatatcctgcatatggaacttatgactacagccatcaaatgccacagcctgctcctcaaacagctgcctatggcgcttatcctccaacatactctgttcaggcctatacacaacaaagctacacacaacctgcagcaattccggcagcaccagtgccagcagtggtaccagcacctacaccggcgtcagcttaccctcagcaacctgcggcagctcctcaaccttattatggaacaacctactactgacaagtagagtaatcttcgatggcgatctgacgagcctgttaatcagcaggtttgtcgatacgaggtcaaaggcatcacaaaaccctctgtactgccattgtttagccccccttcagacagatgccgtcgacgagatgatcacttgagaacaaatttgagattggtatagtctgcatttttgtcgttagcatgtgtcgctagggattgctattgtttttcttgtaatagcataatctttactgtagaagaggcagcgggtgctaaccaatcctatgaacatataattaacattattcactgtttcatgccacctttcggagtgctttttttttcaaccactgatgatagcgggattcctgtcaagcacgctcactggtgaagtcctcggaacaaaattgtcaagatctgcgactacacagttcactgatttctactgtcactgtaggtcaaactatcttgatttgactaatttggaagggag

SEQ ID NO: 6701 - DNA, 2815 bp, Zea Mays
cgtcggcttgccagccgcaggccctcgggctctctttacccatctccagtcctccaaccccaatcctctcctttccatccacgccgctgcgcttccgatgcaaccctaaccacctcatcgccggcacgatcttccccgcccccactccccggctattgcctctgattggcggctctccgggattcacgttggtccggggtacggctcctgcgattttcacgcaatggagcaagatcagagcgtggttgtcggcagcgcggactctggtgctgcggcttttggttttgcgactggcaacccccctagcttggctgtgaccggcggaagcgccgtggcccccgacggtggagctcaggcagctgatgcctctgcgtaccaggccgagcacacggcgttgaatgggactgtcggcgatatgggtaattacccatctacaggagctgcagagaacggcgaagccgtccccaacgagacgggcgagccggttcctgagctatcgtacgaagaagccgtgctttcagcagaagaggctaggttatggagtgttgttaccgcgaattccttagattttaatgcctggaccgcacttattgaggaaacagagaaaaatgctgagaacaatattttgaagatacggaaagtgtatgattcgtttcttgcggaattccctctttgctttgggtattggaagaaatatgctgaccatgaagcgagacttgatggtactgtttgaacgtggcttggcatatgttggaacagattatcattccaatattttgtgggatgagtatattaagtatgaagagtcactggaggcttggagtcatctagctgatatatatacaagagtattggagcatcccatccagcagcttgatcggtattttaattgcctcaaggaattggcttcgaagcacagtttatcagaaatacttactgcagaagaagcctcgttgtatgttgtcacatctgagaccactgctcaagcgcctgatggtgaggcacatcctgatgatgttgataagcttggtcaaccagaaatttcgtcttcaacagacgcagaaagccttgcaaagtatgtctccatgagggaagagatgtacaggaaggctaaagaagcttgaaaattggcataactaccttgactacatcgagaaggaagaagacattaataaggttataaaattgtatgaaaggtgtgtgattgcatgtgctagttattcagaattctggatccgctatgtgcaatgtatggaggataaaaggagtctagacctagcaaacaatgccctggctcgtgctactcatgtgtttgtcaagaagcagccggagatccatctgtttagtgcgcgctttaaggagcttaatggcgatatttttggagcacgtgcagaatatcagcatctgtattcagatttatgccctggctttctagaggccattgtgaagcattctaatatggaacaccgactgggagataaagaattgtcctgttcagtttatgaaaaggtcatcgctgctgagaagggaaaggaacagagccagctcttaccaacattgcttattcagtactcccgtttcttatttttggccatcagagacttggagaaggcaagggagatattaactgtgctgcatgagcagttaaatttaacaaaaccagtgcttgaggctgtcatccatctagagtcgatttttccatgcgaaaagcgtattgaatttttagactcacttgtggagaagtttgttacacctgaatcatctcagggagagttggcaagtctagttgacaaagaagaaatatcttccatatttttagagtttttggatctctttggtgatgcaaagtcaatcaggaaggcttcaactcggcatacaactcttttttcatgtaagagaagcattctgccatcaaagaaacggaaggctgatgatgctgttgtgtcagacagggacaagtttgctaaaactgggtctgttcagtcagccacaggaactgatccaaatgcttccaatcctcctgtttggcctgcgacttctgaaacatctggacatcaatggggagcttcttatgctcagcaggctgcatatcctgcatatggaacttatgactacagccatcaaatgccacagcctgctcctcaaacagctgcctatggcgcttatcctccaacatactctgttcaggcctatacacaacaaagctacacacaacctgcagcaattccggcagcaccagtgccagcagtggtaccagcacctacaccggcgtcagcttaccctcagcaacctgcggcagctcctcaaccttattatggaacaacctactactgacaagtagagtaatcttcgatggcgatctgacgagcctgttaatcagcaggtttgtcgatacgaggtcaaaggcatcacaaaaccctctgtactgccattgtttagccccccttcagacagatgccgtcgacgagatgatcacttgagaacaaatttgagattggtatagtctgcatttttgtcgttagcatgtgtcgctagggattgctattgtttttcttgtaatagcataatctttactgtagaagaggcagcgggtgctaaccaatcctatgaacatataattaacattattcactgtttcatgccacctttcggagtgctttttttttcaaccactgatgatagcgggattcctgtcaagcacgctcactggtgaagtcctcggaacaaaattgtcaagatctgcgactacacagttcactgatttctactgtcactgtaggtcaaactatcttgatttgactaatttggaagggag

SEQ ID NO: 6702 - DNA, 3263 bp, Zea Mays
acgcccacagcccatgggctagctaacccttcgcgtgcgacgtcggcttgccagccgcaggccctcgggctctctttacccatctccagtcctccaaccccaatcctctcctttccatccacgccgctgcgcttccgatgcaaccctaaccacctcatcgccggcacgatcttccccgcccccactccccggctattgcctctgattggcggctctccgggattcacgttggtccggggtacggctcctgcgattttcacgcaatggagcaagatcagagcgtggttgtcggcagcgcggactctggtgctgcggcttttggttttgcgactggcaacccccctagcttggctgtgaccggcggaagcgccgtggcccccgacggtggagctcaggcagctgatgcctctgcgtaccaggccgagcacacggcgttgaatgggactgtcggcgatatgggtaattacccatctacaggagctgcagagaacggcgaagccgtccccaacgagacgggcgagccggttcctgagctatcgtacgaagaagccgtgctttcagcagaagaggctaggttatggagtgttgttaccgcgaattccttagattttaatgcctggaccgcacttattgaggaaacagagaaaaatgctgagaacaatattttgaagatacggaaagtgtatgattcgtttcttgcggaattccctctttgctttgggtattggaagaaatatgctgaccatgaagcgagacttgatggtgtgagtaaagttatagaggtgtatgaacgagcagttctcgcagttacttattcagtggacatttggtataactattgtcagtttgcaatttcaacatatgatgattcagatatcatacgaagactgtttgaacgtggcttggcatatgttggaacagattatcattccaatattttgtgggatgagtatattaagtatgaagagtcactggaggcttggagtcatctagctgatatatatacaagagtattggagcatcccatccagcagcttgatcggtattttaattgcctcaaggaattggcttcgaagcacagtttatcagaaatacttactgcagaagaagcctcgttgtatgttgtcacatctgagaccactgctcaagcgcctgatggtgaggcacatcctgatgatgttgataagcttggtcaaccagaaatttcgtcttcaacagacgcagaaagccttgcaaagtatgtctccatgagggaagagatgtacaggaaggctaaagagtatgaatctaagatcattggttttgagctagctattagaaggccatattttcatgtcaagcctcttgacaatccagagcttgaaaattggcataactaccttgactacatcgagaaggaagaagacattaataaggtatttgcttaatgctcaccttcttaaccatctatctatcgagcaggatggtccctcctttcttatggaggggcctccgtaatcagctaatggagtaatctgtgtgaacttctctttttttgtcaataccatatccttactatcattatttaccctctttattttgtctcgtacacaagatttctgatgttatgttaaactgttttcaggttataaaattgtatgaaaggtgtgtgattgcatgtgctagttattcagaattctggatccgctatgtgcaatgtatggaggataaaaggagtctagacctagcaaacaatgccctggctcgtgctactcatgtgtttgtcaagaagcagccggagatccatctgtttagtgcgcgctttaaggagcttaatggcgatatttttggagcacgtgcagaatatcagcatctgtattcagatttatgccctggctttctagaggccattgtgaagcattctaatatggaacaccgactgggagataaagaattgtcctgttcagtttatgaaaaggtcatcgctgctgagaagggaaaggaacagagccagctcttaccaacattgcttattcagtactcccgtttcttatttttggccatcagagacttggagaaggcaagggagatattaactgtgctgcatgagcagttaaatttaacaaaaccagtgcttgaggctgtcatccatctagagtcgatttttccatgcgaaaagcgtattgaatttttagactcacttgtggagaagtttgttacacctgaatcatctcagggagagttggcaagtctagttgacaaagaagaaatatcttccatatttttagagtttttggatctctttggtgatgcaaagtcaatcaggaaggcttcaactcggcatacaactcttttttcatgtaagagaagcattctgccatcaaagaaacggaaggctgatgatgctgttgtgtcagacagggacaagtttgctaaaactgggtctgttcagtcagccacaggaactgatccaaatgcttccaatcctcctgtttggcctgcgacttctgaaacatctggacatcaatggggagcttcttatgctcagcaggctgcatatcctgcatatggaacttatgactacagccatcaaatgccacagcctgctcctcaaacagctgcctatggcgcttatcctccaacatactctgttcaggcctatacacaacaaagctacacacaacctgcagcaattccggcagcaccagtgccagcagtggtaccagcacctacaccggcgtcagcttaccctcagcaacctgcggcagctcctcaaccttattatggaacaacctactactgacaagtagagtaatcttcgatggcgatctgacgagcctgttaatcagcaggtttgtcgatacgaggtcaaaggcatcacaaaaccctctgtactgccattgtttagccccccttcagacagatgccgtcgacgagatgatcacttgagaacaaatttgagattggtatagtctgcatttttgtcgttagcatgtgtcgctagggattgctattgtttttcttgtaatagcataatctttactgtagaagaggcagcgggtgctaaccaatcctatgaacatataattaacattattcactgtttcatgccacctttcggagtgctttttttttcaaccactgatgatagcgggattcctgtcaagcacgctcactggtgaagtcctcggaacaaaattgtcaagatctgcgactacacagttcactgatttctactgtcactgtaggtcaaactatcttgatttgactaatttggaagggag

SEQ ID NO: 6703 - DNA, 3167 bp, Zea Mays
cttggacctaggcggcgtaacttggtccaacgcccacagcccatgggctagctaacccttcgcgtgcgacgtcggcttgccagccgcaggccctcgggctctctttacccatctccagtcctccaaccccaatcctctcctttccatccacgccgctgcgcttccgatgcaaccctaaccacctcatcgccggcacgatcttccccgcccccactccccggctattgcctctgattggcggctctccgggattcacgttggtccggggtacggctcctgcgattttcacgcaatggagcaagatcagagcgtggttgtcggcagcgcggactctggtgctgcggcttttggttttgcgactggcaacccccctagcttggctgtgaccggcggaagcgccgtggcccccgacggtggagctcaggcagctgatgcctctgcgtaccaggccgagcacacggcgttgaatgggactgtcggcgatatgggtaattacccatctacaggagctgcagagaacggcgaagccgtccccaacgagacgggcgagccggttcctgagctatcgtacgaagaagccgtgctttcagcagaagaggctaggttatggagtgttgttaccgcgaattccttagattttaatgcctggaccgcacttattgaggaaacagagaaaaatgctgagaacaatattttgaagatacggaaagtgtatgattcgtttcttgcggaattccctctttgctttgggtattggaagaaatatgctgaccatgaagcgagacttgatggtgtgagtaaagttatagaggtgtatgaacgagcagttctcgcagttacttattcagtggacatttggtataactattgtcagtttgcaatttcaacatatgatgattcagatatcatacgaagactgtttgaacgtggcttggcatatgttggaacagattatcattccaatattttgtgggatgagtatattaagtatgaagagtcactggaggcttggagtcatctagctgatatatatacaagagtattggagcatcccatccagcagcttgatcggtattttaattgcctcaaggaattggcttcgaagcacagtttatcagaaatacttactgcagaagaagcctcgttgtatgttgtcacatctgagaccactgctcaagcgcctgatggtgaggcacatcctgatgatgttgataagcttggtcaaccagaaatttcgtcttcaacagacgcagaaagccttgcaaagtatgtctccatgagggaagagatgtacaggaaggctaaagagtatgaatctaagatcattggttttgagctagctattagaaggccatattttcatgtcaagcctcttgacaatccagagcttgaaaattggcataactaccttgactacatcgagaaggaagaagacattaataagtatttggacgaagcttcctttgtaatgggatattgaactgaggatagagcgtggacataatgtttggtttcgatgaggctaagtatttgcttaatgctcaccttcttaaccatctatctatcgagcaggatggtccctcctttcttatggaggggcctccgtaatcagctaatggagttataaaattgtatgaaaggtgtgtgattgcatgtgctagttattcagaattctggatccgctatgtgcaatgtatggaggataaaaggagtctagacctagcaaacaatgccctggctcgtgctactcatgtgtttgtcaagaagcagccggagatccatctgtttagtgcgcgctttaaggagcttaatggcgatatttttggagcacgtgcagaatatcagcatctgtattcagatttatgccctggctttctagaggccattgtgaagcattctaatatggaacaccgactgggagataaagaattgtcctgttcagtttatgaaaaggtcatcgctgctgagaagggaaaggaacagagccagctcttaccaacattgcttattcagtactcccgtttcttatttttggccatcagagacttggagaaggcaagggagatattaactgtgctgcatgagcagttaaatttaacaaaaccagtgcttgaggctgtcatccatctagagtcgatttttccatgcgaaaagcgtattgaatttttagactcacttgtggagaagtttgttacacctgaatcatctcagggagagttggcaagtctagttgacaaagaagaaatatcttccatatttttagagtttttggatctctttggtgatgcaaagtcaatcaggaaggcttcaactcggcatacaactcttttttcattcagccacaggaactgatccaaatgcttccaatcctcctgtttggcctgcgacttctgaaacatctggacatcaatggggagcttcttatgctcagcaggctgcatatcctgcatatggaacttatgactacagccatcaaatgccacagcctgctcctcaaacagctgcctatggcgcttatcctccaacatactctgttcaggcctatacacaacaaagctacacacaacctgcagcaattccggcagcaccagtgccagcagtggtaccagcacctacaccggcgtcagcttaccctcagcaacctgcggcagctcctcaaccttattatggaacaacctactactgacaagtagagtaatcttcgatggcgatctgacgagcctgttaatcagcaggtttgtcgatacgaggtcaaaggcatcacaaaaccctctgtactgccattgtttagccccccttcagacagatgccgtcgacgagatgatcacttgagaacaaatttgagattggtatagtctgcatttttgtcgttagcatgtgtcgctagggattgctattgtttttcttgtaatagcataatctttactgtagaagaggcagcgggtgctaaccaatcctatgaacatataattaacattattcactgtttcatgccacctttcggagtgctttttttttcaaccactgatgatagcgggattcctgtcaagcacgctcactggtgaagtcctcggaacaaaattgtcaagatctgcgactacacagttcactgatttctactgtcactgtaggtcaaactatcttgatttgactaatttggaagggag

SEQ ID NO: 6704 - DNA, 3006 bp, Zea Mays
cttggacctaggcggcgtaacttggtccaacgcccacagcccatgggctagctaacccttcgcgtgcgacgtcggcttgccagccgcaggccctcgggctctctttacccatctccagtcctccaaccccaatcctctcctttccatccacgccgctgcgcttccgatgcaaccctaaccacctcatcgccggcacgatcttccccgcccccactccccggctattgcctctgattggcggctctccgggattcacgttggtccggggtacggctcctgcgattttcacgcaatggagcaagatcagagcgtggttgtcggcagcgcggactctggtgctgcggcttttggttttgcgactggcaacccccctagcttggctgtgaccggcggaagcgccgtggcccccgacggtggagctcaggcagctgatgcctctgcgtaccaggccgagcacacggcgttgaatgggactgtcggcgatatgggtaattacccatctacaggagctgcagagaacggcgaagccgtccccaacgagacgggcgagccggttcctgagctatcgtacgaagaagccgtgctttcagcagaagaggctaggttatggagtgttgttaccgcgaattccttagattttaatgcctggaccgcacttattgaggaaacagagaaaaatgctgagaacaatattttgaagatacggaaagtgtatgattcgtttcttgcggaattccctctttgctttgggtattggaagaaatatgctgaccatgaagcgagacttgatggtgtgagtaaagttatagaggtgtatgaacgagcagttctcgcagttacttattcagtggacatttggtataactattgtcagtttgcaatttcaacatatgatgattcagatatcatacgaagactgtttgaacgtggcttggcatatgttggaacagattatcattccaatattttgtgggatgagtatattaagtatgaagagtcactggaggcttggagtcatctagctgatatatatacaagagtattggagcatcccatccagcagcttgatcggtattttaattgcctcaaggaattggcttcgaagcacagtttatcagaaatacttactgcagaagaagcctcgttgtatgttgtcacatctgagaccactgctcaagcgcctgatggtgaggcacatcctgatgatgttgataagcttggtcaaccagaaatttcgtcttcaacagacgcagaaagccttgcaaagtatgtctccatgagggaagagatgtacaggaaggctaaagaagcttgaaaattggcataactaccttgactacatcgagaaggaagaagacattaataaggttataaaattgtatgaaaggtgtgtgattgcatgtgctagttattcagaattctggatccgctatgtgcaatgtatggaggataaaaggagtctagacctagcaaacaatgccctggctcgtgctactcatgtgtttgtcaagaagcagccggagatccatctgtttagtgcgcgctttaaggagcttaatggcgatatttttggagcacgtgcagaatatcagcatctgtattcagatttatgccctggctttctagaggccattgtgaagcattctaatatggaacaccgactgggagataaagaattgtcctgttcagtttatgaaaaggtcatcgctgctgagaagggaaaggaacagagccagctcttaccaacattgcttattcagtactcccgtttcttatttttggccatcagagacttggagaaggcaagggagatattaactgtgctgcatgagcagttaaatttaacaaaaccagtgcttgaggctgtcatccatctagagtcgatttttccatgcgaaaagcgtattgaatttttagactcacttgtggagaagtttgttacacctgaatcatctcagggagagttggcaagtctagttgacaaagaagaaatatcttccatatttttagagtttttggatctctttggtgatgcaaagtcaatcaggaaggcttcaactcggcatacaactcttttttcatgtaagagaagcattctgccatcaaagaaacggaaggctgatgatgctgttgtgtcagacagggacaagtttgctaaaactgggtctgttcagtcagccacaggaactgatccaaatgcttccaatcctcctgtttggcctgcgacttctgaaacatctggacatcaatggggagcttcttatgctcagcaggctgcatatcctgcatatggaacttatgactacagccatcaaatgccacagcctgctcctcaaacagctgcctatggcgcttatcctccaacatactctgttcaggcctatacacaacaaagctacacacaacctgcagcaattccggcagcaccagtgccagcagtggtaccagcacctacaccggcgtcagcttaccctcagcaacctgcggcagctcctcaaccttattatggaacaacctactactgacaagtagagtaatcttcgatggcgatctgacgagcctgttaatcagcaggtttgtcgatacgaggtcaaaggcatcacaaaaccctctgtactgccattgtttagccccccttcagacagatgccgtcgacgagatgatcacttgagaacaaatttgagattggtatagtctgcatttttgtcgttagcatgtgtcgctagggattgctattgtttttcttgtaatagcataatctttactgtagaagaggcagcgggtgctaaccaatcctatgaacatataattaacattattcactgtttcatgccacctttcggagtgctttttttttcaaccactgatgatagcgggattcctgtcaagcacgctcactggtgaagtcctcggaacaaaattgtcaagatctgcgactacacagttcactgatttctactgtcactgtaggtcaaactatcttgatttgactaatttggaagggag

SEQ ID NO: 6705 - DNA, 1329 bp, Zea Mays
ccacgccgctgcgcttccgatgcaaccctaaccacctcatcgccggcacgatcttccccgcccccactccccggctattgcctctgattggcggctctccgggattcacgttggtccggggtacggctcctgcgattttcacgcaatggagcaagatcagagcgtggttgtcggcagcgcggactctggtgctgcggcttttggttttgcgactggcaacccccctagcttggctgtgaccggcggaagcgccgtggcccccgacggtggagctcaggcagctgatgcctctgcgtaccaggccgagcacacggcgttgaatgggactgtcggcgatatgggtaattacccatctacaggagctgcagagaacggcgaagccgtccccaacgagacgggcgagccggttcctgagctatcgtacgaagaagccgtgctttcagcagaagaggctaggttatggagtgttgttaccgcgaattccttagattttaatgcctggaccgcacttattgaggaaacagagaaaaatgctgagaacaatattttgaagatacggaaagtgtatgattcgtttcttgcggaattccctctttgctttgggtattggaagaaatatgctgaccatgaagcgagacttgatggtgtgagtaaagttatagaggtgtatgaacgagcagttctcgcagttacttattcagtggacatttggtataactattgtcagtttgcaatttcaacatatgatgattcagatatcatacgaagactgtttgaacgtggcttggcatatgttggaacagattatcattccaatattttgtgggatgagtatattaagtatgaagagtcactggaggcttggagtcatctagctgatatatatacaagagtattggagcatcccatccagcagcttgatcggtattttaattgcctcaaggaattggcttcgaagcacagtttatcagaaatacttactgcagaagaagcctcgttgtatgttgtcacatctgagaccactgctcaagcgcctgatggtgaggcacatcctgatgatgttgataagcttggtcaaccagaaatttcgtcttcaacagacgcagaaagccttgcaaagtatgtctccatgagggaagagatgtacaggaaggctaaagagtatgaatctaagatcattggttttgagctagctattagaaggccatattttcatgtcaagcctcttgacaatccagagcttgaaaattggcataactaccttgactacatcgagaaggaagaagacattaataagtggtcgttctgggttcatgtatatgataccaa

SEQ ID NO: 6706 - DNA, 865 bp, Zea Mays
tctgaattctgacgccgtcgatgcataacctcctcgtgcgttgtttgtctctctacttctctagtctagcccctctgtcgctctcagacgacgggtgcgccgccgccgccgccctaagccaggtgctgactgctgaggctttctttggtctcttcgccggcgacgacacccgccagtatccacggtgtcattgcaagacaagatggtttccttcgagatgaatgacctcaagatgggttctggccaacactttctgtgttcttgcagaggattcctatcatcggctggattttccaacaaccatttgtgacatcgttccttgaccgctacagaggaaaacgtgttccggtctagcaaccttttgcgcaatatatgcttgcggtgtagcaactagcagcctgtatttttttaactacagtagcaaactgattataccgatgtctgatccctcatgtttatatgttttctttaggattgctctttgtaaattacagccccaaactggccaaatcaaaggtccattcctttgagaccaggatgcaggttcacccatgaaatggatctgttgaagaaactcttaagcttgtatggaagtaaaagctaatatgttcctttatatgataatataagttatatattattgtgtggaccgagtttctgaacacaattgcggttcatgtaatcatgtatgtggctcgacccaggattactagaccttccaaatttttaaggggttatctaaatgattcacaatataactaggaaaaccttgaaaaaacacacatgagtggcacatgagaatcaacattttttgtgagggaggataaacaagttgtagtctccgtgtttggaaaaaatcagaaga

SEQ ID NO: 6707 - DNA, 1044 bp, Zea Mays
tctgaattctgacgccgtcgatgcataacctcctcgtgcgttgtttgtctctctacttctctagtctagcccctctgtcgctctcagacgacgggtgcgccgccgccgccgccctaagccaggtgctgactgctgaggctttctttggtctcttcgccggcgacgacacccgccagtatccacggtgtcattgcaagacaagatggtttccttcgagatgaatgacctcaagaattcttttcctgtcaggtttgggtttgacaattggtctgaaatcaactatgcagttcttcaccaagccaaagaattacaagggtactatctcatttggtgctggtttttttctggttctcattgggtggccgttttttggcatgctcttagaggcatatggctttattgtactcttcagtgggttctggccaacactttctgtgttcttgcagaggattcctatcatcggctggattttccaacaaccatttgtgacatcgttccttgaccgctacagaggaaaacgtgttccggtctagcaaccttttgcgcaatatatgcttgcggtgtagcaactagcagcctgtatttttttaactacagtagcaaactgattataccgatgtctgatccctcatgtttatatgttttctttaggattgctctttgtaaattacagccccaaactggccaaatcaaaggtccattcctttgagaccaggatgcaggttcacccatgaaatggatctgttgaagaaactcttaagcttgtatggaagtaaaagctaatatgttcctttatatgataatataagttatatattattgtgtggaccgagtttctgaacacaattgcggttcatgtaatcatgtatgtggctcgacccaggattactagaccttccaaatttttaaggggttatctaaatgattcacaatataactaggaaaaccttgaaaaaacacacatgagtggcacatgagaatcaacattttttgtgagggaggataaacaagttgtagtctccgtgtttggaaaaaatcagaaga

SEQ ID NO: 6708 - DNA, 1120 bp, Zea Mays
tctgaattctgacgccgtcgatgcataacctcctcgtgcgttgtttgtctctctacttctctagtctagcccctctgtcgctctcagacgacgggtgcgccgccgccgccgccctaagccaggtgctgactgctgaggctttctttggtctcttcgccggcgacgacacccgccagtatccacggtgtcattgcaagacaagatggtttccttcgagatgaatgacctcaagaagattgggcttggcctgacaggctttggaatattcttctcatttctgggaattgttttcttctttgacaaggggctcatcgcaatgggcaatgtttgggtttgacaattggtctgaaatcaactatgcagttcttcaccaagccaaagaattacaagggtactatctcatttggtgctggtttttttctggttctcattgggtggccgttttttggcatgctcttagaggcatatggctttattgtactcttcagtgggttctggccaacactttctgtgttcttgcagaggattcctatcatcggctggattttccaacaaccatttgtgacatcgttccttgaccgctacagaggaaaacgtgttccggtctagcaaccttttgcgcaatatatgcttgcggtgtagcaactagcagcctgtatttttttaactacagtagcaaactgattataccgatgtctgatccctcatgtttatatgttttctttaggattgctctttgtaaattacagccccaaactggccaaatcaaaggtccattcctttgagaccaggatgcaggttcacccatgaaatggatctgttgaagaaactcttaagcttgtatggaagtaaaagctaatatgttcctttatatgataatataagttatatattattgtgtggaccgagtttctgaacacaattgcggttcatgtaatcatgtatgtggctcgacccaggattactagaccttccaaatttttaaggggttatctaaatgattcacaatataactaggaaaaccttgaaaaaacacacatgagtggcacatgagaatcaacattttttgtgagggaggataaacaagttgtagtctccgtgtttggaaaaaatcagaaga

SEQ ID NO: 6709 - DNA, 1042 bp, Zea Mays
tctgaattctgacgccgtcgatgcataacctcctcgtgcgttgtttgtctctctacttctctagtctagcccctctgtcgctctcagacgacgggtgcgccgccgccgccgccctaagccaggtgctgactgctgaggctttctttggtctcttcgccggcgacgacacccgccagtatccacggtgtcattgcaagacaagatggtttccttcgagatgaatgacctcaagaagattgggcttggcctgacaggctttggaatattcttctcatttctgggaattgttttcttctttgacaaggggctcatcgcaatggattcttttcctgtcaggtttgggtttgacaattggtctgaaatcaactatgcagttcttcaccaagccaaagaattacaagggtactatctcatttggtgctggtttttttctggttctcattgggtggccgttttttggcatgctcttagaggcatatggctttattgtactcttcagtgggttctggccaacactttctgtgttcttgcagaggattcctatcatcggctggattttccaacaaccatttgtgacatcgttccttgaccgctacagaggaaaacgtgttccggtctagcaaccttttgcgcaatatatgcttgcggtgattgctctttgtaaattacagccccaaactggccaaatcaaaggtccattcctttgagaccaggatgcaggttcacccatgaaatggatctgttgaagaaactcttaagcttgtatggaagtaaaagctaatatgttcctttatatgataatataagttatatattattgtgtggaccgagtttctgaacacaattgcggttcatgtaatcatgtatgtggctcgacccaggattactagaccttccaaatttttaaggggttatctaaatgattcacaatataactaggaaaaccttgaaaaaacacacatgagtggcacatgagaatcaacattttttgtgagggaggataaacaagttgtagtctccgtgtttggaaaaaatcagaaga

SEQ ID NO: 6710 - DNA, 1055 bp, Zea Mays
tgcggctctttctgaattctgacgccgtcgatgcataacctcctcgtgcgttgtttgtctctctacttctctagtctagcccctctgtcgctctcagacgacgggtgcgccgccgccgccgccctaagccaggtgctgactgctgaggctttctttggtctcttcgccggcgacgacacccgccagtatccacggtgtcattgcaagacaagatggtttccttcgagatgaatgacctcaagaagattgggcttggcctgacaggctttggaatattcttctcatttctgggaattgttttcttctttgacaaggggctcatcgcaatgggcaatattcttttcctgtcaggtttgggtttgacaattggtctgaaatcaactatgcagttcttcaccaagccaaagaattacaagggtactatctcatttggtgctggtttttttctggttctcattgggtggccgttttttggcatgctcttagaggcatatggctttattgtactcttcagtgggttctggccaacactttctgtgttcttgcagaggattcctatcatcggctggattttccaacaaccatttgtgacatcgttccttgaccgctacagaggaaaacgtgttccggtctagcaaccttttgcgcaatatatgcttgcggattgctctttgtaaattacagccccaaactggccaaatcaaaggtccattcctttgagaccaggatgcaggttcacccatgaaatggatctgttgaagaaactcttaagcttgtatggaagtaaaagctaatatgttcctttatatgataatataagttatatattattgtgtggaccgagtttctgaacacaattgcggttcatgtaatcatgtatgtggctcgacccaggattactagaccttccaaatttttaaggggttatctaaatgattcacaatataactaggaaaaccttgaaaaaacacacatgagtggcacatgagaatcaacattttttgtgagggaggataaacaagttgtagtctccgtgtttggaaaaaatcagaaga

SEQ ID NO: 6711 - DNA, 2948 bp, Zea Mays
ttgttaagcaggtctgggttgcctaacctttcaccagataatgctagttgcagccttgatgactggtggagcagagctgtggggaagattccccgtgatctccaatccggcttcaattctctagttattcttggcgcttggagcctttggcgtcatcgcaacgactgcgtgtttaatgggagatcgccaagcctggcgagtgctctcaccctcgctggcgatgagctcaggatgtggtgtagtgccggggcaaaagggttgaacctgctttcaactcttatgtttatgcttgacccagggggatagtctagcggcttgttcagagtggatgtgtgtggttgctgtgttgtgtcttgtgtcttgttgtgtcatgtgtgtgtgtgtcgtgtcaggtgtgtgtcgggtgtggtgtgttgtaccttcttctatctattaatggaatgatacgcagatctcctgcgtgttcgagaaaaaaaaatgtgatatccttcccgtgcaaatatttgggtctaccactatcagtacgtaaactttccaagcatgatttccttgaactcatcgataaaatggctgatagacttccggggtggaaggcctcaatgatcaacctggctgggagaacaactctggtaaaagcagtgttaactgctatccctatctatcacttaattgctcttcaatgtcccaagtgggtcatcaaggccattgataaaattcggagaggatttctttggaaaggccgtaaagatgtcaaaggaggccattgtatggttagttgggcaaaggtttgtaggccattggaccttggcgggctaggtctgcacaatttagaggtccttggttgggctcttagtatgaggtagctttggatgaagaaaactcaaccgaatcctatgtgggctgatttgaaaattagagtacaccccaatgctgcagccatgtttgcatgttcagtggtttctttggcaggagacggatcccaaacctccttttggacggatcgctggctccatggacaggctctgtgtgacttggctccggtccttgtctctcgggttccgaacagattttctccaaagtagaacaatgaaggatgccttgactaaaaatggctgggtaaatgatatctcgggaagcatatcagctcaatttctatctgagtacttcatggtctgggacctgattcaaggcttccaacttcgcccaggagtttcagaccaacaccgctggaccccttctgcctctaaatctgcttatcatcgtttctttgaggggatggtcacctttgaaccagcagcaagggtctggaaaagttgggcacctccaagatgtaaatttttcatctggctggcttctttaaatcgctgctggacagcggatcgattggctcgtcgaggtttggaccatcccacaaaatgccttctttgtgatcaggaagaagaaaccatgcaacacattctgttacaatgtgtttttgctagggaagtttggtttcataccctctctcttattgggctgcagcacctcactccaggaactgcggaatctagttttcaagactggtggcataggtcaggaacgacagttcaaaaggcacaaaagaaaggattcaattcagctgtgatcctagtggcctggtggttgtggaaacacagaaactcttgtgtctttgatggggctactccagacatctctaggattactcaagacattagggtcgatgccaagatgtggtgtctagctggggctacagggctgaaaggtttgtggccttaactcagggagagttcaggcctggtcgtcttttatatagtcatctgtgtaatgtccccttagcaaactttgtaaccacctttatttggtggtcattgtccaggtctattttggtcggaccttttcttcttcttaatataatgatgcgcaactctcctgcgcgttcgagaaaaaaatatggcagtgaagacagaagttggaaatggagaaaacactctattttggaaggataattggattgaaggacaatctatgcaggagccggctcccaatctgtccaaggctatcccaaccagaactagaaacaagagaacagttgctcaaggtttgttggggagaggttgggtaagggacattagaggagctctcacttttcctgtaattcaggattattttatgatgtgggaaattttagaagcctttgagttgaatgttggggttgaggatcaacacaaatggaggcttgaccaatctagcatttattctagccagtctgcctataaccgattttttttgcaatttagcatttctggaaaaaaaatcatgtttggcccccttagacgacttaatgtcgtttttgtaccctttgcttggtgtcataggctatggcgccgagcaatgagatacgctagcttcccttgtcgtgctagaggctaacgtggcctagctcagcgccatggatcttggcgccgagctcgcggccactaagaccttagtcaccgctgcacatctgctagctatcgcagaggcgtaaataactctaccaaactctgccattacctttcctgtgtccgtgttaggggtgaaagcgggacggatacaggcatatacagggtcatcccgtatctaatcctaatgtatttctctcggatacaggatcgggtacgggtagttaaaattcgggacagatacaggacgggaccagataataattcaggcgggtaagaaacagatatcagatattactcgggtagataacggatatttgtcggatagttcgtcctgataatattagttgtccaaccgtccaacaaacaaataaaataagaaatatataatcatgtacatgatagattaaatatagaaaaataaatccatagtagatagctgacatgaatggattttaattcatatgatagttgacattatttttttattgactccccatggagccc

SEQ ID NO: 6712 - DNA, 2031 bp, Zea Mays
tagtagtggtagcgacggtggtgctagcggtggcggtggtttgagcggaggatttcttgagccgcttgaggcgacgaggtagggaagcagcgggggacgcgggcagggcgagcacccggcgggatctgatttgcggggaggatccgagggggagggggatcggtggatctgcgcgacgaccgggaggtggggagtccctcgacactcgacaccaaatacccggaccgcgaacggccgcccgcttcgtggtcgcgcaaaatgccgccgaaacccgcgccccggctcttccagtacatctccaacaagtcgcgcaaaccgccgccgccaccagccgccagatccgctgcgcccggcagccacgacggcaccgcgtccgatgccgacgtcggtgaggtgtaccgcatcgtcacgtccgcggccacgccgtccgcgatggagtccgcgctcgcggcgtccgccgtctcgctctcgtccccgctcctcgacgccgtcatgcgccgcttccgcttcgcgcacggggacccgctccgcgcgctatcgctcctctccctcgccgccgaccgtggcggcatcgcgccgtcgccttacgccatcgacaccgcgctctacgtgctcggccgggcccgccgcttcccgcacatgtggaacctcgtcgcgaacacgcgccgcatatgtccggacgccctcaccccgcgcaccgccatgatcgtcctcggccgcgtcgccaaggtctgctccgtccgtgagacagtcgcctccttccgctgcctcgcgcgacttttccacaccgtcgacccggccgtactcttcaacgcgctgctccgcacgctctgccaggagaagagcatgtccgacgcgcgcaacgtcttccacgcgctcaagtacgagttccgagtgaaccgccacaccttcaacatcctcctctctggctggaagtcggccgaggacgccgaggcgttcgtcaccgaaatgcgggagctcggggtggagcctgacctggtgacctacaacagcttgatcgactgccactgcaagaaccgggacgtgcagaaggcctacaagctgctcgacgaaatgcggcacaaagacatttcccctgatattatcacttacacaagcttgattggcggactggggttgattggccaacccgacaaggcaaaagatttgctcaaggagatgtatgagctagggtgctacccagatgtccctgcatacaatgcagcaataaggaattttgttatagcgaagaggcttggagatgcattcgcactgatggatcaaatggtctcaaagggactgatgccaaatcccacaacttataaccttttcttcaggtgctattactgggctttcgacattggcagcgcatggcggttatatgagcgtatgcggtctgaaggatgttacccaaacacacagtcttgcatgttcattatcaggttgtgccaccggtatgggaaggtggcactggcacttgagctatggagcgatatggtcagcagcagctttggatcattaacgctggtatcagatgtgctgttggacctgctgtgtgacgaggggaagttggaggacgctgagaggtgcttctgtcagatggttgagttagggcaaaagcccagtaatgttgcatttagaaggataaagatacttatgcagcttgccaaacaggaagaatcaattgccagattaactgaaaagatgatacaatttggtcgactgccaccagtggattgccaaagagtccaacactctgttgaaagcaggcctagtaatggtgatgcagctgacgctgatatattgagagcagcttagtgcatacatttggatgatggcgatcatgaatacatcattaaactattttgttgacaagatgaacacttatgccccgtttatttcctttcattttgaggaattggaatcttactattgcattaggctatttttttagaatgtgacattccaccactttccaaagttatcatataagcctaactcaaattcatggggtgagagatggaaattgat

SEQ ID NO: 6713 - DNA, 741 bp, Zea Mays
gtatcaaataaaaaggatagtttcatagaatgtcaaagagccactccaaagatattcttttagataaaaatccctcttgtaaaggaaaacaagctttagcttaaaataaccatttaacccatcgatccatggattgaaaactataatagtgtcagatgctggactaaatccaactagcaaaaaaggctgcagaaacataccactgcaaaaggaatggtttgaatatgtatttcaaggttcagcgatattttttaaaattaagacctctgcatgatgttagtcatcaaacagtaagcagtgtacatttaatacttggtaaaatctaaaatgggagctacaaaaacataccagagccgaaaaaagtatgatgtttgttgtctttcgcgatacagttacctggcatgtttgttgtctttcagttcagtttggtgtctttcaatcagtttgatgaggctgataactaacaaaatagatgtctttcagttcagtttgtatactgtgatgtccactcaaaaccttcaaacatttccctatattacagtcaattaatttcacagtatggtcacctcaccactaacaaaataaatgtctttcagttcagtttgtatacaatgatcttgtggacgcaagtgtttttccatctggactgaaagcattagcaatagttgacctaggaggtggcaaaagagggcaaaacttggcaagccaacgatgcagggactgtgattctgccttgtatgt

SEQ ID NO: 6714 - DNA, 1246 bp, Zea Mays
cccgtcgccgtcaccgtacgctggtcatgggctcttggcatccgtcgtccgtcccacgccacgccacgccacagtgcctcctcgcagcttcatccactcgtctcccctccccacaccaaaaaaacaagcaagggtcagcagatagccgcattaaaaggagggaggtcacgtaaacttaatccaatccaccaaaccccaaatctctgtctcgcgctggcgcagcgcagggcaccgccacgcgcgcctcatccggtaccggcatgacgagcgcctccgagctcttcaccgcgcgccgtgccgcccgtggggcccgcctctccgacctcgacctggatccgcacgccgacgcgctccgggaccagcacggacttggcgcccggcaccggcgccgcgggtgccgcccgcgacgccagctcgacgccgccggggacgtgcggcagcacctgcacaccggggccccgccaccgcgtcgccgcgggtcgtacaccgatcagatcttatcgtacatagacaacaacaaccttggggttggggattctgcagctcggaggaacagacttgataggctgatgttcaggacaaatgagcggcttcctggtgctgtactgcaagcacaagcgcgtgtcctggagagactcagaggcatttctcttggttcatctgtgtccaggccatccatctcattagatgaattttcagctagcgatgtattcagaatcatcgacttcagaaacagggaagcacggcatgaagaaaatcggcaccactcatcgtcgttccacccaagcagtgaatcagatgaagaaagaccaaccgtcggttccactcactccaaccggtcaaccggacttaccaaggcagctttcctgcgtctgcaggtcgagatttttgaggctagcaaagatgatagcagagaggcatcgcctgaatgttctatttgccttgatggattttacgatggagatgagctgataaggttgcgctgtgggcacaggttccactcgacatgcttggagccatgggcgcggaaatgtgcagactgcccatactgtcgaacgaacatacggtcacgatcctgacgacaaacccttagttcagaggcgaggaacatgacttcgctatgatgcggttaaaaatgctctgcaaaatactaggctgaaggagtcaatgtcagtgtcaccagcttttacatttctctctctgagctgatttcttccaaaagcatcatcattattattattttttt

SEQ ID NO: 6715 - DNA, 1548 bp, Zea Mays
gaaatttccaatccagcgcgggcacccgtcgccgtcaccgtacgctggtcatgggctcttggcatccgtcgtccgtcccacgccacgccacgccacagtgcctcctcgcagcttcatccactcgtctcccctccccacaccaaaaaaacaagcaagggtcagcagatagccgcattaaaaggagggaggtcacgtaaacttaatccaatccaccaaaccccaaatctctgtctcgcgctggcgcagcgcagggcaccgccacgcgcgcctcatccggtaccggcatgacgagcgcctccgagctcttcaccgcgcgccgtgccgcccgtggggcccgcctctccgacctcgacctggatccgcacgccgacgcgctccgggaccagcacggacttggcgcccggcaccggcgccgcgggtgccgcccgcgacgccagctcgacgccgccggggacgtgcggcagcacctgcacaccggggccccgccaccgcgtcgccgcggatcttatcgtacatagacaacaacaaccttggggttggggattctgcagctcggaggaacagacttgataggctgatgttcaggacaaatgagcggcttcctggtgctgtactgcaagcacaagcgcgtgtcctggagagactcagaggcatttctcttggttcatctgtgtccaggccatccatctcattagatgaattttcagctagcgatgtattcagaatcatcgacttcagaaacagggaagcacggcatgaagaaaatcggcaccactcatcgtcgttccacccaagcagtgaatcagatgaagaaagaccaaccgtcggttccactcactccaaccggtcaaccggacttaccaaggcagctttcctgcgtctgcaggtcgagatttttgaggctagcaaagatgatagcagagaggcatcgcctgaatgttctatttgccttgatggattttacgatggagatgagctgataaggttgcgctgtgggcacaggttccactcgacatgcttggagccatgggcgcggaaatgtgcagactgcccatactgtcgaacgaacatacggtcacgatcctgacgacaaacccttagttcagagtaagcttataaccaccatggagtttcactgttgtaaaattcgctgttgtgggcatgccagttaatccggtgctcctatggcgacatgtaatttctaatatcctgaatattttgtgttgtgtcactcagagaggtttatggtgttgtgtgcgagtggaggctagtagcagtatagcttagaaagcacccttttgtgtgtatgtagcgagggatcacgcaaatgatcctgtactactaatgataatgttctgatgtctgaatttcagttgttactgcatgcttcttgttatgtagggcgaggaacatgacttcgctatgatgcggttaaaaatgctctgcaaaatactaggctgaaggagtcaatgtcagtgtcaccagcttttacatttctctctctgagctgatttcttccaaaagcatcatcattattattattttttt

SEQ ID NO: 6716 - DNA, 1162 bp, Zea Mays
caggcactgccggggcagggcagggcaggccgtcaggcacatcggcacagcagcgcgagccggcctagtcggaggagaaaaccccacacgcgcacacactggctgggtagacgccgctcgcgctccgccgctagaggctgcctgttttgctgccgcctcattgcttcgctcctcctccctcgccgccgcctcctcgtggcgagcgagtcgaatccattccctcccaccccacgggcgccggccgataccgacccagagctcggacgcgccgaggcgaggccaccgccggaagcattctcgcctgctcgccgcggggacggtagctacctaggggggggggggggggggtaaggaggagcgaggccgtcgccccgtccggtcttcgtgtgctgtgttcagcagctagcagtgcgtgccgagatgttcgcgagccggccggtggtgcacccgctggaggtggcggcgcccgcgcatccggtgcagcagccggcgccgggcgttctgatgaaggacctgcccgggatgccggggacgcccggaggcctcggcctccgcgtcctgcagctcctcttcgcagccatctcgctggccgtcatgtcgtccaccgccgacttcgccagtgtctccgccttctgatcacatggctagtgtccttatctggagcatgcgctgcggcaggaatcaccgtcctgatcgacgcagatctgatcatgtgctcagagaacccttgtgctagttttcagactgcagtggcaatggggttcatgtgctgtttctctctcttaccatcctttctcctgaacttttattcgatcgcatctagtcacggctagctgaaaagaaagaggaggatagaacctgatatcggagcagtttgagcatccaattgcggttttagtgacaacaggatagagtggcacagctgttagtgttagaattggaaggtgaaatatgtgtatggctcaccatatctagtttaacctgtaaaaaagaaatagggaacggcctgtttggccgcagctgcattaccttgcagttctatgtggtactactatgtaaaatgcttgaaaatgttatagttttaacgtgtcctgactcttcaaccatgtatattgcgagtgaagaggatgggaaatggtgctgaagaatttcgtagcagttc

SEQ ID NO: 6717 - DNA, 115 bp, Zea Mays
tgcgttccaactggaccaataccacaaaacaactcgctgaaaacagctgtggcagccacggccctaaactctggggagttgggacgactgcaacacaaacgtttgatggcactcc

SEQ ID NO: 6718 - DNA, 2200 bp, Zea Mays
tggctctccattgctcgggagctgggtattgcggcatctgaattggtgagcgacatcactgttcgtatagggactacaaagttttaccttcacaagtttccgctcctctccaagtgtgctcgctttcagaagttgattccaaccactggtgatgaaaatattgagatccacatccatgatattcctggtggcgcaaaggcttttggggtctgtgccaagttttgctacggcatgattgtcacactcaatgcctacaatgtgattgcagcccgctgtgctgcagagtacttggagatgaatgagactgttgacaagggcaatctgatctacaagattgatgtcttcctcagctcaagcatattccggagctggaaagactctattattgttcttggtacaacaaaggctcatctaccttgggcagaggatcttaagctggttagccaatgcattgactctgttgcttcaaaagcctctatcgacgtttcaaaagttgaatggtcatacacatacaatcggaagaagctcccaactgagaatggtcatgattcgccgtggaatggagtcaaccagcggcaggttgttccgaaggattggtgggtagaagatctgacggatctcgacattgatgcctacaagcaagtcataacagcagtcaaaaccaagggtatggtggccaaggacgtgatcggtgaggcaattaaagcctacacttacaagaagctgccgtcactaagcaaggtctcaatgatccatggcgacgcaaaagttcgggcgatgctagttacaatcacatgcctgttgccatctgagaaaggctcagtttcatgcagcttcctcttgaagctactgaaggcaaccaatttgctgaagtgcggcgatatgtgcaggaaagagcttatgaagcgcattgcacggcaattggaagaagcatcagtgtcagatcttctgatccctgcagtggatgaggacaccagtgtttacgacattgacctgattcttagcattgttgaagaatttatcagacaggatagtaagaatgcccagagacataatggtggcgaagtgaatgaccatgtatcagctcctagtgcatcaatgattacagtggcaaagattgttgatgggtatctggcagaggttgcgaaggacccaaatataccggtctacaagtttttcagtctcgctgagacagtctcggccaattcaaggccagtccatgacgggctctatcgcgccattgatatgtatctgaaggagcacccaagcttgggcaagagcgacaagaagaggctctgtgccctcatggactgcaggaagttgtcgcccgatgcatgcgctcacgctgtgcagaacgagcgcctgcctctgagggttgtggtgcaggtgctgtaccacgagcagacgagggcttctgcagcagccaccgtccgagctgacagcatcggcatcggctcctacgagagctcaaggtcaggggccacaacaaacacagaagacgagtgggacggcgtcatggccgtggaagacctcagtctgtcgtccaagacgacgaagctagagaaatgtgacgcagctagcaccgtctcggagaagaaccacggcggcaacaagggtgccaacggcagggcgaaaggtggcgtgatgccgaagaaggcggtcgggaggacgacgatgtcaggcaacaaagggcaggctggggagcgcagcagctcggactcatccgacagcgccattttgccttgccagctggagcatcccaagagggccgcagcaaggagcaccaccaagtcagccgctgtgtagtagtagctgcccggccctttgctcagtgagatgctcaaggagcactaggttttagcagtcgtcgtccgttcttttctttgcgttatgaatgttgcatagaagcaaggaccatgttcttaaacgtcttgtaggccgggagcccgggatggtacgcgtacgttgttaggtgatgttgttagcatgtaggcttgccatgaaacctatgagaccttgggttgtgctgtgagggtttatgtcataagaagcctactttgttagagagttgaagcacgactgttctgcagctgtgaattcttggtgttctgctgtgagatctgttaggtcgttcgaatggtcatctgaatatctgatcacagtgacttgtagctaggggctgtggtaaagggccctaaat

SEQ ID NO: 6719 - DNA, 1981 bp, Zea Mays
cacgagcgcgggcgcgggcagagggacagccgcatgtgcacgcgaccggcgcatgcacacacttgcgtggccgcatctggctccggctcgtcttccccgggcgggtgtgccggtattgcggcatctgaattggtgagcgacatcactgttcgtatagggactacaaagttttaccttcacaagtttccgctcctctccaagtgtgctcgctttcagaagttgattccaaccactggtgatgaaaatattgagatccacatccatgatattcctggtggcgcaaaggcttttggggtctgtgccaagttttgctacggcatgattgtcacactcaatgcctacaatgtgattgcagcccgctgtgctgcagagtacttggagatgaatgagactgttgacaagggcaatctgatctacaagattgatgtcttcctcagctcaagcatattccggagctggaaagactctattattgttcttggtacaacaaaggctcatctaccttgggcagaggatcttaagctggttagccaatgcattgactctgttgcttcaaaagcctctatcgacgtttcaaaagttgaatggtcatacacatacaatcggaagaagctcccaactgagaatggtcatgattcgccgtggaatggagtcaaccagcggcaggttgttccgaaggattggtgggtagaagatctgacggatctcgacattgatgcctacaagcaagtcataacagcagtcaaaaccaagggtatggtggccaaggacgtgatcggtgaggcaattaaagcctacacttacaagaagctgccgtcactaagcaaggtctcaatgatccatggcgacgcaaaagttcgggcgatgctagttacaatcacatgcctgttgccatctgagaaaggctcagtttcatgcagcttcctcttgaagctactgaaggcaaccaatttgctgaagtgcggcgatatgtgcaggaaagagcttatgaagcgcattgcacggcaattggaagaagcatcagtgtcagatcttctgatccctgcagtggatgaggacaccagtgtttacgacattgacctgattcttagcattgttgaagaatttatcagacaggatagtaagaatgcccagagacataatggtggcgaagtgaatgaccatgtatcagctcctagtgcatcaatgattacagtggcaaagattgttgatgggtatctggcagaggttgcgaaggacccaaatataccggtctacaagtttttcagtctcgctgagacagtctcggccaattcaaggccagtccatgacgggctctatcgcgccattgatatgtatctgaaggagcacccaagcttgggcaagagcgacaagaagaggctctgtgccctcatggactgcaggaagttgtcgcccgatgcatgcgctcacgctgtgcagaacgagcgcctgcctctgagggttgtggtgcaggtgctgtaccacgagcagacgagggcttctgcagcagccaccgtccgagctgacagcatcggcatcggctcctacgagagctcaaggagcaccaccaagtcagccgctgtgtagtagtagctgcccggccctttgctcagtgagatgctcaaggagcactaggttttagcagtcgtcgtccgttcttttctttgcgttatgaatgttgcatagaagcaaggaccatgttcttaaacgtcttgtaggccgggagcccgggatggtacgcgtacgttgttaggtgatgttgttagcatgtaggcttgccatgaaacctatgagaccttgggttgtgctgtgagggtttatgtcataagaagcctactttgttagagagttgaagcacgactgttctgcagctgtgaattcttggtgttctgctgtgagatctgttaggtcgttcgaatggtcatctgaatatctgatcacagtgacttgtagctaggggctgtggtaaagggccctaaat

SEQ ID NO: 6720 - DNA, 2468 bp, Zea Mays
ctcctcctccttcttcttggcatcttccgtcaaaggcaacttgttcttgtgcactgctacttcgctgctctgggccgtttgccgttgatgctgcggacaagtatgggatagtgctgctgtgctgtgcagttcttgcttcttacaactggtagtggtggtggtggtctggtctccgtgtgagcatttggtctagaagagcgtgaagctgcgcggctcttctttcttgttcaagatgaagttcatgaagcttggatcgaatccggatacctttcaggacgatgggaatgaagtcagtattgcggcatctgaattggtgagcgacatcactgttcgtatagggactacaaagttttaccttcacaagtttccgctcctctccaagtgtgctcgctttcagaagttgattccaaccactggtgatgaaaatattgagatccacatccatgatattcctggtggcgcaaaggcttttggggtctgtgccaagttttgctacggcatgattgtcacactcaatgcctacaatgtgattgcagcccgctgtgctgcagagtacttggagatgaatgagactgttgacaagggcaatctgatctacaagattgatgtcttcctcagctcaagcatattccggagctggaaagactctattattgttcttggtacaacaaaggctcatctaccttgggcagaggatcttaagctggttagccaatgcattgactctgttgcttcaaaagcctctatcgacgtttcaaaagttgaatggtcatacacatacaatcggaagaagctcccaactgagaatggtcatgattcgccgtggaatggagtcaaccagcggcaggttgttccgaaggattggtgggtagaagatctgacggatctcgacattgatgcctacaagcaagtcataacagcagtcaaaaccaagggtatggtggccaaggacgtgatcggtgaggcaattaaagcctacacttacaagaagctgccgtcactaagcaaggtctcaatgatccatggcgacgcaaaagttcgggcgatgctagttacaatcacatgcctgttgccatctgagaaaggctcagtttcatgcagcttcctcttgaagctactgaaggcaaccaatttgctgaagtgcggcgatatgtgcaggaaagagcttatgaagcgcattgcacggcaattggaagaagcatcagtgtcagatcttctgatccctgcagtggatgaggacaccagtgtttacgacattgacctgattcttagcattgttgaagaatttatcagacaggatagtaagaatgcccagagacataatggtggcgaagtgaatgaccatgtatcagctcctagtgcatcaatgattacagtggcaaagattgttgatgggtatctggcagaggttgcgaaggacccaaatataccggtctacaagtttttcagtctcgctgagacagtctcggccaattcaaggccagtccatgacgggctctatcgcgccattgatatgtatctgaaggagcacccaagcttgggcaagagcgacaagaagaggctctgtgccctcatggactgcaggaagttgtcgcccgatgcatgcgctcacgctgtgcagaacgagcgcctgcctctgagggttgtggtgcaggtgctgtaccacgagcagacgagggcttctgcagcagccaccgtccgagctgacagcatcggcatcggctcctacgagagctcaaggtcaggggccacaacaaacacagaagacgagtgggacggcgtcatggccgtggaagacctcagtctgtcgtccaagacgacgaagctagagaaatgtgacgcagctagcaccgtctcggagaagaaccacggcggcaacaagggtgccaacggcagggcgaaaggtggcgtgatgccgaagaaggcggtcgggaggacgacgatgtcaggcaacaaagggcaggctggggagcgcagcagctcggactcatccgacagcgccattttgccttgccagctggagcatcccaagagggccgcagcaaggagcaccaccaagtcagccgctgtgtagtagtagctgcccggccctttgctcagtgagatgctcaaggagcactaggttttagcagtcgtcgtccgttcttttctttgcgttatgaatgttgcatagaagcaaggaccatgttcttaaacgtcttgtaggccgggagcccgggatggtacgcgtacgttgttaggtgatgttgttagcatgtaggcttgccatgaaacctatgagaccttgggttgtgctgtgagggtttatgtcataagaagcctactttgttagagagttgaagcacgactgttctgcagctgtgaattcttggtgttctgctgtgagatctgttaggtcgttcgaatggtcatctgaatatctgatcacagtgacttgtagctaggggctgtggtaaagggccctaaat

SEQ ID NO: 6721 - DNA, 931 bp, Zea Mays
gaatttatggcttgaactgcaaaggccaaagcattcttgtgatggtctgactgattctttacagggtttatcaagtagtgaggtaaacagcgtagttgattggaggaaattttacttcgaaagatacatatttgctggtaaacttattggacgttactacgacagtgaaggaaatcctacgaaatatctgaagggtgtagaagtgaaggcaaagagaggtacacagcttcttgaaaaacagaagagtgatgaagctaaaatacctggctgcaattcaaaatggagccagcaagaaggtggtgaagtttggtgcgacgcgggctacccaagactggtgaggaggccaggcgacatagctctgaccggacaagttagccaaaggtgcgcttgtttccaggaaaacgagctcgacaaagccgggctagtggtgtacgaagggtgtgattacttgagccagtcttgcaaagtaaactaggctgtacatatctatccccttcccttcgtccacgaacctgtactcagcgcaaccagccacgcatcatgatgggctgggccttctgttccgtcccgcactcccgcatccatcctctcgaaacacctggtgctgcaacgtcgtgtttcagaagccaagatacgcgattgatttgattggaagatacgtgcaaccgaatcaaatgatggtaacactggcgctgccgccgtgcattattcgtgtagcgcaagatcgatcttaaaggctgtccgtgttattgtgttaatagccatggggccttggctgtcgatggatcgagtcgatgctgccttgcaagttgcaccgtcggcatcatctttcaagtctctttatcacactacatatttcaaactctgtattctacatgtatgccaatgaattgaagatggtggttctgaatgtcttccttccagcgcgagg

SEQ ID NO: 6722 - DNA, 1355 bp, Zea Mays
gcgcgacccttactcccaccgtcccacggccacgggcttgcggccagctcccctcgccgatcgtttccaccaaatccaccggtcttgcggccccatcttccgctccgacgatcccggggactttccagtaagtagcagcctcaagcaccaattcgtctctctgccgaagttaccaagggcaccccagttcgccgaggtggatcggtagcaaaaaccgatactgaggttgtggatggtggaagagctatctgtgtacaatggaaccaacgaggagttgcccatattactcgcgattttgggctcagtgtttgatgtcacgaaagggaggtcacattatggtcctggaggaggttatcatcactttgctgggaggttacagtcttagatttctagcgcctgtttcagtttcattgttatgaattacatgtatgtcgcagcttggtgttataataaatctaggaggataggtttcacattgctgatgttaaaacatcattcttttgacagggatgcatcacgagcatttgtttctggaaattttacaggtgatggtctgactgattctttacagggtttatcaagtagtgagtgaaggaaatcctacgaaatatctgaagggtgtagaagtgaaggcaaagagaggtacacagcttcttgaaaaacagaagagtgatgaagctaaaatacctggctgcaattcaaaatggagccagcaagaaggtggtgaagtttggtgcgacgcgggctacccaagactggtgaggaggccaggcgacatagctctgaccggacaagttagccaaaggtgcgcttgtttccaggaaaacgagctcgacaaagccgggctagtggtgtacgaagggtgtgattacttgagccagtcttgcaaagtaaactaggctgtacatatctatccccttcccttcgtccacgaacctgtactcagcgcaaccagccacgcatcatgatgggctgggccttctgttccgtcccgcactcccgcatccatcctctcgaaacacctggtgctgcaacgtcgtgtttcagaagccaagatacgcgattgatttgattggaagatacgtgcaaccgaatcaaatgatggtaacactggcgctgccgccgtgcattattcgtgtagcgcaagatcgatcttaaaggctgtccgtgttattgtgttaatagccatggggccttggctgtcgatggatcgagtcgatgctgccttgcaagttgcaccgtcggcatcatctttcaagtctctttatcacactacatatttcaaactctgtattctacatgtatgccaatgaattgaagatggtggttctgaatgtcttccttccagcgcgagg

SEQ ID NO: 6723 - DNA, 1303 bp, Zea Mays
gcgcgacccttactcccaccgtcccacggccacgggcttgcggccagctcccctcgccgatcgtttccaccaaatccaccggtcttgcggccccatcttccgctccgacgatcccggggactttccagtaagtagcagcctcaagcaccaattcgtctctctgccgaagttaccaagggcaccccagttcgccgaggtggatcggtagcaaaaaccgatactgaggttgtggatggtggaagagctatctgtgtacaatggaaccaacgaggagttgcccatattactcgcgattttgggctcagtgtttgatgtcacgaaagggaggtcacattatggtcctggaggaggttatcatcactttgctgggagggatgcatcacgagcatttgtttctggaaattttacaggtgatggtctgactgattctttacagggtttatcaagtagtgaggtaaacagcgtagttgattggaggaaattttacttcgaaagatacatatttgctggtaaacttattggacgttactacgacagtgaaggaaatcctacgaaatatctgaagggtgtagaagtgaaggcaaagagaggtacacagcttcttgaaaaacagaagagtgatgaagctaaaatacctggctgcaattcaaaatggagccagcaagaaggtggtgaagtttggtgcgacgcgggctacccaagactggtgaggaggccaggcgacatagctctgaccggacaagttagccaaaggtgcgcttgtttccaggaaaacgagctcgacaaagccgggctagtggtgtacgaagggtgtgattacttgagccagtcttgcaaagtaaactaggctgtacatatctatccccttcccttcgtccacgaacctgtactcagcgcaaccagccacgcatcatgatgggctgggccttctgttccgtcccgcactcccgcatccatcctctcgaaacacctggtgctgcaacgtcgtgtttcagaagccaagatacgcgattgatttgattggaagatacgtgcaaccgaatcaaatgatggtaacactggcgctgccgccgtgcattattcgtgtagcgcaagatcgatcttaaaggctgtccgtgttattgtgttaatagccatggggccttggctgtcgatggatcgagtcgatgctgccttgcaagttgcaccgtcggcatcatctttcaagtctctttatcacactacatatttcaaactctgtattctacatgtatgccaatgaattgaagatggtggttctgaatgtcttccttccagcgcgagg

SEQ ID NO: 6724 - DNA, 1419 bp, Zea Mays
gcgcgacccttactcccaccgtcccacggccacgggcttgcggccagctcccctcgccgatcgtttccaccaaatccaccggtcttgcggccccatcttccgctccgacgatcccggggactttccagtaagtagcagcctcaagcaccaattcgtctctctgccgaagttaccaagggcaccccagttcgccgaggtggatcggtagcaaaaaccgatactggtacgttgccatggaggcagtttgatttggtggacctaacggccttccggatctcttgggagccagagcgatggcgcgcggcgctcgctttctccttgttctcgcgttgctcgccgcgctactcgccgtcgtcctccagctctaccgccacaggaagccgaggttgtggatggtggaagagctatctgtgtacaatggaaccaacgaggagttgcccatattactcgcgattttgggctcagtgtttgatgtcacgaaagggaggtcacattatggtcctggaggaggttatcatcactttgctgggagggatgcatcacgagcatttgtttctggaaattttacaggtaaacagcgtagttgattggaggaaattttacttcgaaagatacatatttgctggtaaacttattggacgttactacgacagtgaaggaaatcctacgaaatatctgaagggtgtagaagtgaaggcaaagagaggtacacagcttcttgaaaaacagaagagtgatgaagctaaaatacctggctgcaattcaaaatggagccagcaagaaggtggtgaagtttggtgcgacgcgggctacccaagactggtgaggaggccaggcgacatagctctgaccggacaagttagccaaaggtgcgcttgtttccaggaaaacgagctcgacaaagccgggctagtggtgtacgaagggtgtgattacttgagccagtcttgcaaagtaaactaggctgtacatatctatccccttcccttcgtccacgaacctgtactcagcgcaaccagccacgcatcatgatgggctgggccttctgttccgtcccgcactcccgcatccatcctctcgaaacacctggtgctgcaacgtcgtgtttcagaagccaagatacgcgattgatttgattggaagatacgtgcaaccgaatcaaatgatggtaacactggcgctgccgccgtgcattattcgtgtagcgcaagatcgatcttaaaggctgtccgtgttattgtgttaatagccatggggccttggctgtcgatggatcgagtcgatgctgccttgcaagttgcaccgtcggcatcatctttcaagtctctttatcacactacatatttcaaactctgtattctacatgtatgccaatgaattgaagatggtggttctgaatgtcttccttccagcgcgagg

SEQ ID NO: 6725 - DNA, 1380 bp, Zea Mays
gcgcgacccttactcccaccgtcccacggccacgggcttgcggccagctcccctcgccgatcgtttccaccaaatccaccggtcttgcggccccatcttccgctccgacgatcccggggactttccagtaagtagcagcctcaagcaccaattcgtctctctgccgaagttaccaagggcaccccagttcgccgaggtggatcggtagcaaaaaccgatactggtacgttgccatggaggcagtttgatttggtggacctaacggccttccggatctcttgggagccagagcgatggcgcgcggcgctcgctttctccttgttctcgcgttgctcgccgcgctactcgccgtcgtcctccagctctaccgccacaggaagccgaggttgtggatggtggaagagctatctgtgtacaatggaaccaacgaggagttgcccatattactcgcgattttgggctcagtgtttgatgtcacgaaagggaggtcacattatggtcctggaggaggttatcatcactttgctgggagggatgcatcacgagcatttgtttctggaaattttacaggtgatggtctgactgattctttacagggtttatcaagtagtgagtgaaggaaatcctacgaaatatctgaagggtgtagaagtgaaggcaaagagaggtacacagcttcttgaaaaacagaagagtgatgaagctaaaatacctggctgcaattcaaaatggagccagcaagaaggtggtgaagtttggtgcgacgcgggctacccaagactggtgaggaggccaggcgacatagctctgaccggacaagttagccaaaggtgcgcttgtttccaggaaaacgagctcgacaaagccgggctagtggtgtacgaagggtgtgattacttgagccagtcttgcaaagtaaactaggctgtacatatctatccccttcccttcgtccacgaacctgtactcagcgcaaccagccacgcatcatgatgggctgggccttctgttccgtcccgcactcccgcatccatcctctcgaaacacctggtgctgcaacgtcgtgtttcagaagccaagatacgcgattgatttgattggaagatacgtgcaaccgaatcaaatgatggtaacactggcgctgccgccgtgcattattcgtgtagcgcaagatcgatcttaaaggctgtccgtgttattgtgttaatagccatggggccttggctgtcgatggatcgagtcgatgctgccttgcaagttgcaccgtcggcatcatctttcaagtctctttatcacactacatatttcaaactctgtattctacatgtatgccaatgaattgaagatggtggttctgaatgtcttccttccagcgcgagg

SEQ ID NO: 6726 - DNA, 1517 bp, Zea Mays
gcgcgacccttactcccaccgtcccacggccacgggcttgcggccagctcccctcgccgatcgtttccaccaaatccaccggtcttgcggccccatcttccgctccgacgatcccggggactttccagtaagtagcagcctcaagcaccaattcgtctctctgccgaagttaccaagggcaccccagttcgccgaggtggatcggtagcaaaaaccgatactggtacgttgccatggaggcagtttgatttggtggacctaacggccttccggatctcttgggagccagagcgatggcgcgcggcgctcgctttctccttgttctcgcgttgctcgccgcgctactcgccgtcgtcctccagctctaccgccacaggaagccgaggttgtggatggtggaagagctatctgtgtacaatggaaccaacgaggagttgcccatattactcgcgattttgggctcagtgtttgatgtcacgaaagggaggtcacattatggtcctggaggaggttatcatcactttgctgggaggttacagtcttagatttctagcgcctgtttcagtttcattgttatgaattacatggatgcatcacgagcatttgtttctggaaattttacaggtgatggtctgactgattctttacagggtttatcaagtagtgaggtaaacagcgtagttgattggaggaaattttacttcgaaagatacatatttgctggtaaacttattggacgttactacgacagtgaaggaaatcctacgaaatatctgaagggtgtagaagtgaaggcaaagagaggtacacagcttcttgaaaaacagaagagtgatgaagctaaaatacctggctgcaattcaaaatggagccagcaagaaggtggtgaagtttggtgcgacgcgggctacccaagactggtgaggaggccaggcgacatagctctgaccggacaagttagccaaaggtgcgcttgtttccaggaaaacgagctcgacaaagccgggctagtggtgtacgaagggtgtgattacttgagccagtcttgcaaagtaaactaggctgtacatatctatccccttcccttcgtccacgaacctgtactcagcgcaaccagccacgcatcatgatgggctgggccttctgttccgtcccgcactcccgcatccatcctctcgaaacacctggtgctgcaacgtcgtgtttcagaagccaagatacgcgattgatttgattggaagatacgtgcaaccgaatcaaatgatggtaacactggcgctgccgccgtgcattattcgtgtagcgcaagatcgatcttaaaggctgtccgtgttattgtgttaatagccatggggccttggctgtcgatggatcgagtcgatgctgccttgcaagttgcaccgtcggcatcatctttcaagtctctttatcacactacatatttcaaactctgtattctacatgtatgccaatgaattgaagatggtggttctgaatgtcttccttccagcgcgagg

SEQ ID NO: 6727 - DNA, 4775 bp, Zea Mays
atgggagttcacggtctgtgggaactactggctccggttgggcgacgcgtctcagtggagacccttgcgggcaagcgggtggcggtggacgcgagcatctggatggtgcagttcatgcgggcgatgcgggacgacagcggcgagatggtccgggacgcgcacctcctagggttcctccgtcgcatctgcaagctcctcttcctccgtgttcgccccgtattcgtcttcgatggcgccacgccggcgctcaagcgccgcaccctcgctgcccgccgcaggcaccgtgacgccgcgcaggccaaggtccgaaagaccgccgagaaactcctgctctcccatctcaaagctagaaagcttgaagaattggcagaacaaatcaggagtgacagagctaagcatgatgccaagggcaagcaagttgagagcagtaatggaggagaaactgagaaaacaagtcaaaaccaaatcggtgataccaacaacagtgagggaaatgttgcatcgatcaatcaggagaaagtggatggaataggaagacacagatttcactgacgagggaacacaccatcttacaagtgctccattgccagaaggagatgaaattgatgaggatgaagatgatgatgaagggatgatcttccctatgacaactggtgacattgatcctgcagtattggcttcccttcctccatcgatgcagttagatcttcttgttcagatgagggagagagtgatggctgaaaacaggcagaagtaccagaaaataaaaaaggaacctgcaaagttttcagagcttcaaatacagtcctatctcaaaacagttgctttccgtcgagagatagaccaagttcagaagtcttcgtcagggaagggtagtggaggtgtccagacatcaaaaatagcatcagaagctaatagagagtttattttctcatcatcattcactggtgataaacagatgctggcacaaagaggtgaaaaggagcataatgttgaaaacactagatcaaaaaaggaaattcattcttctgtcttcgcatctaaccccacaagtagtttgggaacaatgaagcctcccaacagcaaaactttgagcgattttgggcctgatgttgagacctatcgtgatgagagaggacggattagagtaagcagggtcagagcaatgggaattcgtatgactcgtgacattcaaaggaatttagattttattaaagagaatgaacaggttaaaagtaagggacagacacagaccaattttcacaatggatcaacaggcaatgaagagcctccagattttccagaacatctttttgaaagtaacaagctccagagttcttgtagtcctgatgtggatctttctgaaactgacagagacaaccatcagacctcgtcacaaataggaacagatatcatttctgagagttcttgttatggaaacaaggaagcaatagagatatctttctcggttgatcaaactgaagtgaaggatggcgatgaagatatatttttgcaattagtgtccgggatggcacccaacaacatattttctggaaataattgtttggttaaaaagatggaagaatctgtagattctgagtgtatttgggaagatggtgttattgaagcaggaacttctcctgtgaaaattgacatgaaggatcataagtcatctctgccagagaattgcagcgatgatgagatggagtgggaggaaggtgatagctttgtacctggagttgcttctagtagtgaacataatccatgtaatgcaccaaagggggatctggaagaagcagctcttgtacaggaagcaataaggaggagtttagaggattttgagaagaaggcatctgagaatgtgagtactggagatatacaagcatctgttgaagatagatctttgcagttctccaacaatgttcctaagatatctgaatctcttggtgaaaatgattcacattctggagtacctgttgttgacgagataaacaatgaaacaagaacagaaatcaattatgataaggatgatatggtacaaggcactggactacttggaactgagagacaagaatctgaatcacaacccccactggtgaataatgattggcatgccgatatgcacagagctcatcctctggggtctgtgcctccatgtactacattcacgagtgatctggctgaaaaaccatctgtcagtgcagaaactaacggtgaagatgtaatgatatttacaacaaaaattcctggaacagctttaggcgattgtgataaaacttccaacctaaacattatgaattctgatcaatcaaaatgcagcaaagatattgcttcaactggagaatccttgtcacaccaaaagaaccttttaattgatgaactactagccgtcactgccgaacaaaaagaaaatgctacccaggtagatttgaagtttgccacatctgaggtagattatacacaaatttgtggcaacgatgacaaccatacaatatcagcgagttatgttgacgcggagctatctcgtcttagacaagaacagatatatcttggacatgaaaggcgaaaacttgaaagtcatgcagagtctgtaagcagtgagatgtttgccgaatgccaggagttgctccaaatgtttgggttgccatatattattgcaccaatggaagctgaagctcaatgtgcatacatggaaataaataacctcgttgatggagttgtcaccgatgattcagacgtatttctgtttggagcaaggaatgtttacaagaacatatttgatgataggaagtatgtagaaacatattttatgaaggacattgagtctgagcttgggttatcacgagaacagttaatccgcatggctctgcttcttggaagtgattacactgaaggtgttagtggtatcggcatcgtgaatgctattgaagttgtacatgcatttcctgaagaagatggactgcagaagtttaaagaatggattgaatcaccagatccatcaatatttggtaaactgcatatggaaataagtggtagatcgaagaaaagaaaactcgatgaaaatgattcagatggaaaggggaaaggcctggaacctgaatgcattcaaggttctgatgataaacaatcttctaatgaggatgaacatgtcaaggaaatatttatgagtaaacataggaatgtgagcaagaactggcatgtccctgcaacttttcctagtgagaaagttgtaaatgcatatatttctccacaagttgacagttcaacggagcctttttcctggggaagaccagatttaggcctactacgtaggaatcagaactaaagaaaaaattccctcaggttatgttgggaaaggtttgggtggggcaaagagaaagctgatgaactgctgcttccagttttgagagagtataataaacacgagactcagctgcgcatggaggcattttattcattcaatgagagatttgcaaaaattcgcagcaaaaggattaagaaagccatcaagggcattacaggcaaaagctttcttgacgcagatgaatctgagcaggataatcccagtactagcaagacgatcaagaagaaagaggccagctcctcaagccatgccagaggtagagaaaaaaggaaaaacgattatggagtcatgggaagtcaagaagataatataattgacaataccaacagtttggcagagacagttgagaatactagagaaaataacaatactactaagataaaaagagggagttcctgtggtcgccccaaaggtagaggacgaagcaggacaactgcgggaagtgatgcaacaataaatcaggaggattatgaaatagaatattctacttcagcttcagatgaggattcatgtaaaaggcattccaacagttacggatcggaaggaagggcattgcgaaggtcaagtaggaaacggaaacaggtgacatacatggaagatggtcacgaagcatatggcaatgatgttccaatgcatcaaaacgatgaaaataacccaggccaacctgctgcagccgcagacgtggctggagaagacacaggatttaatatttaccatcaggatacaagtgaactaaacagcagtcagatgcatacaggtgcaggcattaccgaagatatcaatgaagattcccagcgttttgagttacgggaggacaatcaggtggattcaacaccgaaagactatttgttcaatggtggtggtttttgtatggagggcgagggcgatgaacaagaaccagcgtgtgatcaatctggtgcagaagtagaacctggaccaagtggtccatgtggcgccatggatgaagtttcagagagtgcaagcatatcgacggctatggagtgtaccgagaatgcaagaatggaggcacgcggtgcatcttcgtcgcagcaaagacgcaaggcaagccgaggtttgagtgccatgccgacgcttatcaagcgtaggagaaaatcgtgatttatttgcagtttcactgcatgtatagcacgccattacggcctctgtttggttcaagcgcttatgatttcgcatcagtctttggccaccagtgacgagcgctgtttcgcggacgcaaaatgcacgtctgtgctgtgatttagttccgtctttttttctcgtctgattggttgctcatcgtctcatcctgagcgcattgattttatctgagcttctgtttggttaagagcctgctgggttcgccttttacttaacacgcgatgcggtatgagagccgtggtatgtaaaatca

SEQ ID NO: 6728 - DNA, 4812 bp, Zea Mays
aacgttgcgcctctccagagtcgccggccgccgagggcactctccacctcttccgtcggcgcccgggagaaggagatgggagttcacggtctgtgggaactactggctccggttgggcgacgcgtctcagtggagacccttgcgggcaagcgggtggcggtggacgcgagcatctggatggtgcagttcatgcgggcgatgcgggacgacagcggcgagatggtccgggacgcgcacctcctagggttcctccgtcgcatctgcaagctcctcttcctccgtgttcgccccgtattcgtcttcgatggcgccacgccggcgctcaagcgccgcaccctcgctgcccgccgcaggcaccgtgacgccgcgcaggccaaggtccgaaagaccgccgagaaactcctgctctcccatctcaaagctagaaagcttgaagaattggcagaacaaatcaggagtgacagagctaagcatgatgccaagggcaagcaagttgagagcagtaatggaggagaaactgagaaaacaagtcaaaaccaaatcggtgataccaacaacagtgagggaaatgttgcatcgatcaatcaggagaaagtggatggaatgctggccgcatcgcttgctgcagaggaagacacagatttcactgacgagggaacacaccatcttacaagtgctccattgccagaaggagatgaaattgatgaggatgaagatgatgatgaagggatgatcttctattggcttcccttcctccatcgatgcagttagatcttcttgttcagatgagggagagagtgatggctgaaaacaggcagaagtaccagaaaataaaaaaggaacctgcaaagttttcagagcttcaaatacagtcctatctcaaaacagttgctttccgtcgagagatagaccaagttcagaagtcttcgtcagggaagggtagtggaggtgtccagacatcaaaaatagcatcagaagctaatagagagtttattttctcatcatcattcactggtgataaacagatgctggcacaaagaggtgaaaaggagcataatgttgaaaacactagatcaaaaaaggaaattcattcttctgtcttcgcatctaaccccacaagtagtttgggaacaatgaagcctcccaacagcaaaactttgagcgattttgggcctgatgttgagacctatcgtgatgagagaggacggattagagtaagcagggtcagagcaatgggaattcgtatgactcgtgacattcaaaggaatttagattttattaaagagaatgaacaggttaaaagtaagggacagacacagaccaattttcacaatggatcaacaggcaatgaagagcctccagattttccagaacatctttttgaaagtaacaagctccagagttcttgtagtcctgatgtggatctttctgaaactgacagagacaaccatcagacctcgtcacaaataggaacagatatcatttctgagagttcttgttatggaaacaaggaagcaatagagatatctttctcggttgatcaaactgaagtgaaggatggcgatgaagatatatttttgcaattagtgtccgggatggcacccaacaacatattttctggaaataattgtttggttaaaaagatggaagaatctgtagattctgagtgtatttgggaagatggtgttattgaagcaggaacttctcctgtgaaaattgacatgaaggatcataagtcatctctgccagagaattgcagcgatgatgagatggagtgggaggaaggtgatagctttgtacctggagttgcttctagtagtgaacataatccatgtaatgcaccaaagggggatctggaagaagcagctcttgtacaggaagcaataaggaggagtttagaggattttgagaagaaggcatctgagaatgtgagtactggagatatacaagcatctgttgaagatagatctttgcagttctccaacaatgttcctaagatatctgaatctcttggtgaaaatgattcacattctggagtacctgttgttgacgagataaacaatgaaacaagaacagaaatcaattatgataaggatgatatggtacaaggcactggactacttggaactgagagacaagaatctgaatcacaacccccactggtgaataatgattggcatgccgatatgcacagagctcatcctctggggtctgtgcctccatgtactacattcacgagtgatctggctgaaaaaccatctgtcagtgcagaaactaacggtgaagatgtaatgatatttacaacaaaaattcctggaacagctttaggcgattgtgataaaacttccaacctaaacattatgaattctgatcaatcaaaatgcagcaaagatattgcttcaactggagaatccttgtcacaccaaaagaaccttttaattgatgaactactagccgtcactgccgaacaaaaagaaaatgctacccaggtagatttgaagtttgccacatctgaggtagattatacacaaatttgtggcaacgatgacaaccatacaatatcagcgagttatgttgacgcggagctatctcgtcttagacaagaacagatatatcttggacatgaaaggcgaaaacttgaaagtcatgcagagtctgtaagcagtgagatgtttgccgaatgccaggagttgctccaaatgtttgggttgccatatattattgcaccaatggaagctgaagctcaatgtgcatacatggaaataaataacctcgttgatggagttgtcaccgatgattcagacgtatttctgtttggagcaaggaatgtttacaagaacatatttgatgataggaagtatgtagaaacatattttatgaaggacattgagtctgagcttgggttatcacgagaacagttaatccgcatggctctgcttcttggaagtgattacactgaaggtgttagtggtatcggcatcgtgaatgctattgaagttgtacatgcatttcctgaagaagatggactgcagaagtttaaagaatggattgaatcaccagatccatcaatatttggtaaactgcatatggaaataagtggtagatcgaagaaaagaaaactcgatgaaaatgattcagatggaaaggggaaaggcctggaacctgaatgcattcaaggttctgatgataaacaatcttctaatgaggatgaacatgtcaaggaaatatttatgagtaaacataggaatgtgagcaagaactggcatgtccctgcaacttttcctagtgagaaagttgtaaatgcatatatttctccacaagttgacagttcaacggagcctttttcctggggaagaccagatttaggcctactacgtaggttatgttgggaaaggtttgggtggggcaaagagaaagctgatgaactgctgcttccagttttgagagagtataataaacacgagactcagctgcgcatggaggcattttattcattcaatgagagatttgcaaaaattcgcagcaaaaggattaagaaagccatcaagggcattacaggcaaaagctttcttgacgcagatgaatctgagcaggataatcccagtactagcaagacgatcaagaagaaagaggccagctcctcaagccatgccagaggtagagaaaaaaggaaaaacgattatggagtcatgggaagtcaagaagataatataattgacaataccaacagtttggcagagacagttgagaatactagagaaaataacaatactactaagataaaaagagggagttcctgtggtcgccccaaaggtagaggacgaagcaggacaactgcgggaagtgatgcaacaataaatcaggaggattatgaaatagaatattctacttcagcttcagatgaggattcatgtaaaaggcattccaacagttacggatcggaaggaagggcattgcgaaggtcaagtaggaaacggaaacaggtgacatacatggaagatggtcacgaagcatatggcaatgatgttccaatgcatcaaaacgatgaaaataacccaggccaacctgctgcagccgcagacgtggctggagaagacacaggatttaatatttaccatcaggatacaagtgaactaaacagcagtcagatgcatacaggtgcaggcattaccgaagatatcaatgaagattcccagcgttttgagttacgggaggacaatcaggtggattcaacaccgaaagactatttgttcaatggtggtggtttttgtatggagggcgagggcgatgaacaagaaccagcgtgtgatcaatctggtgcagaagtagaacctggaccaagtggtccatgtggcgccatggatgaagtttcagagagtgcaagcatatcgacggctatggagtgtaccgagaatgcaagaatggaggcacgcggtgcatcttcgtcgcagcaaagacgcaaggcaagccgaggtttgagtgccatgccgacgcttatcaagcgtaggagaaaatcgtgatttatttgcagtttcactgcatgtatagcacgccattacggcctctgtttggttcaagcgcttatgatttcgcatcagtctttggccaccagtgacgagcgctgtttcgcggacgcaaaatgcacgtctgtgctgtgatttagttccgtctttttttctcgtctgattggttgctcatcgtctcatcctgagcgcattgattttatctgagcttctgtttggttaagagcctgctgggttcgccttttacttaacacgcgatgcggtatgagagccgtggtatgtaaaatca

SEQ ID NO: 6729 - DNA, 4845 bp, Zea Mays
gtcaacgttgcgcctctccagagtcgccggccgccgagggcactctccacctcttccgtcggcgcccgggagaaggagatgggagttcacggtctgtgggaactactggctccggttgggcgacgcgtctcagtggagacccttgcgggcaagcgggtggcggtggacgcgagcatctggatggtgcagttcatgcgggcgatgcgggacgacagcggcgagatggtccgggacgcgcacctcctagggttcctccgtcgcatctgcaagctcctcttcctccgtgttcgccccgtattcgtcttcgatggcgccacgccggcgctcaagcgccgcaccctcgctgcccgccgcaggcaccgtgacgccgcgcaggccaaggtccgaaagaccgccgagaaactcctgctctcccatctcaaagctagaaagcttgaagaattggcagaacaaatcaggagtgacagagctaagcatgatgccaagggcaagcaagttgagagcagtaatggaggagaaactgagaaaacaagtcaaaaccaaatcggtgataccaacaacagtgagggaaatgttgcatcgatcaatcaggagaaagtggatggaatgctggccgcatcgcttgctgcagaggaagacacagatttcactgacgagggaacacaccatcttacaagtgctccattgccagaaggagatgaaattgatgaggatgaagatgatgatgaagggatgatcttccctatgacaactggtgacattgatcctgcagtattggcttcccttcctccatcgatgcagttagatcttcttgttcaatgagggagagagtgatggctgaaaacaggcagaagtaccagaaaataaaaaaggaacctgcaaagttttcagagcttcaaatacagtcctatctcaaaacagttgctttccgtcgagagatagaccaagttcagaagtcttcgtcagggaagggtagtggaggtgtccagacatcaaaaatagcatcagaagctaatagagagtttattttctcatcatcattcactggtgataaacagatgctggcacaaagaggtgaaaaggagcataatgttgaaaacactagatcaaaaaaggaaattcattcttctgtcttcgcatctaaccccacaagtagtttgggaacaatgaagcctcccaacagcaaaactttgagcgattttgggcctgatgttgagacctatcgtgatgagagaggacggattagagtaagcagggtcagagcaatgggaattcgtatgactcgtgacattcaaaggaatttagattttattaaagagaatgaacaggttaaaagtaagggacagacacagaccaattttcacaatggatcaacaggcaatgaagagcctccagattttccagaacatctttttgaaagtaacaagctccagagttcttgtagtcctgatgtggatctttctgaaactgacagagacaaccatcagacctcgtcacaaataggaacagatatcatttctgagagttcttgttatggaaacaaggaagcaatagagatatctttctcggttgatcaaactgaagtgaaggatggcgatgaagatatatttttgcaattagtgtccgggatggcacccaacaacatattttctggaaataattgtttggttaaaaagatggaagaatctgtagattctgagtgtatttgggaagatggtgttattgaagcaggaacttctcctgtgaaaattgacatgaaggatcataagtcatctctgccagagaattgcagcgatgatgagatggagtgggaggaaggtgatagctttgtacctggagttgcttctagtagtgaacataatccatgtaatgcaccaaagggggatctggaagaagcagctcttgtacaggaagcaataaggaggagtttagaggattttgagaagaaggcatctgagaatgtgagtactggagatatacaagcatctgttgaagatagatctttgcagttctccaacaatgttcctaagatatctgaatctcttggtgaaaatgattcacattctggagtacctgttgttgacgagataaacaatgaaacaagaacagaaatcaattatgataaggatgatatggtacaaggcactggactacttggaactgagagacaagaatctgaatcacaacccccactggtgaataatgattggcatgccgatatgcacagagctcatcctctggggtctgtgcctccatgtactacattcacgagtgatctggctgaaaaaccatctgtcagtgcagaaactaacggtgaagatgtaatgatatttacaacaaaaattcctggaacagctttaggcgattgtgataaaacttccaacctaaacattatgaattctgatcaatcaaaatgcagcaaagatattgcttcaactggagaatccttgtcacaccaaaagaaccttttaattgatgaactactagccgtcactgccgaacaaaaagaaaatgctacccaggtagatttgaagtttgccacatctgaggtagattatacacaaatttgtggcaacgatgacaaccatacaatatcagcgagttatgttgacgcggagctatctcgtcttagacaagaacagatatatcttggacatgaaaggcgaaaacttgaaagtcatgcagagtctgtaagcagtgagatgtttgccgaatgccaggagttgctccaaatgtttgggttgccatatattattgcaccaatggaagctgaagctcaatgtgcatacatggaaataaataacctcgttgatggagttgtcaccgatgattcagacgtatttctgtttggagcaaggaatgtttacaagaacatatttgatgataggaagtatgtagaaacatattttatgaaggacattgagtctgagcttgggttatcacgagaacagttaatccgcatggctctgcttcttggaagtgattacactgaaggtgttagtggtatcggcatcgtgaatgctattgaagttgtacatgcatttcctgaagaagatggactgcagaagtttaaagaatggattgaatcaccagatccatcaatatttggtaaactgcatatggaaataagtggtagatcgaagaaaagaaaactcgatgaaaatgattcagatggaaaggggaaaggcctggaacctgaatgcattcaaggttctgatgataaacaatcttctaatgaggatgaacatgtcaaggaaatatttatgagtaaacataggaatgtgagcaagaactggcatgtccctgcaacttttcctagtgagaaagttgtaaatgcatatatttctccacaagttgacagttcaacggagcctttttcctggggaagaccagatttaggcctactacgtaggttatgttgggaaaggtttgggtggggcaaagagaaagctgatgaactgctgcttccagttttgagagagtataataaacacgagactcagctgcgcatggaggcattttattcattcaatgagagatttgcaaaaattcgcagcaaaaggattaagaaagccatcaagggcattacaggcaaaagctttcttgacgcagatgaatctgagcaggataatcccagtactagcaagacgatcaagaagaaagaggccagctcctcaagccatgccagaggtagagaaaaaaggaaaaacgattatggagtcatgggaagtcaagaagataatataattgacaataccaacagtttggcagagacagttgagaatactagagaaaataacaatactactaagataaaaagagggagttcctgtggtcgccccaaaggtagaggacgaagcaggacaactgcgggaagtgatgcaacaataaatcaggaggattatgaaatagaatattctacttcagcttcagatgaggattcatgtaaaaggcattccaacagttacggatcggaaggaagggcattgcgaaggtcaagtaggaaacggaaacaggtgacatacatggaagatggtcacgaagcatatggcaatgatgttccaatgcatcaaaacgatgaaaataacccaggccaacctgctgcagccgcagacgtggctggagaagacacaggatttaatatttaccatcaggatacaagtgaactaaacagcagtcagatgcatacaggtgcaggcattaccgaagatatcaatgaagattcccagcgttttgagttacgggaggacaatcaggtggattcaacaccgaaagactatttgttcaatggtggtggtttttgtatggagggcgagggcgatgaacaagaaccagcgtgtgatcaatctggtgcagaagtagaacctggaccaagtggtccatgtggcgccatggatgaagtttcagagagtgcaagcatatcgacggctatggagtgtaccgagaatgcaagaatggaggcacgcggtgcatcttcgtcgcagcaaagacgcaaggcaagccgaggtttgagtgccatgccgacgcttatcaagcgtaggagaaaatcgtgatttatttgcagtttcactgcatgtatagcacgccattacggcctctgtttggttcaagcgcttatgatttcgcatcagtctttggccaccagtgacgagcgctgtttcgcggacgcaaaatgcacgtctgtgctgtgatttagttccgtctttttttctcgtctgattggttgctcatcgtctcatcctgagcgcattgattttatctgagcttctgtttggttaagagcctgctgggttcgccttttacttaacacgcgatgcggtatgagagccgtggtatgtaaaatca

SEQ ID NO: 6730 - DNA, 4789 bp, Zea Mays
ccgctcctggcctcctcctcggcgtcgcgtcaacgttgcgcctctccagagtcgccggccgccgagggcactctccacctcttccgtcggcgcccgggagaaggagatgggagttcacggtctgtgggaactactggctccggttgggcgacgcgtctcagtggagacccttgcgggcaagcgggtggcggtggacgcgagcatctggatggtgcagttcatgcgggcgatgcgggacgacagcggcgagatggtccgggacgcgcacctcctagggttcctccgtcgcatctgcaagctcctcttcctccgtgttcgccccgtattcgtcttcgatggcgccacgccggcgctcaagcgccgcaccctcgctgcccgccgcaggcaccgtgacgccgcgcaggccaaggtccgaaagaccgccgagaaactcctgctctcccatctcaaagctagaaagcttgaagaattggcagaacaaatcaggagtgacagagctaagcatgatgccaagggcaagcaagttgagagcagtaatggaggagaaactgagaaaacaagtcaaaaccaaatcggtgataccaacaacagtgagggaaatgttgcatcgatcaatcaggagaaagtggatggaatgctggccgcatcgcttgctgcagaggaagacacagatttcactgacgagggaacacaccatcttacaagtgctccattgccagaaggagatgaaattgatgaggatgaagatgatgatgaagggatgatcttccctatgacaactggtgacattgatcctgcagtattggcttcccttcctccatcgatgcagttagatcttcttgttcagatgagggagagagtgatggctgaaaacaggcagaagtaccagaaaataaaaaaggaacctgcaaagttttcagagcttcaaatacagtcctatctcaaaacagttgctttccgtcgagagatagaccaagttcagaagtcttcgtcagggaagggtagtggaggtgtccagacatcaaaaatagcatcagaagctaatagagagtttattttctcatcatcattcactggtgataaacagatgctggcacaaagaggtgaaaaggagcataatgttgaaaacactagatcaaaaaaggaaattcattcttctgtcttcgcatctaaccccacaagtagtttgggaacaatgaagcctcccaacagcaaaactttgagcgattttgggcctgatgttgagacctatcgtgatgagagaggacggattagagtaagcagggtcagagcaatgggaattcgtatgactcgtgacattcaaaggaatttagattttattaaagagaatgaacaggttaaaagtaagggacagacacagaccaattttcacaatggatcaacaggcaatgaagagcctccagattttccagaacatctttttgaaagtaacaagctccagagttcttgtagtcctgatgtggatctttctgaaactgacagagacaaccatcagacctcgtcacaaataggaacagatatcatttctgagagttcttgttatggaaacaaggaagcaatagagatatctttctcggttgatcaaactgaagtgaaggatggcgatgaagatatatttttgcaattagtgtccgggatggcacccaacaacatattttctggaaataattgtttggttaaaaagatggaagaatctgtagattctgagtgtatttgggaagatggtgttattgaagcaggaacttctcctgtgaaaattgacatgaaggatcataagtcatctctgccagagaattgcagcgatgatgagatggagtgggaggaaggtgatagctttgtacctggagttgcttctagtagtgaacataatccatgtaatgcaccaaagggggatctggaagaagcagctcttgtacaggaagcaataaggaggagtttagaggattttgagaagaaggcatctgagaatgtgagtactggagatatacaagcatctgttgaagatagatctttgcagttctccaacaatgttcctaagatatctgaatctcttggtgaaaatgattcacattctggagtacctgttgttgacgagataaacaatgaaacaagaacagaaatcaattatgataaggatgatatggtacaaggcactggactacttggaactgagagacaagaatctgaatcacaacccccactggtgaataatgattggcatgccgatatgcacagagctcatcctctggggtctgtgcctccatgtactacattcacgagtgatctggctgaaaaaccatctgtcagtgcagaaactaacggtgaagatgtaatgatatttacaacaaaaattcctggaacagctttaggcgattgtgataaaacttccaacctaaacattatgaattctgatcaatcaaaatgcagcaaagatattgcttcaactggagaatccttgtcacaccaaaagaaccttttaattgatgaactactagccgtcactgccgaacaaaaagaaaatgctacccaggtagatttgaagtttgccacatctgaggtagattatacacaaatttgtggcaacgatgacaaccatacaatatcagcgagttatgttgacgcggagctatctcgtcttagacaagaacagatatatcttggacatgaaaggcgaaaacttgaaagtcatgcagagtctgtaagcagtgagatgtttgccgaatgccaggagttgctccaaatgtttgggttgccatatattattgcaccaatggaagctgaagctcaatgtgcatacatggaaataaataacctcgttgatggagttgtcaccgatgattcagacgtatttctgtttggagcaaggaatgtttacaagaacatatttgatgataggaagtatgtagaaacatattttatgaaggacattgagtctgagcttgggttatcacgagaacagttaatccgcatggctctgcttcttggaagtgattacactgaaggtgttagtggtatcggcatcgtgaatgctattgaagttgtacatgcatttcctgaagaagatggactgcagaagtttaaagaatggattgaatcaccagatccatcaatatttggtaaactgcatatggaaataagtggtagatcgaagaaaagaaaactcgatgaaaatgattcagatggaaaggggaaaggcctggaacctgaatgcattcaaggttctgatgataaacaatcttctaatgaggatgaacatgtcaaggaaatatttatgagtaaacataggaatgtgagcaagaactggcatgtccctgcaacttttcctagtgagaaagttgtaaatgcatatatttctccacaagttgacagttcaacggagcctttttcctggggaagaccagatttaggcctactacgtagactcagctgcgcatggaggcattttattcattcaatgagagatttgcaaaaattcgcagcaaaaggattaagaaagccatcaagggcattacaggcaaaagctttcttgacgcagatgaatctgagcaggataatcccagtactagcaagacgatcaagaagaaagaggccagctcctcaagccatgccagaggtagagaaaaaaggaaaaacgattatggagtcatgggaagtcaagaagataatataattgacaataccaacagtttggcagagacagttgagaatactagagaaaataacaatactactaagataaaaagagggagttcctgtggtcgccccaaaggtagaggacgaagcaggacaactgcgggaagtgatgcaacaataaatcaggaggattatgaaatagaatattctacttcagcttcagatgaggattcatgtaaaaggcattccaacagttacggatcggaaggaagggcattgcgaaggtcaagtaggaaacggaaacaggtgacatacatggaagatggtcacgaagcatatggcaatgatgttccaatgcatcaaaacgatgaaaataacccaggccaacctgctgcagccgcagacgtggctggagaagacacaggatttaatatttaccatcaggatacaagtgaactaaacagcagtcagatgcatacaggtgcaggcattaccgaagatatcaatgaagattcccagcgttttgagttacgggaggacaatcaggtggattcaacaccgaaagactatttgttcaatggtggtggtttttgtatggagggcgagggcgatgaacaagaaccagcgtgtgatcaatctggtgcagaagtagaacctggaccaagtggtccatgtggcgccatggatgaagtttcagagagtgcaagcatatcgacggctatggagtgtaccgagaatgcaagaatggaggcacgcggtgcatcttcgtcgcagcaaagacgcaaggcaagccgaggtttgagtgccatgccgacgcttatcaagcgtaggagaaaatcgtgatttatttgcagtttcactgcatgtatagcacgccattacggcctctgtttggttcaagcgcttatgatttcgcatcagtctttggccaccagtgacgagcgctgtttcgcggacgcaaaatgcacgtctgtgctgtgatttagttccgtctttttttctcgtctgattggttgctcatcgtctcatcctgagcgcattgattttatctgagcttctgtttggttaagagcctgctgggttcgccttttacttaacacgcgatgcggtatgagagccgtggtatgtaaaatca

SEQ ID NO: 6731 - DNA, 4914 bp, Zea Mays
gtcgtggccctagcgacaggcacaacaggcccctccgctcctggcctcctcctcggcgtcgcgtcaacgttgcgcctctccagagtcgccggccgccgagggcactctccacctcttccgtcggcgcccgggagaaggagatgggagttcacggtctgtgggaactactggctccggttgggcgacgcgtctcagtggagacccttgcgggcaagcgggtggcggtggacgcgagcatctggatggtgcagttcatgcgggcgatgcgggacgacagcggcgagatggtccgggacgcgcacctcctagggttcctccgtcgcatctgcaagctcctcttcctccgtgttcgccccgtattcgtcttcgatggcgccacgccggcgctcaagcgccgcaccctcgctgcccgccgcaggcaccgtgacgccgcgcaggccaaggtccgaaagaccgccgagaaactcctgctctcccatctcaaagctagaaagcttgaagaattggcagaacaaatcaggagtgacagagctaagcatgatgccaagggcaagcaagttgagagcagtaatggaggagaaactgagaaaacaagtcaaaaccaaatcggtgataccaacaacagtgagggaaatgttgcatcgatcaatcaggagaaagtggatggaataggaagacacagatttcactgacgagggaacacaccatcttacaagtgctccattgccagaaggagatgaaattgatgaggatgaagatgatgatgaagggatgatcttccctatgacaactggtgacattgatcctgcagtattggcttcccttcctccatcgatgcagttagatcttcttgttcagatgagggagagagtgatggctgaaaacaggcagaagtaccagaaaataaaaaaggaacctgcaaagttttcagagcttcaaatacagtcctatctcaaaacagttgctttccgtcgagagatagaccaagttcagaagtcttcgtcagggaagggtagtggaggtgtccagacatcaaaaatagcatcagaagctaatagagagtttattttctcatcatcattcactggtgataaacagatgctggcacaaagaggtgaaaaggagcataatgttgaaaacactagatcaaaaaaggaaattcattcttctgtcttcgcatctaaccccacaagtagtttgggaacaatgaagcctcccaacagcaaaactttgagcgattttgggcctgatgttgagacctatcgtgatgagagaggacggattagagtaagcagggtcagagcaatgggaattcgtatgactcgtgacattcaaaggaatttagattttattaaagagaatgaacaggttaaaagtaagggacagacacagaccaattttcacaatggatcaacaggcaatgaagagcctccagattttccagaacatctttttgaaagtaacaagctccagagttcttgtagtcctgatgtggatctttctgaaactgacagagacaaccatcagacctcgtcacaaataggaacagatatcatttctgagagttcttgttatggaaacaaggaagcaatagagatatctttctcggttgatcaaactgaagtgaaggatggcgatgaagatatatttttgcaattagtgtccgggatggcacccaacaacatattttctggaaataattgtttggttaaaaagatggaagaatctgtagattctgagtgtatttgggaagatggtgttattgaagcaggaacttctcctgtgaaaattgacatgaaggatcataagtcatctctgccagagaattgcagcgatgatgagatggagtgggaggaaggtgatagctttgtacctggagttgcttctagtagtgaacataatccatgtaatgcaccaaagggggatctggaagaagcagctcttgtacaggaagcaataaggaggagtttagaggattttgagaagaaggcatctgagaatgtgagtactggagatatacaagcatctgttgaagatagatctttgcagttctccaacaatgttcctaagatatctgaatctcttggtgaaaatgattcacattctggagtacctgttgttgacgagataaacaatgaaacaagaacagaaatcaattatgataaggatgatatggtacaaggcactggactacttggaactgagagacaagaatctgaatcacaacccccactggtgaataatgattggcatgccgatatgcacagagctcatcctctggggtctgtgcctccatgtactacattcacgagtgatctggctgaaaaaccatctgtcagtgcagaaactaacggtgaagatgtaatgatatttacaacaaaaattcctggaacagctttaggcgattgtgataaaacttccaacctaaacattatgaattctgatcaatcaaaatgcagcaaagatattgcttcaactggagaatccttgtcacaccaaaagaaccttttaattgatgaactactagccgtcactgccgaacaaaaagaaaatgctacccaggtagatttgaagtttgccacatctgaggtagattatacacaaatttgtggcaacgatgacaaccatacaatatcagcgagttatgttgacgcggagctatctcgtcttagacaagaacagatatatcttggacatgaaaggcgaaaacttgaaagtcatgcagagtctgtaagcagtgagatgtttgccgaatgccaggagttgctccaaatgtttgggttgccatatattattgcaccaatggaagctgaagctcaatgtgcatacatggaaataaataacctcgttgatggagttgtcaccgatgattcagacgtatttctgtttggagcaaggaatgtttacaagaacatatttgatgataggaagtatgtagaaacatattttatgaaggacattgagtctgagcttgggttatcacgagaacagttaatccgcatggctctgcttcttggaagtgattacactgaaggtgttagtggtatcggcatcgtgaatgctattgaagttgtacatgcatttcctgaagaagatggactgcagaagtttaaagaatggattgaatcaccagatccatcaatatttggtaaactgcatatggaaataagtggtagatcgaagaaaagaaaactcgatgaaaatgattcagatggaaaggggaaaggcctggaacctgaatgcattcaaggttctgatgataaacaatcttctaatgaggatgaacatgtcaaggaaatatttatgagtaaacataggaatgtgagcaagaactggcatgtccctgcaacttttcctagtgagaaagttgtaaatgcatatatttctccacaagttgacagttcaacggagcctttttcctggggaagaccagatttaggcctactacgtagaatcagaactaaagaaaaaattccctcaggttatgttgggaaaggtttgggtggggcaaagagaaagctgatgaactgctgcttccagttttgagagagtataataaacacgagactcagctgcgcatggaggcattttattcattcaatgagagatttgcaaaaattcgcagcaaaaggattaagaaagccatcaagggcattacaggcaaaagctttcttgacgcagatgaatctgagcaggataatcccagtactagcaagacgatcaagaagaaagaggccagctcctcaagccatgccagaggtagagaaaaaaggaaaaacgattatggagtcatgggaagtcaagaagataatataattgacaataccaacagtttggcagagacagttgagaatactagagaaaataacaatactactaagataaaaagagggagttcctgtggtcgccccaaaggtagaggacgaagcaggacaactgcgggaagtgatgcaacaataaatcaggaggattatgaaatagaatattctacttcagcttcagatgaggattcatgtaaaaggcattccaacagttacggatcggaaggaagggcattgcgaaggtcaagtaggaaacggaaacaggtgacatacatggaagatggtcacgaagcatatggcaatgatgttccaatgcatcaaaacgatgaaaataacccaggccaacctgctgcagccgcagacgtggctggagaagacacaggatttaatatttaccatcaggatacaagtgaactaaacagcagtcagatgcatacaggtgcaggcattaccgaagatatcaatgaagattcccagcgttttgagttacgggaggacaatcaggtggattcaacaccgaaagactatttgttcaatggtggtggtttttgtatggagggcgagggcgatgaacaagaaccagcgtgtgatcaatctggtgcagaagtagaacctggaccaagtggtccatgtggcgccatggatgaagtttcagagagtgcaagcatatcgacggctatggagtgtaccgagaatgcaagaatggaggcacgcggtgcatcttcgtcgcagcaaagacgcaaggcaagccgaggtttgagtgccatgccgacgcttatcaagcgtaggagaaaatcgtgatttatttgcagtttcactgcatgtatagcacgccattacggcctctgtttggttcaagcgcttatgatttcgcatcagtctttggccaccagtgacgagcgctgtttcgcggacgcaaaatgcacgtctgtgctgtgatttagttccgtctttttttctcgtctgattggttgctcatcgtctcatcctgagcgcattgattttatctgagcttctgtttggttaagagcctgctgggttcgccttttacttaacacgcgatgcggtatgagagccgtggtatgtaaaatca

SEQ ID NO: 6732 - DNA, 5018 bp, Zea Mays
ctcaacgcattcgtttcgacgaatcataatgtgtgttttataatgacaaaaatctcgcgagtcgtaggctcgtggtcgtgggtcgtggccctagcgacaggcacaacaggcccctccgctcctggcctcctcctcggcgtcgcgtcaacgttgcgcctctccagagtcgccggccgccgagggcactctccacctcttccgtcggcgcccgggagaaggagatgggagttcacggtctgtgggaactactggctccggttgggcgacgcgtctcagtggagacccttgcgggcaagcgggtggcggtggacgcgagcatctggatggtgcagttcatgcgggcgatgcgggacgacagcggcgagatggtccgggacgcgcacctcctagggttcctccgtcgcatctgcaagctcctcttcctccgtgttcgccccgtattcgtcttcgatggcgccacgccggcgctcaagcgccgcaccctcgctgcccgccgcaggcaccgtgacgccgcgcaggccaaggtccgaaagaccgccgagaaactcctgctctcccatctcaaagctagaaagcttgaagaattggcagaacaaatcaggagtgacagagctaagcatgatgccaagggcaagcaagttgagagcagtaatggaggagaaactgagaaaacaagtcaaaaccaaatcggtgataccaacaacagtgagggaaatgttgcatcgatcaatcaggagaaagtggatggaatgctggccgcatcgcttgctgcagaggaagacacagatttcactgacgagggaacacaccatcttacaagtgctccattgccagaaggagatgaaattgatgaggatgaagatgatgatgaagggatgatcttccctatgacaactggtgacattgatcctgcagtattggcttcccttcctccatcgatgcagttagatcttcttgttcagatgagggagagagtgatggctgaaaacaggcagaagtaccagaaaataaaaaaggaacctgcaaagttttcagagcttcaaatacagtcctatctcaaaacagttgctttccgtcgagagatagaccaagttcagaagtcttcgtcagggaagggtagtggaggtgtccagacatcaaaaatagcatcagaagctaatagagagtttattttctcatcatcattcactggtgataaacagatgctggcacaaagaggtgaaaaggagcataatgttgaaaacactagatcaaaaaaggaaattcattcttctgtcttcgcatctaaccccacaagtagtttgggaacaatgaagcctcccaacagcaaaactttgagcgattttgggcctgatgttgagacctatcgtgatgagagaggacggattagagtaagcagggtcagagcaatgggaattcgtatgactcgtgacattcaaaggaatttagattttattaaagagaatgaacaggttaaaagtaagggacagacacagaccaattttcacaatggatcaacaggcaatgaagagcctccagattttccagaacatctttttgaaagtaacaagctccagagttcttgtagtcctgatgtggatctttctgaaactgacagagacaaccatcagacctcgtcacaaataggaacagatatcatttctgagagttcttgttatggaaacaaggaagcaatagagatatctttctcggttgatcaaactgaagtgaaggatggcgatgaagatatatttttgcaattagtgtccgggatggcacccaacaacatattttctggaaataattgtttggttaaaaagatggaagaatctgtagattctgagtgtatttgggaagatggtgttattgaagcaggaacttctcctgtgaaaattgacatgaaggatcataagtcatctctgccagagaattgcagcgatgatgagatggagtgggaggaaggtgatagctttgtacctggagttgcttctagtagtgaacataatccatgtaatgcaccaaagggggatctggaagaagcagctcttgtacaggaagcaataaggaggagtttagaggattttgagaagaaggcatctgagaatgtgagtactggagatatacaagcatctgttgaagatagatctttgcagttctccaacaatgttcctaagatatctgaatctcttggtgaaaatgattcacattctggagtacctgttgttgacgagataaacaatgaaacaagaacagaaatcaattatgataaggatgatatggtacaaggcactggactacttggaactgagagacaagaatctgaatcacaacccccactggtgaataatgattggcatgccgatatgcacagagctcatcctctggggtctgtgcctccatgtactacattcacgagtgatctggctgaaaaaccatctgtcagtgcagaaactaacggtgaagatgtaatgatatttacaacaaaaattcctggaacagctttaggcgattgtgataaaacttccaacctaaacattatgaattctgatcaatcaaaatgcagcaaagatattgcttcaactggagaatccttgtcacaccaaaagaaccttttaattgatgaactactagccgtcactgccgaacaaaaagaaaatgctacccaggtagatttgaagtttgccacatctgaggtagattatacacaaatttgtggcaacgatgacaaccatacaatatcagcgagttatgttgacgcggagctatctcgtcttagacaagaacagatatatcttggacatgaaaggcgaaaacttgaaagtcatgcagagtctgtaagcagtgagatgtttgccgaatgccaggagttgctccaaatgtttgggttgccatatattattgcaccaatggaagctgaagctcaatgtgcatacatggaaataaataacctcgttgatggagttgtcaccgatgattcagacgtatttctgtttggagcaaggaatgtttacaagaacatatttgatgataggaagtatgtagaaacatattttatgaaggacattgagtctgagcttgggttatcacgagaacagttaatccgcatggctctgcttcttggaagtgattacactgaaggtgttagtggtatcggcatcgtgaatgctattgaagttgtacatgcatttcctgaagaagatggactgcagaagtttaaagaatggattgaatcaccagatccatcaatatttggtaaactgcatatggaaataagtggtagatcgaagaaaagaaaactcgatgaaaatgattcagatggaaaggggaaaggcctggaacctgaatgcattcaaggttctgatgataaacaatcttctaatgaggatgaacatgtcaaggaaatatttatgagtaaacataggaatgtgagcaagaactggcatgtccctgcaacttttcctagtgagaaagttgtaaatgcatatatttctccacaagttgacagttcaacggagcctttttcctggggaagaccagatttaggcctactacgtagaatcagaactaaagaaaaaattccctcaggttatgttgggaaaggtttgggtggggcaaagagaaagctgatgaactgctgcttccagttttgagagagtataataaacacgagactcagctgcgcatggaggcattttattcattcaatgagagatttgcaaaaattcgcagcaaaaggattaagaaagccatcaagggcattacaggcaaaagctttcttgacgcagatgaatctgagcaggataatcccagtactagcaagacgatcaagaagaaagaggccagctcctcaagccatgccagaggtagagaaaaaaggaaaaacgattatggagtcatgggaagtcaagaagataatataattgacaataccaacagtttggcagagacagttgagaatactagagaaaataacaatactactaagataaaaagagggagttcctgtggtcgccccaaaggtagaggacgaagcaggacaactgcgggaagtgatgcaacaataaatcaggaggattatgaaatagaatattctacttcagcttcagatgaggattcatgtaaaaggcattccaacagttacggatcggaaggaagggcattgcgaaggtcaagtaggaaacggaaacaggtgacatacatggaagatggtcacgaagcatatggcaatgatgttccaatgcatcaaaacgatgaaaataacccaggccaacctgctgcagccgcagacgtggctggagaagacacaggatttaatatttaccatcaggatacaagtgaactaaacagcagtcagatgcatacaggtgcaggcattaccgaagatatcaatgaagattcccagcgttttgagttacgggaggacaatcaggtggattcaacaccgaaagactatttgttcaatggtggtggtttttgtatggagggcgagggcgatgaacaagaaccagcgtgtgatcaatctggtgcagaagtagaacctggaccaagtggtccatgtggcgccatggatgaagtttcagagagtgcaagcatatcgacggctatggagtgtaccgagaatgcaagaatggaggcacgcggtgcatcttcgtcgcagcaaagacgcaaggcaagccgaggtttgagtgccatgccgacgcttatcaagcgtaggagaaaatcgtgatttatttgcagtttcactgcatgtatagcacgccattacggcctctgtttggttcaagcgcttatgatttcgcatcagtctttggccaccagtgacgagcgctgtttcgcggacgcaaaatgcacgtctgtgctgtgatttagttccgtctttttttctcgtctgattggttgctcatcgtctcatcctgagcgcattgattttatctgagcttctgtttggttaagagcctgctgggttcgccttttacttaacacgcgatgcggtatgagagccgtggtatgtaaaatca

SEQ ID NO: 6733 - DNA, 5026 bp, Zea Mays
cacataaccaaacacgcagaaagagattttgagtctaaatcgtagatcgtcgaatccctcctcaacgcattcgtttcgacgaatcataatgtgtgttttataatgacaaaaatctcgcgagtcgtaggctcgtggtcgtgggtcgtggccctagcgacaggcacaacaggcccctccgctcctggcctcctcctcggcgtcgcgtcaacgttgcgcctctccagagtcgccggccgccgagggcactctccacctcttccgtcggcgcccgggagaaggagatgggagttcacggtctgtgggaactactggctccggttgggcgacgcgtctcagtggagacccttgcgggcaagcgggtggcggtggacgcgagcatctggatggtgcagttcatgcgggcgatgcgggacgacagcggcgagatggtccgggacgcgcacctcctagggttcctccgtcgcatctgcaagctcctcttcctccgtgttcgccccgtattcgtcttcgatggcgccacgccggcgctcaagcgccgcaccctcgctgcccgccgcaggcaccgtgacgccgcgcaggccaaggtccgaaagaccgccgagaaactcctgctctcccatctcaaagctagaaagcttgaagaattggcagaacaaatcaggagtgacagagctaagcatgatgccaagggcaagcaagttgagagcagtaatggaggagaaactgagaaaacaagtcaaaaccaaatcggtgataccaacaacagtgagggaaatgttgcatcgatcaatcaggagaaagtggatggaataggaagacacagatttcactgacgagggaacacaccatcttacaagtgctccattgccagaaggagatgaaattgatgaggatgaagatgatgatgaagggatgatcttccctatgacaactggtgacattgatcctgcagtattggcttcccttcctccatcgatgcagttagatcttcttgttcagatgagggagagagtgatggctgaaaacaggcagaagtaccagaaaataaaaaaggaacctgcaaagttttcagagcttcaaatacagtcctatctcaaaacagttgctttccgtcgagagatagaccaagttcagaagtcttcgtcagggaagggtagtggaggtgtccagacatcaaaaatagcatcagaagctaatagagagtttattttctcatcatcattcactggtgataaacagatgctggcacaaagaggtgaaaaggagcataatgttgaaaacactagatcaaaaaaggaaattcattcttctgtcttcgcatctaaccccacaagtagtttgggaacaatgaagcctcccaacagcaaaactttgagcgattttgggcctgatgttgagacctatcgtgatgagagaggacggattagagtaagcagggtcagagcaatgggaattcgtatgactcgtgacattcaaaggaatttagattttattaaagagaatgaacaggttaaaagtaagggacagacacagaccaattttcacaatggatcaacaggcaatgaagagcctccagattttccagaacatctttttgaaagtaacaagctccagagttcttgtagtcctgatgtggatctttctgaaactgacagagacaaccatcagacctcgtcacaaataggaacagatatcatttctgagagttcttgttatggaaacaaggaagcaatagagatatctttctcggttgatcaaactgaagtgaaggatggcgatgaagatatatttttgcaattagtgtccgggatggcacccaacaacatattttctggaaataattgtttggttaaaaagatggaagaatctgtagattctgagtgtatttgggaagatggtgttattgaagcaggaacttctcctgtgaaaattgacatgaaggatcataagtcatctctgccagagaattgcagcgatgatgagatggagtgggaggaaggtgatagctttgtacctggagttgcttctagtagtgaacataatccatgtaatgcaccaaagggggatctggaagaagcagctcttgtacaggaagcaataaggaggagtttagaggattttgagaagaaggcatctgagaatgtgagtactggagatatacaagcatctgttgaagatagatctttgcagttctccaacaatgttcctaagatatctgaatctcttggtgaaaatgattcacattctggagtacctgttgttgacgagataaacaatgaaacaagaacagaaatcaattatgataaggatgatatggtacaaggcactggactacttggaactgagagacaagaatctgaatcacaacccccactggtgaataatgattggcatgccgatatgcacagagctcatcctctggggtctgtgcctccatgtactacattcacgagtgatctggctgaaaaaccatctgtcagtgcagaaactaacggtgaagatgtaatgatatttacaacaaaaattcctggaacagctttaggcgattgtgataaaacttccaacctaaacattatgaattctgatcaatcaaaatgcagcaaagatattgcttcaactggagaatccttgtcacaccaaaagaaccttttaattgatgaactactagccgtcactgccgaacaaaaagaaaatgctacccaggtagatttgaagtttgccacatctgaggtagattatacacaaatttgtggcaacgatgacaaccatacaatatcagcgagttatgttgacgcggagctatctcgtcttagacaagaacagatatatcttggacatgaaaggcgaaaacttgaaagtcatgcagagtctgtaagcagtgagatgtttgccgaatgccaggagttgctccaaatgtttgggttgccatatattattgcaccaatggaagctgaagctcaatgtgcatacatggaaataaataacctcgttgatggagttgtcaccgatgattcagacgtatttctgtttggagcaaggaatgtttacaagaacatatttgatgataggaagtatgtagaaacatattttatgaaggacattgagtctgagcttgggttatcacgagaacagttaatccgcatggctctgcttcttggaagtgattacactgaaggtgttagtggtatcggcatcgtgaatgctattgaagttgtacatgcatttcctgaagaagatggactgcagaagtttaaagaatggattgaatcaccagatccatcaatatttggtaaactgcatatggaaataagtggtagatcgaagaaaagaaaactcgatgaaaatgattcagatggaaaggggaaaggcctggaacctgaatgcattcaaggttctgatgataaacaatcttctaatgaggatgaacatgtcaaggaaatatttatgagtaaacataggaatgtgagcaagaactggcatgtccctgcaacttttcctagtgagaaagttgtaaatgcatatatttctccacaagttgacagttcaacggagcctttttcctggggaagaccagatttaggcctactacgtaggttatgttgggaaaggtttgggtggggcaaagagaaagctgatgaactgctgcttccagttttgagagagtataataaacacgagactcagctgcgcatggaggcattttattcattcaatgagagatttgcaaaaattcgcagcaaaaggattaagaaagccatcaagggcattacaggcaaaagctttcttgacgcagatgaatctgagcaggataatcccagtactagcaagacgatcaagaagaaagaggccagctcctcaagccatgccagaggtagagaaaaaaggaaaaacgattatggagtcatgggaagtcaagaagataatataattgacaataccaacagtttggcagagacagttgagaatactagagaaaataacaatactactaagataaaaagagggagttcctgtggtcgccccaaaggtagaggacgaagcaggacaactgcgggaagtgatgcaacaataaatcaggaggattatgaaatagaatattctacttcagcttcagatgaggattcatgtaaaaggcattccaacagttacggatcggaaggaagggcattgcgaaggtcaagtaggaaacggaaacaggtgacatacatggaagatggtcacgaagcatatggcaatgatgttccaatgcatcaaaacgatgaaaataacccaggccaacctgctgcagccgcagacgtggctggagaagacacaggatttaatatttaccatcaggatacaagtgaactaaacagcagtcagatgcatacaggtgcaggcattaccgaagatatcaatgaagattcccagcgttttgagttacgggaggacaatcaggtggattcaacaccgaaagactatttgttcaatggtggtggtttttgtatggagggcgagggcgatgaacaagaaccagcgtgtgatcaatctggtgcagaagtagaacctggaccaagtggtccatgtggcgccatggatgaagtttcagagagtgcaagcatatcgacggctatggagtgtaccgagaatgcaagaatggaggcacgcggtgcatcttcgtcgcagcaaagacgcaaggcaagccgaggtttgagtgccatgccgacgcttatcaagcgtaggagaaaatcgtgatttatttgcagtttcactgcatgtatagcacgccattacggcctctgtttggttcaagcgcttatgatttcgcatcagtctttggccaccagtgacgagcgctgtttcgcggacgcaaaatgcacgtctgtgctgtgatttagttccgtctttttttctcgtctgattggttgctcatcgtctcatcctgagcgcattgattttatctgagcttctgtttggttaagagcctgctgggttcgccttttacttaacacgcgatgcggtatgagagccgtggtatgtaaaatca

SEQ ID NO: 6734 - DNA, 5049 bp, Zea Mays
cacataaccaaacacgcagaaagagattttgagtctaaatcgtagatcgtcgaatccctcctcaacgcattcgtttcgacgaatcataatgtgtgttttataatgacaaaaatctcgcgagtcgtaggctcgtggtcgtgggtcgtggccctagcgacaggcacaacaggcccctccgctcctggcctcctcctcggcgtcgcgtcaacgttgcgcctctccagagtcgccggccgccgagggcactctccacctcttccgtcggcgcccgggagaaggagatgggagttcacggtctgtgggaactactggctccggttgggcgacgcgtctcagtggagacccttgcgggcaagcgggtggcggtggacgcgagcatctggatggtgcagttcatgcgggcgatgcgggacgacagcggcgagatggtccgggacgcgcacctcctagggttcctccgtcgcatctgcaagctcctcttcctccgtgttcgccccgtattcgtcttcgatggcgccacgccggcgctcaagcgccgcaccctcgctgcccgccgcaggcaccgtgacgccgcgcaggccaaggtccgaaagaccgccgagaaactcctgctctcccatctcaaagctagaaagcttgaagaattggcagaacaaatcaggagtgacagagctaagcatgatgccaagggcaagcaagttgagagcagtaatggaggagaaactgagaaaacaagtcaaaaccaaatcggtgataccaacaacagtgagggaaatgttgcatcgatcaatcaggagaaagtggatggaatgctggccgcatcgcttgctgcagaggaagacacagatttcactgacgagggaacacaccatcttacaagtgctccattgccagaaggagatgaaattgatgaggatgaagatgatgatgaagggatgatcttccctatgacaactggtgacattgatcctgcagtattggcttcccttcctccatcgatgcagttagatcttcttgttcagatgagggagagagtgatggctgaaaacaggcagaagtaccagaaaataaaaaaggaacctgcaaagttttcagagcttcaaatacagtcctatctcaaaacagttgctttccgtcgagagatagaccaagttcagaagtcttcgtcagggaagggtagtggaggtgtccagacatcaaaaatagcatcagaagctaatagagagtttattttctcatcatcattcactggtgataaacagatgctggcacaaagaggtgaaaaggagcataatgttgaaaacactagatcaaaaaaggaaattcattcttctgtcttcgcatctaaccccacaagtagtttgggaacaatgaagcctcccaacagcaaaactttgagcgattttgggcctgatgttgagacctatcgtgatgagagaggacggattagagtaagcagggtcagagcaatgggaattcgtatgactcgtgacattcaaaggaatttagattttattaaagagaatgaacaggttaaaagtaagggacagacacagaccaattttcacaatggatcaacaggcaatgaagagcctccagattttccagaacatctttttgaaagtaacaagctccagagttcttgtagtcctgatgtggatctttctgaaactgacagagacaaccatcagacctcgtcacaaataggaacagatatcatttctgagagttcttgttatggaaacaaggaagcaatagagatatctttctcggttgatcaaactgaagtgaaggatggcgatgaagatatatttttgcaattagtgtccgggatggcacccaacaacatattttctggaaataattgtttggttaaaaagatggaagaatctgtagattctgagtgtatttgggaagatggtgttattgaagcaggaacttctcctgtgaaaattgacatgaaggatcataagtcatctctgccagagaattgcagcgatgatgagatggagtgggaggaaggtgatagctttgtacctggagttgcttctagtagtgaacataatccatgtaatgcaccaaagggggatctggaagaagcagctcttgtacaggaagcaataaggaggagtttagaggattttgagaagaaggcatctgagaatgtgagtactggagatatacaagcatctgttgaagatagatctttgcagttctccaacaatgttcctaagatatctgaatctcttggtgaaaatgattcacattctggagtacctgttgttgacgagataaacaatgaaacaagaacagaaatcaattatgataaggatgatatggtacaaggcactggactacttggaactgagagacaagaatctgaatcacaacccccactggtgaataatgattggcatgccgatatgcacagagctcatcctctggggtctgtgcctccatgtactacattcacgagtgatctggctgaaaaaccatctgtcagtgcagaaactaacggtgaagatgtaatgatatttacaacaaaaattcctggaacagctttaggcgattgtgataaaacttccaacctaaacattatgaattctgatcaatcaaaatgcagcaaagatattgcttcaactggagaatccttgtcacaccaaaagaaccttttaattgatgaactactagccgtcactgccgaacaaaaagaaaatgctacccaggtagatttgaagtttgccacatctgaggtagattatacacaaatttgtggcaacgatgacaaccatacaatatcagcgagttatgttgacgcggagctatctcgtcttagacaagaacagatatatcttggacatgaaaggcgaaaacttgaaagtcatgcagagtctgtaagcagtgagatgtttgccgaatgccaggagttgctccaaatgtttgggttgccatatattattgcaccaatggaagctgaagctcaatgtgcatacatggaaataaataacctcgttgatggagttgtcaccgatgattcagacgtatttctgtttggagcaaggaatgtttacaagaacatatttgatgataggaagtatgtagaaacatattttatgaaggacattgagtctgagcttgggttatcacgagaacagttaatccgcatggctctgcttcttggaagtgattacactgaaggtgttagtggtatcggcatcgtgaatgctattgaagttgtacatgcatttcctgaagaagatggactgcagaagtttaaagaatggattgaatcaccagatccatcaatatttggtaaactgcatatggaaataagtggtagatcgaagaaaagaaaactcgatgaaaatgattcagatggaaaggggaaaggcctggaacctgaatgcattcaaggttctgatgataaacaatcttctaatgaggatgaacatgtcaaggaaatatttatgagtaaacataggaatgtgagcaagaactggcatgtccctgcaacttttcctagtgagaaagttgtaaatgcatatatttctccacaagttgacagttcaacggagcctttttcctggggaagaccagatttaggcctactacgtaggttatgttgggaaaggtttgggtggggcaaagagaaagctgatgaactgctgcttccagttttgagagagtataataaacacgagactcagctgcgcatggaggcattttattcattcaatgagagatttgcaaaaattcgcagcaaaaggattaagaaagccatcaagggcattacaggcaaaagctttcttgacgcagatgaatctgagcaggataatcccagtactagcaagacgatcaagaagaaagaggccagctcctcaagccatgccagaggtagagaaaaaaggaaaaacgattatggagtcatgggaagtcaagaagataatataattgacaataccaacagtttggcagagacagttgagaatactagagaaaataacaatactactaagataaaaagagggagttcctgtggtcgccccaaaggtagaggacgaagcaggacaactgcgggaagtgatgcaacaataaatcaggaggattatgaaatagaatattctacttcagcttcagatgaggattcatgtaaaaggcattccaacagttacggatcggaaggaagggcattgcgaaggtcaagtaggaaacggaaacaggtgacatacatggaagatggtcacgaagcatatggcaatgatgttccaatgcatcaaaacgatgaaaataacccaggccaacctgctgcagccgcagacgtggctggagaagacacaggatttaatatttaccatcaggatacaagtgaactaaacagcagtcagatgcatacaggtgcaggcattaccgaagatatcaatgaagattcccagcgttttgagttacgggaggacaatcaggtggattcaacaccgaaagactatttgttcaatggtggtggtttttgtatggagggcgagggcgatgaacaagaaccagcgtgtgatcaatctggtgcagaagtagaacctggaccaagtggtccatgtggcgccatggatgaagtttcagagagtgcaagcatatcgacggctatggagtgtaccgagaatgcaagaatggaggcacgcggtgcatcttcgtcgcagcaaagacgcaaggcaagccgaggtttgagtgccatgccgacgcttatcaagcgtaggagaaaatcgtgatttatttgcagtttcactgcatgtatagcacgccattacggcctctgtttggttcaagcgcttatgatttcgcatcagtctttggccaccagtgacgagcgctgtttcgcggacgcaaaatgcacgtctgtgctgtgatttagttccgtctttttttctcgtctgattggttgctcatcgtctcatcctgagcgcattgattttatctgagcttctgtttggttaagagcctgctgggttcgccttttacttaacacgcgatgcggtatgagagccgtggtatgtaaaatca

SEQ ID NO: 6735 - DNA, 2806 bp, Zea Mays
atgcctcccactaccgtcatgctgctaccagcgtgcaccgtgctgctgctgtgctgccgtctctcgccggccgccgcgtcgtcgcccggcgatgtcggcggaggcggggcaaggaggctgctccaccagccattgttcccaatcgagtggaccccgccgccatcgccgcagccggacttctcctctgacccggcgacgccggacggacctcctggcgccttcttccctcccacgccaccggtggcccctgctggcggcggaggtacgacgacgacgtcctcgccaaccaccgtcgcctccaacgtcccggccggcgcctcgtcagggtctggtgatggcggccaccacggcggccctgccaaggggaccatcgtcgcggcgggggcggccgcgaccgcggccatcgcgctgctggccttcgcgtgcgcgttcctcatcgcgctccgcgcgcgccgccgaggggactcgcagaagctgctcggccccgaccgtgggtccgcgcgccaccactcggcgccctcggccgctgacttcctctacgtcggcacggtggagcccaccacgcccggccgccaccacgggtcccccgccgccgatctcattgggtccccgtaccgcaagctgcgcagcgagcgcgcgcgccgcgacgagcccaccgacaacctgagcccagagctccggccgctcccgccgctgcgccgcgcggccacaatgggctcctctgacgatgcatactacacgccgcgccagcgctccgggggttccggcggcggcggggttggcggcgaaacctggagtgaggccagcgcgtccagcccgcccaccaccaccaccgcgtcccgccgaagcctccccagcctcaccagcgactgctttcctccggtcacggctattgctgcgccgacaccaccccctgcgcggtcccgtcgtacgcccccgcgcacgcgcttctctgctggctcgacccctgacatcaaacagccgccttccccttccgagccgacgtcgcggcgccggttgctcaagccgttgccacctgagggcccccgcattgccatgccgatgccgatcacggcgacaacggcagaggatagtatcgggagcgcgtcgatgcgtaaacaggattacgtggcagacggtatcgttggcaacgacgagccacggccgaagctgaagccgctgcactgggataaggttggatgagggcatgatcgaggcattgttcatgaataactcaacgccaaccgcgccgccgagagatgcgggaaggaagactaccgtcccaccgttcaggcaggaggagagggttcttgaccccaagaaagcacagaatatcgccatcctgctccgtgcattgaatgttacacgcgatgaggtctctgatgcactgttggatggcaacactgaatatttggggactgaacttttggagactttagtcaagatggctcctactaaagaggaagaactcaaactacaagattataatgatgacacatcgaagcttggttctgcagagcgctttctcaaatctgtgcttgatataccttttgccttcaagagagttgatgccatgctataccgagccaattttgagtccgaaataaattacttaatgaaatcttttgagacactagaggcagcctgcgaagatcttagaggcagcaggttgttcctgaaactgctcgaagcagtgctgagaactgggaaccggatgaatgttggcacaaaccggggtgaggcaaaagctttcaagcttgacactctcctaaaacttgctgatgtcaagggcactgatggtaaaacaacgctgttgcattttgtcgtccaagaaatcgttcgatcagaagatgcaaaatcagaaaaagaaagtgccatgattacccgtagctctaaagacgagcagttacggaagcaaggcctgaaacttgtctctgggcttagcagtgagctaggaaatgtcaagaaagcagctatgatggacttcgatgtgttgcatggttatgttaataagctagaaacaggtcttgaaaagatcaagtcggtcttgcagctcgagagacaatgcactcaaggccagaagttcttttcgacaatgcaaagttttctcaagaaagctgaggcggagatagagaaagtcagaggggaggagaagagggccttgatgagagtaaaagacatcaccgagtacttccacggtgacaccgtgaaagaggaaccgcaccctctcagaatattcatggtggtgagggacttcctctcgacgttggatcatgtctgcaaggaggttggcaggttgcagcaggatagaacagtcgttgggtccgccaggtctttccgcattccagccacctcactgccaattctaaatgtgtatggacaacgaagggagaacgactctgatgatgacaattcatcattctaggacagcaaggctgagggatcggacaagtcacaaagtcacaaaactgaattttggaaggaacagagcgcaccagctatgccaggtttagctgctgaagcggatgtcgcattggcatttgtcatgaggcacacgtttaacggtgggaggtcgaaggggtggggaaattgtggttgtggcttagaaaagctgcccactttcaaagccaaggtctcggtcggagaactgatgaaggtttggaggcgaagggacctaccacttaaatctggggctcctctggacttcgctcggcatcacaccaccttcttgggttgctccgagtacaagcctcggcaaggatcgaagaccaagcgccctagagcgaagagtgtcacgtcccagtga

SEQ ID NO: 6736 - DNA, 2737 bp, Zea Mays
accgccaatgcctcccactaccgtcatgctgctaccagcgtgcaccgtgctgctgctgtgctgccgtctctcgccggccgccgcgtcgtcgcccggcgatgtcggcggaggcggggcaaggaggctgctccaccagccattgttcccaatcgagtggaccccgccgccatcgccgcagccggacttctcctctgacccggcgacgccggacggacctcctggcgccttcttccctcccacgccaccggtggcccctgctggcggcggaggtacgacgacgacgtcctcgccaaccaccgtcgcctccaacgtcccggccggcgcctcgtcagggtctggtgatggcggccaccacggcggccctgccaaggggaccatcgtcgcggcgggggcggccgcgaccgcggccatcgcgctgctggccttcgcgtgcgcgttcctcatcgcgctccgcgcgcgccgccgaggggactcgcagaagctgctcggccccgaccgtgggtccgcgcgccaccactcggcgccctcggccgctgacttcctctacgtcggcacggtggagcccaccacgcccggccgccaccacgggtcccccgccgccgatctcattgggtccccgtaccgcaagctgcgcagcgagcgcgcgcgccgcgacgagcccaccgacaacctgagcccagagctccggccgctcccgccgctgcgccgcgcggccacaatgggctcctctgacgatgcatactacacgccgcgccagcgctccgggggttccggcggcggcggggttggcggcgaaacctggagtgaggccagcgcgtccagcccgcccaccaccaccaccgcgtcccgccgaagcctccccagcctcaccagcgactgctttcctccggtcacggctattgctgcgccgacaccaccccctgcgcggtcccgtcgtacgcccccgcgcacgcgcttctctgctggctcgacccctgacatcaaacagccgccttccccttccgagccgacgtcgcggcgccggttgctcaagccgttgccacctgagggcccccgcattgccatgccgatgccgatcacggcgacaacggcagaggatagtatcgggagcgcgtcgatgcgtaaacaggattacgtggcagacggtatcgttggcaacgacgagccacggccgaagctgaagccgctgcactgggataaggtgcgggcgacctccgaccgcgccatggtctgggaccagctgaagtcaagctgctcattccagttggatgagggcatgatcgaggcattgttcatgaataactcaacgccaaccgcgccgccgagagatgcgggaaggaagactaccgtcccaccgttcaggcaggaggagagggttcttgaccccaagaaagcacagaatatcgccatcctgctccgtgcattgaatgttacacgcgatgaggtctctgatgcactgttggatggcaacactgaatatttggggactgaacttttggagactttagtcaagatggctcctactaaagaggaagaactcaaactacaagattataatgatgacacatcgaagcttggttctgcagagcgctttctcaaatctgtgcttgatataccttttgccttcaagagagttgatgccatgctataccgagccaattttgagtccgaaataaattacttaatgaaatcttttgagacactagaggcagcctgcgaagatcttagaggcagcaggttgttcctgaaactgctcgaagcagtgctgagaactgggaaccggatgaatgttggcacaaaccggggtgaggcaaaagctttcaagcttgacactctcctaaaacttgctgatgtcaagggcactgatggtaaaacaacgctgttgcattttgtcgtccaagaaatcgttcgatcagaagatgcaaaatcagaaaaagaaagtgccatgattacccgtagctctaaagacgagcagttacggaagcaaggcctgaaacttgtctctgggcttagcagtgagctaggaaatgtcaagaaagcagctatgatggacttcgatgtgttgcatggttatgttaataagctagaaacaggtcttgaaaagatcaagtcggtcttgcagctcgagagacaatgcactcaaggccagaagttcttttcgacaatgcaaagttttctcaagaaagctgaggcggagatagagaaagtcagaggggaggagaagagggccttgatgagagtaaaagacatcaccgagtacttccacggtgacaccgtgaaagaggaaccgcaccctctcagaatattcatggtggtgagggacttcctctcgacgttggatcatgtctgcaaggaggacagcaaggctgagggatcggacaagtcacaaagtcacaaaactgaattttggaaggaacagagcgcaccagctatgccaggtttagctgctgaagcggatgtcgcattggcatttgtcatgaggcacacgtttaacggtgggaggtcgaaggggtggggaaattgtggttgtggcttagaaaagctgcccactttcaaagccaaggtctcggtcggagaactgatgaaggtttggaggcgaagggacctaccacttaaatctggggctcctctggacttcgctcggcatcacaccaccttcttgggttgctccgagtacaagcctcggcaaggatcgaagaccaagcgccctagagcgaagagtgtcacgtcccagtga

SEQ ID NO: 6737 - DNA, 6060 bp, Zea Mays
atggagacggctgccgcgaccgcgaggcccggcgcagcgaggaagcggcggtggaaccaatcgcagccttgccaaggggagggtccgagcgatctcaagttcgctagacttcgcttcgacggcgacggcggcgccaagggcgcgtgggaacacctcgacctcgtcctctccctccagagcaaggagctgtcgctcgaaagaaagattgagctagcggtcgaatttctaaccacactgccaaataactcaagctgcagcattcagctattgcggctggtgtcatttattggaaactggttgcagtctatcttaaattttcctgagaatagtaaaaagattctacatatttttgatccagcattggatagtagatgctgggcaattttgagagtgtgtgttgaaaagaaaccatccatttcaatatctctgaacttacttaaatcccttagtcgagttgcaagtcatggtttgggcagagttgatagcaacacatcatgtcctgacaatgaatctattgagctctttgaacaagtgtttgactgcatgtcattgcttttctcttccaatacaagagctttcttcaacgctggtgtggatttatgggcctcttgtgccattgaggttgtcaatcttgctcagaaggtgtcagctaaaaaggacaatttttgccctgttcttcagaagcttgcaaattgcctcctcgggcaattcgcatgcttcctgagattttatgcaaatccgaagaatattttccatgcttttgttgataaggttcttgggccattgttggaattgttagttttacttaattcacaagcacattccagtgaacacaagcagacaggaacaatgttgaaaattgttgaagatgttttttcaaatggactgtttcatccccaacatcttagtggatatttcggtctcaggagtttgaataaatcttctgctgctaaggatatcaaaggaagctaccatagacatctatttcagcgattcaaaggaataaaaacagaaaacaaggctgtattgctggctgggtttggctacttgtttcaattgtttgttaggagggctagaaatcaaagaacaactgtagcaccaagtagaacgactttgggtacgctgcacaaaagcaatgatggttctgaagaaccacaacatagggaatcactttttgaagtgtttattatgttcatggaacccatcgtattagagtgtaaatcgtattcccaaaaggacttctctaagttaggggtgacaaggctagtagaggtccattgcatgctgaaatccattaatgtgatgctgataacccttattgaagagaagatctatgttcctacagaggacacattggaaggatctcacttcaattttttgcaagatatttactctgtcttgatcttaatatctgaaaagatgtacaaattctggatgtctgctgtgcatctagaagatgtaaacattaagaagatagtacctttaatgtttgcagagattatttctgcagttggcaattttctagaaatcgagtacaaagttctaggagacgaccttgtgaaattgtggttaatgatttttgctttgtctgctattaatacatcttccaaggacatcgaaccctgttttctgcttgcttcaaagatttcaagcctctcagcccaagtgatttgcacattcagtgaacttcgtcagtctgtgtgatgctgtgagggcattcagagttgagggccctgatggagtacatggctcattttctgtggcctctttatcgtcccaggagtgtttgggatcattgacaacactgttgagttccgaaacattgatgggtgctattcgcacttcaattaagtcgatgcctcaaggccagtctagccgatgtatagaggagcttacatcggatctcacagaaacattgaattggatggcagattgcagttttgaagatgatgtaagcaaactcagagagccatccattgccaggaagtctattttttgtcagaaagccgaacttcttggcagacacttatctgaagtatatgctagcattcttgattcaataactgtcactgtttcaaatagtacactggtaggaaaatctgttgaaaggttggtcaatgcagtccggcgaaatttcagtcacttggtcagaaacaaatcaaaaaatataaatggatttatttcttcaattatgggaaaaaatgtatctaaaaaactacatgccaaccggcagaagatcccaagtttttcctggattttttgcctattctgtcgcctatatatatcatgtagaagcttgtatcagcaatctattggcctcatgcctccagatgtagccatagatgcaacaaagttagtggggaatccattcattgtatgttcaggaaaggaatggaccaatccgacgaatattcttgggaagggttattttgcattgatcgatgaaaattcaaactcccttttggatgttattgagagtttatcagagtctctctcaacaaactgtgcttcttttgctccacttgtttacatcttccatgtcatggttctgcagagactcaatgaccttaacaggcagattaaggcatttcaatttttgcttgaagatgatgcttggcaaatagataataaggatataggaaacactcgactgttaaaggaatcttgcagtctggaggctgctaaattgatgagttttgtgatgaattatgtgaagctattatcttcaggagaaactggtccttttgggtcttatgatgttagtagttcctgggatttgagtctatgttccttagatgaaggctcttttcctatagccacgtggcagcttctgtgtgaaaacattgacgtttggagctctcatgtttctaagaaggatttaaagaactttttctctaatttgataaggttttcttttactcaaaagagatcttccctggacaaggagaataatggcactcaatcttcgggcagagaaatgactttgcatagtgtctctattggagtcctttgtgatacaattatttatgaaaaaaaggtaattttgaagaatctggcatcaagtttttgtcatgctttgaagaaatcgttttcttttgttaccaactctgatggagataatgtctttttggacacttcacctgatttgatggagacaataagtaacctggaaaatgagaagttgattggtacaggttctggtgctacgcatgcgcactgcttagacaaacactggatctgtgaggatttccttaatttttttagtgctgttcctggatttcatgcaaattccaaggcattcatacggcttataaactatattctccatcttgaaagactgctgctgcttaaattgctaggtcttcgttgtgaatcctgcaatcccatgaagttactgcgtttgtttatatgttgtcgtagggctctgataaatctcatcttgaaattcgggaaagagtgcccagaggcaaggcaatacttgtccttttcaaataaaaatgaagactgcaactgggatacctgttaccataaaggacagcaagtgtgttatcaaaatagaagactgccgtaacactgtatgttggaaaagattgtcatgcagcatgtcttgcataggaggatttttgcagggacttaattcagcattagaaagcacattcaatgatcacccaatagcaagcccagaggacaggaagatgttgcttcagtattgctcaagatttagcagttatgtcgctaagtttgggacctttgtagatatttgtgttcatgtcttgtttatggataacaaagattctgcctctatagatttagtctctgttcatcttccacaagagctagattgtgcgaatggttttctgaatattgaagcaatcatggatgaattgacaaagtgtggaagtcatggagttgatctgtctaagatacagtacatggaaaatgttcttctggaaaacctgttgaaaggcagacttgcagccctgtcgaacagctttcattgggtaccatgcttgggatagctttcatcactctacagaaagttgcagacatgtctagctggccacacatgttttgtcttgtatggattgatggggtattaagatatcttgaagtcttaggaagtgcatttacattgtctgagctcaatatttcaatagaactgtatactcagattataaatgctttattgagggctgttggtaaatgcatcttacttcaacagaagaatgctactctccctactcatgagattggctcaagcacgaaaacactgcaattacagaatgcatctggttatgcttttcctaaagatttcattgatacacagaatagattaaattcattgaaatcgaggcttcgactagtacttggaaaatttgtcagtattgcatcaaacacacatctaaatgcagctctacaagtaattgaaagggcattggttggagtgaatcattgcagtcattcaatataccaaatttacactggaaatcctgatggtgggacagtttcttctgatgttgctgctgggatcgactgcctctatatgattcttgattttgtgccaggaaacaagcgcgtttttaagaggactgtccctggcctagttggtgctttattcaacattatactacaccttcagagtccacatattttctatagtcagaacctgccacctcaaggtagtgtgttccatccagatgctggagccactgttctaatgtgtgttgaggttatcacttcatttgtgggaagacattcttttcaaattgatgcatcccatgtttcccagtgtctgcttgttcctgtgacactcttcaaagagtttaaacatcttctagcaaagtactgcaaccaaagtgtacaacaccatggagatcatgctgaatatattcttgacagacaattttcagttgatatctatgctgcatgttgcaaattgttatgcactactcttcggcaccaacaacgtgagattgggtggtgtgtggccctcctggaggattcagtaagcatactgctcggttgtttggagtccacagattcgaagatgattaacgtagctggatattttgcttggaatatggaagaggcactaaaatgtgcttcctttttcagaaggatctatgaagagatgcgccagcagagagaaaccctaggaaaacatgccatgcactttcttgctggttatatttccatgttttctggacagggtccttttcagacagggataacacgagaaattgatgaggtcctgagacctggtgtgtattccctgattgatatatgcgaggaaagtgattttcaacagctccacacatacctgggtgagggtccatgccgaaccactcttgctgatctggtgcgtgattataaattacacttccagtatcagggcaagatctaagccagcctgttctttatttttgaacaactggcgtttatcctgtcacgtctggttagaaaatctatgaagtaccatcttctggatgatcttgtgttttgggtggactaattttggcctaatggctgcttaccgacttatcaaggagacatggtggctaataaagatttaaggcttgtgaaatcaacttcataggatctacagctgcctcgtgctgttctgcaagttgacctggacacctggtaatatcaagtagatatcgacatttaattccagggtaatgtagaacatgcatgcttacccttgaataagtgatatttgaagccttatcacttgaatataattccttttccaggttttcctggtacttaacaacagcaaaaataggacggttagtatcaagtggtgtttggctaccttgtaagagatttactgattaaaacattgtaatgctaaagcttgaatagatcataattgaggaaagagaattatctagtgtcctggtgaagttctgccggtgttggtctcgatcgacctgcttctagtgcaatccagatccaggcatatttatcactcagaatcgagcccccctacttctgttttgcccgttttctttttgcagtttcctttcacagtttgacacaaccacaaaagtcttt

SEQ ID NO: 6738 - DNA, 5678 bp, Zea Mays
atggagacggctgccgcgaccgcgaggcccggcgcagcgaggaagcggcggtggaaccaatcgcagccttgccaaggggagggtccgagcgatctcaagttcgctagacttcgcttcgacggcgacggcggcgccaagggcgcgtgggaacacctcgacctcgtcctctccctccagagcaaggagctgtcgctcgaaagaaagattgagctagcggtcgaatttctaaccacactgccaaataactcaagctgcagcattcagctattgcggctggtgtcatttattggaaactggttgcagtctatcttaaattttcctgagaatagtaaaaagattctacatatttttgatccagcattggatagtagatgctgggcaattttgagagtgtgtgttgaaaagaaaccatccatttcaatatctctgaacttacttaaatcccttagtcgagttgcaagtcatggtttgggcagagttgatagcaacacatcatgtcctgacaatgaatctattgagctctttgaacaagtgtttgactgcatgtcattgcttttctcttccaatacaagagctttcttcaacgctggtgtggatttatgggcctcttgtgccattgaggttgtcaatcttgctcagaaggtgtcagctaaaaaggacaatttttgccctgttcttcagaagcttgcaaattgcctcctcgggcaattcgcatgcttcctgagattttatgcaaatccgaagaatattttccatgcttttgttgataaggttcttgggccattgttggaattgttagttttacttaattcacaagcacattccagtgaacacaagcagacaggaacaatgttgaaaattgttgaagatgttttttcaaatggactgtttcatccccaacatcttagtggatatttcggtctcaggagtttgaataaatcttctgctgctaaggatatcaaaggaagctaccatagacatctatttcagcgattcaaaggaataaaaacagaaaacaaggctgtattgctggctgggtttggctacttgtttcaattgtttgttaggagggctagaaatcaaagaacaactgtagcaccaagtagaacgactttgggtacgctgcacaaaagcaatgatggttctgaagaaccacaacatagggaatcactttttgaagtgtttattatgttcatggaacccatcgtattagagtgtaaatcgtattcccaaaaggacttctctaagttaggggtgacaaggctagtagaggtccattgcatgctgaaatccattaatgtgatgctgataacccttattgaagagaagatctatgttcctacagaggacacattggaaggatctcacttcaattttttgcaagatatttactctgtcttgatcttaatatctgaaaagatgtacaaattctggatgtctgctgtgcatctagaagatgtaaacattaagaagatagtacctttaatgtttgcagagattatttctgcagttggcaattttctagaaatcgagtacaaagttctaggagacgaccttgtgaaattgtggttaatgatttttgctttgtctgctattaatacatcttccaaggacatcgaaccctgttttctgcttgcttcaaagatttcaagcctctcagcccaagtgatttgcacattcagtgaacttcgtcaggtttcccgctcaattttcagtctgtgtgatgctgtgagggcattcagagttgagggccctgatggagtacatggctcattttctgtggcctctttatcgtcccaggagtgtttgggatcattgacaacactgttgagttccgaaacattgatgggtgctattcgcacttcaattaagtcgatgcctcaaggccagtctagccgatgtatagaggagcttacatcggatctcacagaaacattgaattggatggcagattgcagttttgaagatgatagactcaatgaccttaacaggcagattaaggcatttcaatttttgcttgaagatgatgcttggcaaatagataataaggatataggaaacactcgactgttaaaggaatcttgcagtctggaggctgctaaattgatgagttttgtgatgaattatagatcttccctggacaaggagaataatggcactcaatcttcgggcagagaaatgactttgcatagtgtctctattggagtcctttgtgatacaattatttatgaaaaaaaggtaattttgaagaatctggcatcaagtttttgtcatgctttgaagaaatcgttttcttttgttaccaactctgatggagataatgtctttttggacacttcacctgatttgatggagacaataagtaacctggaaaatgagaagttgattggtacaggttctggtgctacgcatgcgcactgcttagacaaacactggatctgtgaggatttccttaatttttttagtgctgttcctggatttcatgcaaattccaaggcattcatacggcttataaactatattctccatcttgaaagactgctgctgcttaaattgctaggtcttcgttgtgaatcctgcaatcccatgaagttactgcgtttgtttatatgttgtcgtagggctctgataaatctcatcttgaaattcgggaaagagtgcccagaggcaaggcaatacttgtccttttcaaataaaaatggtaactcatattccctggtttggtttttgagatctgttcaggaaattgttggttcatcacataaaatatttgacgagtgtactgatgaggtgaataggttgatgttctccttgttagataagacatcagaattattttctacactagctagtttgaattcatcagtttacttgtttgatttaaagaaacaaattgaatcttcccttgatggtagtcctattaaaaaggagacttcagaacataatgaccaggcatttgatatagtagaagtatcagccttagagtgtgtcagaagtatggctgaattgttgcagaagactgcaactgggatacctgttaccataaaggacagcaagtgtgttatcaaaatagaagactgccgtaacactgtatgttggaaaagattgtcatgcagcatgtcttgcataggaggatttttgcagggacttaattcagcattagaaagcacattcaatgatcacccaatagcaagcccagaggacaggaagatgttgcttcagtattgctcaagatttagcagttatgtcgctaagtttgggacctttgtagatatttgtgttcatgtcttgtttatggataacaaagattctgcctctatagatttagtctctgttcatcttccacaagagctagattgtgcgaatggttttctgaatattgaagcaatcatggatgaattgacaaagtgtggaagtcatggagttgatctgtctaagatacagtacatggaaaatgttcttctggaaaacctgttgaaaggtgaatgcccactcatatcattcactttgagagagatatacagtatatctgctgctatcattaaatttcatggttacctatccttttcaagtgatgtttctaggcagacttgcagccctgtcgaacagctttcattgggtaccatgcttgggatagctttcatcactctacagaaagttgcagacatgtctagctggccacacatgttttgtcttgtatggattgatggggtattaagatatcttgaagtcttaggaagtgcatttacattgtctgagctcaatatttcaatagaactgtatactcagattataaatgctttattgagggctgttggtaaatgcatcttacttcaacagaagaatgctactctccctactcatgagattggctcaagcacgaaaacactgcaattacagaatgcatctggttatgcttttcctaaagatttcattgatacacagaatagattaaattcattgaaatcgaggcttcgactagtacttggaaaatttgtcagtattgcatcaaacacacatctaaatgcagctctacaagtaattgaaagggcattggttggagtgaatcattgcagtcattcaatataccaaatttacactggaaatcctgatggtgggacagtttcttctgatgttgctgctgggatcgactgcctctatatgattcttgattttgtgccaggaaacaagcgcgtttttaagaggactgtccctggcctagttggtgctttattcaacattatactacaccttcagagtccacatattttctatagtcagaacctgccacctcaaggtagtgtgttccatccagatgctggagccactgttctaatgtgtgttgaggttatcacttcatttgtgggaagacattcttttcaaattgatgcatcccatgtttcccagtgtctgcttgttcctgtgacactcttcaaagagtttaaacatcttctagcaaagtactgcaaccaaagtgtacaacaccatggagatcatgctgaatatattcttgacagacaattttcagttgatatctatgctgcatgttgcaaattgttatgcactactcttcggcaccaacaacgtgagattgggtggtgtgtggccctcctggaggattcagtaagcatactgctcggttgtttggagtccacagattcgaagatgattaacgtagctggatattttgcttggaatatggaagaggcactaaaatgtgcttcctttttcagaaggatctatgaagagatgcgccagcagagagaaaccctaggaaaacatgccatgcactttcttgctggttatatttccatgttttctggacagggtccttttcagacagggataacacgagaaattgatgaggtcctgagacctggtgtgtattccctgattgatatatgcgaggaaagtgattttcaacagctccacacatacctgggtgagggtccatgccgaaccactcttgctgatctggtgcgtgattataaattacacttccagtatcagggcaagatctaagccagcctgttctttatttttgaacaactggcgtttatcctgtcacgtctggttagaaaatctatgaagtaccatcttctggatgatcttgtgttttgggtggactaattttggcctaatggctgcttaccgacttatcaaggagacatggtggctaataaagatttaaggcttgtgaaatcaacttcataggatctacagctgcctcgtgctgttctgcaagttgacctggacacctggtaatatcaagtagatatcgacatttaattccagggtaatgtagaacatgcatgcttacccttgaataagtgatatttgaagccttatcacttgaatataattccttttccaggttttcctggtacttaacaacagcaaaaataggacggttagtatcaagtggtgtttggctaccttgtaagagatttactgattaaaacattgtaatgctaaagcttgaatagatcataattgaggaaagagaattatctagtgtcctggtgaagttctgccggtgttggtctcgatcgacctgcttctagtgcaatccagatccaggcatatttatcactcagaatcgagcccccctacttctgttttgcccgttttctttttgcagtttcctttcacagtttgacacaaccacaaaagtcttt

SEQ ID NO: 6739 - DNA, 6406 bp, Zea Mays
atggagacggctgccgcgaccgcgaggcccggcgcagcgaggaagcggcggtggaaccaatcgcagccttgccaaggggagggtccgagcgatctcaagttcgctagacttcgcttcgacggcgacggcggcgccaagggcgcgtgggaacacctcgacctcgtcctctccctccagagcaaggagctgtcgctcgaaagaaagattgagctagcggtcgaatttctaaccacactgccaaataactcaagctgcagcattcagctattgcggctggtgtcatttattggaaactggttgcagtctatcttaaattttcctgagaatagtaaaaagattctacatatttttgatccagcattggatagtagatgctgggcaattttgagagtgtgtgttgaaaagaaaccatccatttcaatatctctgaacttacttaaatcccttagtcgagttgcaagtcatggtttgggcagagttgatagcaacacatcatgtcctgacaatgaatctattgagctctttgaacaagtgtttgactgcatgtcattgcttttctcttccaatacaagagctttcttcaacgctggtgtggatttatgggcctcttgtgccattgaggttgtcaatcttgctcagaaggtgtcagctaaaaaggacaatttttgccctgttcttcagaagcttgcaaattgcctcctcgggcaattcgcatgcttcctgagattttatgcaaatccgaagaatattttccatgcttttgttgataaggttcttgggccattgttggaattgttagttttacttaattcacaagcacattccagtgaacacaagcagacaggaacaatgttgaaaattgttgaagatgttttttcaaatggactgtttcatccccaacatcttagtggatatttcggtctcaggagtttgaataaatcttctgctgctaaggatatcaaaggaagctaccatagacatctatttcagcgattcaaaggaataaaaacagaaaacaaggctgtattgctggctgggtttggctacttgtttcaattgtttgttaggagggctagaaatcaaagaacaactgtagcaccaagtagaacgactttgggtacgctgcacaaaagcaatgatggttctgaagaaccacaacatagggaatcactttttgaagtgtttattatgttcatggaacccatcgtattagagtgtaaatcgtattcccaaaaggacttctctaagttaggggtgacaaggctagtagaggtccattgcatgctgaaatccattaatgtgatgctgataacccttattgaagagaagatctatgttcctacagaggacacattggaaggatctcacttcaattttttgcaagatatttactctgtcttgatcttaatatctgaaaagatgtacaaattctggatgtctgctgtgcatctagaagatgtaaacattaagaagatagtacctttaatgtttgcagagattatttctgcagttggcaattttctagaaatcgagtacaaagttctaggagacgaccttgtgaaattgtggttaatgatttttgctttgtctgctattaatacatcttccaaggacatcgaaccctgttttctgcttgcttcaaagatttcaagcctctcagcccaagtgatttgcacattcagtgaacttcgtcagtctgtgtgatgctgtgagggcattcagagttgagggccctgatggagtacatggctcattttctgtggcctctttatcgtcccaggagtgtttgggatcattgacaacactgttgagttccgaaacattgatgggtgctattcgcacttcaattaagtcgatgcctcaaggccagtctagccgatgtatagaggagcttacatcggatctcacagaaacattgaattggatggcagattgcagttttgaagatgatgtaagcaaactcagagagccatccattgccaggaagtctattttttgtcagaaagccgaacttcttggcagacacttatctgaagtatatgctagcattcttgattcaataactgtcactgtttcaaatagtacactggtaggaaaatctgttgaaaggttggtcaatgcagtccggcgaaatttcagtcacttggtcagaaacaaatcaaaaaatataaatggatttatttcttcaattatgggaaaaaatgtatctaaaaaactacatgccaaccggcagaagatcccaagtttttcctggattttttgcctattctgtcgcctatatatatcatgtagaagcttgtatcagcaatctattggcctcatgcctccagatgtagccatagatgcaacaaagttagtggggaatccattcattgtatgttcaggaaaggaatggaccaatccgacgaatattcttgggaagggttattttgcattgatcgatgaaaattcaaactcccttttggatgttattgagagtttatcagagtctctctcaacaaactgtgcttcttttgctccacttgtttacatcttccatgtcatggttctgcagagactcaatgaccttaacaggcagattaaggcatttcaatttttgcttgaagatgatgcttggcaaatagataataaggatataggaaacactcgactgttaaaggaatcttgcagtctggaggctgctaaattgatgagttttgtgatgaattatgtgaagctattatcttcaggagaaactggtccttttgggtcttatgatgttagtagttcctgggatttgagtctatgttccttagatgaaggctcttttcctatagccacgtggcagcttctgtgtgaaaacattgacgtttggagctctcatgtttctaagaaggatttaaagaactttttctctaatttgataaggttttcttttactcaaaagagatcttccctggacaaggagaataatggcactcaatcttcgggcagagaaatgactttgcatagtgtctctattggagtcctttgtgatacaattatttatgaaaaaaaggtaattttgaagaatctggcatcaagtttttgtcatgctttgaagaaatcgttttcttttgttaccaactctgatggagataatgtctttttggacacttcacctgatttgatggagacaataagtaacctggaaaatgagaagttgattggtacaggttctggtgctacgcatgcgcactgcttagacaaacactggatctgtgaggatttccttaatttttttagtgctgttcctggatttcatgcaaattccaaggcattcatacggcttataaactatattctccatcttgaaagactgctgctgcttaaattgctaggtcttcgttgtgaatcctgcaatcccatgaagttactgcgtttgtttatatgttgtcgtagggctctgataaatctcatcttgaaattcgggaaagagtgcccagaggcaaggcaatacttgtccttttcaaataaaaatggtaactcatattccctggtttggtttttgagatctgttcaggaaattgttggttcatcacataaaatatttgacgagtgtactgatgaggtgaataggttgatgttctccttgttagataagacatcagaattattttctacactagctagtttgaattcatcagtttacttgtttgatttaaagaaacaaattgaatcttcccttgatggtagtcctattaaaaaggagacttcagaacataatgaccaggcatttgatatagtagaagtatcagccttagagtgtgtcagaagtatggctgaattgttgcagaagactgcaactgggatacctgttaccataaaggacagcaagtgtgttatcaaaatagaagactgccgtaacactgtatgttggaaaagattgtcatgcagcatgtcttgcataggaggatttttgcagggacttaattcagcattagaaagcacattcaatgatcacccaatagcaagcccagaggacaggaagatgttgcttcagtattgctcaagatttagcagttatgtcgctaagtttgggacctttgtagatatttgtgttcatgtcttgtttatggataacaaagattctgcctctatagatttagtctctgttcatcttccacaagagctagattgtgcgaatggttttctgaatattgaagcaatcatggatgaattgacaaagtgtggaagtcatggagttgatctgtctaagatacagtacatggaaaatgttcttctggaaaacctgttgaaaggtgaatgcccactcatatcattcactttgagagagatatacagtatatctgctgctatcattaaatttcatggttacctatccttttcaagtgatgtttctaggcagacttgcagccctgtcgaacagctttcattgggtaccatgcttgggatagctttcatcactctacagaaagttgcagacatgtctagctggccacacatgttttgtcttgtatggattgatggggtattaagatatcttgaagtcttaggaagtgcatttacattgtctgagctcaatatttcaatagaactgtatactcagattataaatgctttattgagggctgttggtaaatgcatcttacttcaacagaagaatgctactctccctactcatgagattggctcaagcacgaaaacactgcaattacagaatgcatctggttatgcttttcctaaagatttcattgatacacagaatagattaaattcattgaaatcgaggcttcgactagtacttggaaaatttgtcagtattgcatcaaacacacatctaaatgcagctctacaagtaattgaaagggcattggttggagtgaatcattgcagtcattcaatataccaaatttacactggaaatcctgatggtgggacagtttcttctgatgttgctgctgggatcgactgcctctatatgattcttgattttgtgccaggaaacaagcgcgtttttaagaggactgtccctggcctagttggtgctttattcaacattatactacaccttcagagtccacatattttctatagtcagaacctgccacctcaaggtagtgtgttccatccagatgctggagccactgttctaatgtgtgttgaggttatcacttcatttgtgggaagacattcttttcaaattgatgcatcccatgtttcccagtgtctgcttgttcctgtgacactcttcaaagagtttaaacatcttctagcaaagtactgcaaccaaagtgtacaacaccatggagatcatgctgaatatattcttgacagacaattttcagttgatatctatgctgcatgttgcaaattgttatgcactactcttcggcaccaacaacgattcgaagatgattaacgtagctggatattttgcttggaatatggaagaggcactaaaatgtgcttcctttttcagaaggatctatgaagagatgcgccagcagagagaaaccctaggaaaacatgccatgcactttcttgctggttatatttccatgttttctggacagggtccttttcagacagggataacacgagaaattgatgaggtcctgagacctggtgtgtattccctgattgatatatgcgaggaaagtgattttcaacagctccacacatacctgggtgagggtccatgccgaaccactcttgctgatctggtgcgtgattataaattacacttccagtatcagggcaagatctaagccagcctgttctttatttttgaacaactggcgtttatcctgtcacgtctggttagaaaatctatgaagtaccatcttctggatgatcttgtgttttgggtggactaattttggcctaatggctgcttaccgacttatcaaggagacatggtggctaataaagatttaaggcttgtgaaatcaacttcataggatctacagctgcctcgtgctgttctgcaagttgacctggacacctggtaatatcaagtagatatcgacatttaattccagggtaatgtagaacatgcatgcttacccttgaataagtgatatttgaagccttatcacttgaatataattccttttccaggttttcctggtacttaacaacagcaaaaataggacggttagtatcaagtggtgtttggctaccttgtaagagatttactgattaaaacattgtaatgctaaagcttgaatagatcataattgaggaaagagaattatctagtgtcctggtgaagttctgccggtgttggtctcgatcgacctgcttctagtgcaatccagatccaggcatatttatcactcagaatcgagcccccctacttctgttttgcccgttttctttttgcagtttcctttcacagtttgacacaaccacaaaagtcttt

SEQ ID NO: 6740 - DNA, 6419 bp, Zea Mays
atggagacggctgccgcgaccgcgaggcccggcgcagcgaggaagcggcggtggaaccaatcgcagccttgccaaggggagggtccgagcgatctcaagttcgctagacttcgcttcgacggcgacggcggcgccaagggcgcgtgggaacacctcgacctcgtcctctccctccagagcaaggagctgtcgctcgaaagaaagattgagctagcggtcgaatttctaaccacactgccaaataactcaagctgcagcattcagctattgcggctggtgtcatttattggaaactggttgcagtctatcttaaattttcctgagaatagtaaaaagattctacatatttttgatccagcattggatagtagatgctgggcaattttgagagtgtgtgttgaaaagaaaccatccatttcaatatctctgaacttacttaaatcccttagtcgagttgcaagtcatggtttgggcagagttgatagcaacacatcatgtcctgacaatgaatctattgagctctttgaacaagtgtttgactgcatgtcattgcttttctcttccaatacaagagctttcttcaacgctggtgtggatttatgggcctcttgtgccattgaggttgtcaatcttgctcagaaggtgtcagctaaaaaggacaatttttgccctgttcttcagaagcttgcaaattgcctcctcgggcaattcgcatgcttcctgagattttatgcaaatccgaagaatattttccatgcttttgttgataaggttcttgggccattgttggaattgttagttttacttaattcacaagcacattccagtgaacacaagcagacaggaacaatgttgaaaattgttgaagatgttttttcaaatggactgtttcatccccaacatcttagtggatatttcggtctcaggagtttgaataaatcttctgctgctaaggatatcaaaggaagctaccatagacatctatttcagcgattcaaaggaataaaaacagaaaacaaggctgtattgctggctgggtttggctacttgtttcaattgtttgttaggagggctagaaatcaaagaacaactgtagcaccaagtagaacgactttgggtacgctgcacaaaagcaatgatggttctgaagaaccacaacatagggaatcactttttgaagtgtttattatgttcatggaacccatcgtattagagtgtaaatcgtattcccaaaaggacttctctaagttaggggtgacaaggctagtagaggtccattgcatgctgaaatccattaatgtgatgctgataacccttattgaagagaagatctatgttcctacagaggacacattggaaggatctcacttcaattttttgcaagatatttactctgtcttgatcttaatatctgaaaagatgtacaaattctggatgtctgctgtgcatctagaagatgtaaacattaagaagatagtacctttaatgtttgcagagattatttctgcagttggcaattttctagaaatcgagtacaaagttctaggagacgaccttgtgaaattgtggttaatgatttttgctttgtctgctattaatacatcttccaaggacatcgaaccctgttttctgcttgcttcaaagatttcaagcctctcagcccaagtgatttgcacattcagtgaacttcgtcaggtttcccgctcaattttcagtctgtgtgatgctgtgagggcattcagagttgagggccctgatggagtacatggctcattttctgtggcctctttatcgtcccaggagtgtttgggatcattgacaacactgttgagttccgaaacattgatgggtgctattcgcacttcaattaagtcgatgcctcaaggccagtctagccgatgtatagaggagcttacatcggatctcacagaaacattgaattggatggcagattgcagttttgaagatgatgtaagcaaactcagagagccatccattgccaggaagtctattttttgtcagaaagccgaacttcttggcagacacttatctgaagtatatgctagcattcttgattcaataactgtcactgtttcaaatagtacactggtaggaaaatctgttgaaaggttggtcaatgcagtccggcgaaatttcagtcacttggtcagaaacaaatcaaaaaatataaatggatttatttcttcaattatgggaaaaaatgtatctaaaaaactacatgccaaccggcagaagatcccaagtttttcctggattttttgcctattctgtcgcctatatatatcatgtagaagcttgtatcagcaatctattggcctcatgcctccagatgtagccatagatgcaacaaagttagtggggaatccattcattgtatgttcaggaaaggaatggaccaatccgacgaatattcttgggaagggttattttgcattgatcgatgaaaattcaaactcccttttggatgttattgagagtttatcagagtctctctcaacaaactgtgcttcttttgctccacttgtttacatcttccatgtcatggttctgcagagactcaatgaccttaacaggcagattaaggcatttcaatttttgcttgaagatgatgcttggcaaatagataataaggatataggaaacactcgactgttaaaggaatcttgcagtctggaggctgctaaattgatgagttttgtgatgaattatgtgaagctattatcttcaggagaaactggtccttttgggtcttatgatgttagtagttcctgggatttgagtctatgttccttagatgaaggctcttttcctatagccacgtggcagcttctgtgtgaaaacattgacgtttggagctctcatgtttctaagaaggatttaaagaactttttctctaatttgataaggttttcttttactcaaaagagatcttccctggacaaggagaataatggcactcaatcttcgggcagagaaatgactttgcatagtgtctctattggagtcctttgtgatacaattatttatgaaaaaaaggtaattttgaagaatctggcatcaagtttttgtcatgctttgaagaaatcgttttcttttgttaccaactctgatggagataatgtctttttggacacttcacctgatttgatggagacaataagtaacctggaaaatgagaagttgattggtacaggttctggtgctacgcatgcgcactgcttagacaaacactggatctgtgaggatttccttaatttttttagtgctgttcctggatttcatgcaaattccaaggcattcatacggcttataaactatattctccatcttgaaagactgctgctgcttaaattgctaggtcttcgttgtgaatcctgcaatcccatgaagttactgcgtttgtttatatgttgtcgtagggctctgataaatctcatcttgaaattcgggaaagagtgcccagaggcaaggcaatacttgtccttttcaaataaaaatggtaactcatattccctggtttggtttttgagatctgttcaggaaattgttggttcatcacataaaatatttgacgagtgtactgatgaggtgaataggttgatgttctccttgttagataagacatcagaattattttctacactagctagtttgaattcatcagtttacttgtttgatttaaagaaacaaattgaatcttcccttgatggtagtcctattaaaaaggagacttcagaacataatgaccaggcatttgatatagtagaagtatcagccttagagtgtgtcagaagtatggctgaattgttgcagaagactgcaactgggatacctgttaccataaaggacagcaagtgtgttatcaaaatagaagactgccgtaacactgtatgttggaaaagattgtcatgcagcatgtcttgcataggaggatttttgcagggacttaattcagcattagaaagcacattcaatgatcacccaatagcaagcccagaggacaggaagatgttgcttcagtattgctcaagatttagcagttatgtcgctaagtttgggacctttgtagatatttgtgttcatgtcttgtttatggataacaaagattctgcctctatagatttagtctctgttcatcttccacaagagctagattgtgcgaatggttttctgaatattgaagcaatcatggatgaattgacaaagtgtggaagtcatggagttgatctgtctaagatacagtacatggaaaatgttcttctggaaaacctgttgaaaggtgaatgcccactcatatcattcactttgagagagatatacagtatatctgctgctatcattaaatttcatggttacctatccttttcaagtgatgtttctaggcagacttgcagccctgtcgaacagctttcattgggtaccatgcttgggatagctttcatcactctacagaaagttgcagacatgtctagctggccacacatgttttgtcttgtatggattgatggggtattaagatatcttgaagtcttaggaagtgcatttacattgtctgagctcaatatttcaatagaactgtatactcagattataaatgctttattgagggctgttggtaaatgcatcttacttcaacagaagaatgctactctccctactcatgagattggctcaagcacgaaaacactgcaattacagaatgcatctggttatgcttttcctaaagatttcattgatacacagaatagattaaattcattgaaatcgaggcttcgactagtacttggaaaatttgtcagtattgcatcaaacacacatctaaatgcagctctacaagtaattgaaagggcattggttggagtgaatcattgcagtcattcaatataccaaatttacactggaaatcctgatggtgggacagtttcttctgatgttgctgctgggatcgactgcctctatatgattcttgattttgtgccaggaaacaagcgcgtttttaagaggactgtccctggcctagttggtgctttattcaacattatactacaccttcagagtccacatattttctatagtcagaacctgccacctcaaggtagtgtgttccatccagatgctggagccactgttctaatgtgtgttgaggttatcacttcatttgtgggaagacattcttttcaaattgatgcatcccatgtttcccagtgtctgcttgttcctgtgacactcttcaaagagtttaaacatcttctagcaaagtactgcaaccaaagtgtacaacaccatggagatcatgctgaatatattcttgacagacaattttcagttgatatctatgctgcatgttgcaaattgttatgcactactcttcggcaccaacaacgtgagattgggtggtgtgtggccctcctggaggattcagtaagcatactgctcggttgtttggagtccacagattcgaagatgattaacgtagctggatattttgcttggaatatggaagaggcactaaaatgtgcttcctttttcagaaggatctatgaagagatgcgccagcagagagaaaccctaggaaaacatgccatgcactttcttgctggttatatttccatgttttctggacagggtccttttcagacagggataacacgagaaattgatgaggtcctgagacctggtgtgtattccctgattgatatatgcgaggaaagtgattttcaacagctccacacatacctgggtgagggtccatgccgaaccactcttgctgatctggtgcgtgattataaattacacttccagtatcagggcaagatctaagccagcctgttctttatttttgaacaactggcgtttatcctgtcacgtctggttagaaaatctatgaagtaccatcttctggatgatcttgtgttttgggtggactaattttggcctaatggctgcttaccgacttatcaaggagacatggtggctaataaagatttaaggcttgtgaaatcaacttcataggatctacagctgcctcgtgctgttctgcaagttgacctggacacctggtaatatcaagtagatatcgacatttaattccagggttttcctggtacttaacaacagcaaaaataggacggttagtatcaagtggtgtttggctaccttgtaagagatttactgattaaaacattgtaatgctaaagcttgaatagatcataattgaggaaagagaattatctagtgtcctggtgaagttctgccggtgttggtctcgatcgacctgcttctagtgcaatccagatccaggcatatttatcactcagaatcgagcccccctacttctgttttgcccgttttctttttgcagtttcctttcacagtttgacacaaccacaaaagtcttt

SEQ ID NO: 6741 - DNA, 6384 bp, Zea Mays
atggagacggctgccgcgaccgcgaggcccggcgcagcgaggaagcggcggtggaaccaatcgcagccttgccaaggggagggtccgagcgatctcaagttcgctagacttcgcttcgacggcgacggcggcgccaagggcgcgtgggaacacctcgacctcgtcctctccctccagagcaaggagctgtcgctcgaaagaaagattgagctagcggtcgaatttctaaccacactgccaaataactcaagctgcagcattcagctattgcggctggtgtcatttattggaaactggttgcagtctatcttaaattttcctgagaatagtaaaaagattctacatatttttgatccagcattggatagtagatgctgggcaattttgagagtgtgtgttgaaaagaaaccatccatttcaatatctctgaacttacttaaatcccttagtcgagttgcaagtcatggtttgggcagagttgatagcaacacatcatgtcctgacaatgaatctattgagctctttgaacaagtgtttgactgcatgtcattgcttttctcttccaatacaagagctttcttcaacgctggtgtggatttatgggcctcttgtgccattgaggttgtcaatcttgctcagaaggtgtcagctaaaaaggacaatttttgccctgttcttcagaagcttgcaaattgcctcctcgggcaattcgcatgcttcctgagattttatgcaaatccgaagaatattttccatgcttttgttgataaggttcttgggccattgttggaattgttagttttacttaattcacaagcacattccagtgaacacaagcagacaggaacaatgttgaaaattgttgaagatgttttttcaaatggactgtttcatccccaacatcttagtggatatttcggtctcaggagtttgaataaatcttctgctgctaaggatatcaaaggaagctaccatagacatctatttcagcgattcaaaggaataaaaacagaaaacaaggctgtattgctggctgggtttggctacttgtttcaattgtttgttaggagggctagaaatcaaagaacaactgtagcaccaagtagaacgactttgggtacgctgcacaaaagcaatgatggttctgaagaaccacaacatagggaatcactttttgaagtgtttattatgttcatggaacccatcgtattagagtgtaaatcgtattcccaaaaggacttctctaagttaggggtgacaaggctagtagaggtccattgcatgctgaaatccattaatgtgatgctgataacccttattgaagagaagatctatgttcctacagaggacacattggaaggatctcacttcaattttttgcaagatatttactctgtcttgatcttaatatctgaaaagatgtacaaattctggatgtctgctgtgcatctagaagatgtaaacattaagaagatagtacctttaatgtttgcagagattatttctgcagttggcaattttctagaaatcgagtacaaagttctaggagacgaccttgtgaaattgtggttaatgatttttgctttgtctgctattaatacatcttccaaggacatcgaaccctgttttctgcttgcttcaaagatttcaagcctctcagcccaagtgatttgcacattcagtgaacttcgtcaggtttcccgctcaattttcagtctgtgtgatgctgtgagggcattcagagttgagggccctgatggagtacatggctcattttctgtggcctctttatcgtcccaggagtgtttgggatcattgacaacactgttgagttccgaaacattgatgggtgctattcgcacttcaattaagtcgatgcctcaaggccagtctagccgatgtatagaggagcttacatcggatctcacagaaacattgaattggatggcagattgcagttttgaagatgatgtaagcaaactcagagagccatccattgccaggaagtctattttttgtcagaaagccgaacttcttggcagacacttatctgaagtatatgctagcattcttgattcaataactgtcactgtttcaaatagtacactggtaggaaaatctgttgaaaggttggtcaatgcagtccggcgaaatttcagtcacttggtcagaaacaaatcaaaaaatataaatggatttatttcttcaattatgggaaaaaatgtatctaaaaaactacatgccaaccggcagaagatcccaagtttttcctggattttttgcctattctgtcgcctatatatatcatgtagaagcttgtatcagcaatctattggcctcatgcctccagatgtagccatagatgcaacaaagttagtggggaatccattcattgtatgttcaggaaaggaatggaccaatccgacgaatattcttgggaagggttattttgcattgatcgatgaaaattcaaactcccttttggatgttattgagagtttatcagagtctctctcaacaaactgtgcttcttttgctccacttgtttacatcttccatgtcatggttctgcagagactcaatgaccttaacaggcagattaaggcatttcaatttttgcttgaagatgatgcttggcaaatagataataaggatataggaaacactcgactgttaaaggaatcttgcagtctggaggctgctaaattgatgagttttgtgatgaattatgtgaagctattatcttcaggagaaactggtccttttgggtcttatgatgttagtagttcctgggatttgagtctatgttccttagatgaaggctcttttcctatagccacgtggcagcttctgtgtgaaaacattgacgtttggagctctcatgtttctaagaaggatttaaagaactttttctctaatttgataaggttttcttttactcaaaagagatcttccctggacaaggagaataatggcactcaatcttcgggcagagaaatgactttgcatagtgtctctattggagtcctttgtgatacaattatttatgaaaaaaaggtaattttgaagaatctggcatcaagtttttgtcatgctttgaagaaatcgttttcttttgttaccaactctgatggagataatgtctttttggacacttcacctgatttgatggagacaataagtaacctggaaaatgagaagttgattggtacaggttctggtgctacgcatgcgcactgcttagacaaacactggatctgtgaggatttccttaatttttttagtgctgttcctggatttcatgcaaattccaaggcattcatacggcttataaactatattctccatcttgaaagactgctgctgcttaaattgctaggtcttcgttgtgaatcctgcaatcccatgaagttactgcgtttgtttatatgttgtcgtagggctctgataaatctcatcttgaaattcgggaaagagtgcccagaggcaaggcaatacttgtccttttcaaataaaaatggtaactcatattccctggtttggtttttgagatctgttcaggaaattgttggttcatcacataaaatatttgacgagtgtactgatgaggtgaataggttgatgttctccttgttagataagacatcagaattattttctacactagctagtttgaattcatcagtttacttgtttgatttaaagaaacaaattgaatcttcccttgatggtagtcctattaaaaaggagacttcagaacataatgaccaggcatttgatatagtagaagtatcagccttagagtgtgtcagaagtatggctgaattgttgcagaagactgcaactgggatacctgttaccataaaggacagcaagtgtgttatcaaaatagaagactgccgtaacactgtatgttggaaaagattgtcatgcagcatgtcttgcataggaggatttttgcagggacttaattcagcattagaaagcacattcaatgatcacccaatagcaagcccagaggacaggaagatgttgcttcagtattgctcaagatttagcagttatgtcgctaagtttgggacctttgtagatatttgtgttcatgtcttgtttatggataacaaagattctgcctctatagatttagtctctgttcatcttccacaagagctagattgtgcgaatggttttctgaatattgaagcaatcatggatgaattgacaaagtgtggaagtcatggagttgatctgtctaagatacagtacatggaaaatgttcttctggaaaacctgttgaaaggtgaatgcccactcatatcattcactttgagagagatatacagtatatctgctgctatcattaaatttcatggttacctatccttttcaagtgatgtttctaggcagacttgcagccctgtcgaacagctttcattgggtaccatgcttgggatagctttcatcactctacagaaagttgcagacatgtctagctggccacacatgttttgtcttgtatggattgatggggtattaagatatcttgaagtcttaggaagtgcatttacattgtctgagctcaatatttcaatagaactgtatactcagattataaatgctttattgagggctgttggtaaatgcatcttacttcaacagaagaatgctactctccctactcatgagattggctcaagcacgaaaacactgcaattacagaatgcatctggttatgcttttcctaaagatttcattgatacacagaatagattaaattcattgaaatcgaggcttcgactagtacttggaaaatttgtcagtattgcatcaaacacacatctaaatgcagctctacaagtaattgaaagggcattggttggagtgaatcattgcagtcattcaatataccaaatttacactggaaatcctgatggtgggacagtttcttctgatgttgctgctgggatcgactgcctctatatgattcttgattttgtgccaggaaacaagcgcgtttttaagaggactgtccctggcctagttggtgctttattcaacattatactacaccttcagagtccacatattttctatagtcagaacctgccacctcaaggtagtgtgttccatccagatgctggagccactgttctaatgtgtgttgaggttatcacttcatttgtgggaagacattcttttcaaattgatgcatcccatgtttcccagtgtctgcttgttcctgtgacactcttcaaagagtttaaacatcttctagcaaagtactgcaaccaaagtgtacaacaccatggagatcatgctgaatatattcttgacagacaattttcagttgatatctatgctgcatgttgcaaattgttatgcactactcttcggcaccaacaacgtgagattgggtggtgtgtggccctcctggaggattcagtaagcatactgctcggttgtttggagtccacagattcgaagatgattaacgtagctggatattttgcttggaatatggaagaggcactaaaatgtgcttcctttttcagaaggatctatgaagagatgcgccagcagagagaaaccctaggaaaacatgccatgcactttcttgctggttatatttccatgttttctggacagggtccttttcagacagggataacacgagaaattgatgaggtcctgagacctggtgtgtattccctgattgatatatgcgaggaaagtgattttcaacagctccacacatacctgggtgagggtccatgccgaaccactcttgctgatctggtgcgtgattataaattacacttccagtatcagggcaagatctaagccagcctgttctttatttttgaacaactggcgtttatcctgtcacgtctggttagaaaatctatgaagtaccatcttctggatgatcttgtgttttgggtggactaattttggcctaatggctgcttaccgacttatcaaggagacatggtggctaataaagatttaaggcttgtgaaatcaacttcataggatctacagctgcctcgtgctgttctgcaagttgacctggacacctggttttcctggtacttaacaacagcaaaaataggacggttagtatcaagtggtgtttggctaccttgtaagagatttactgattaaaacattgtaatgctaaagcttgaatagatcataattgaggaaagagaattatctagtgtcctggtgaagttctgccggtgttggtctcgatcgacctgcttctagtgcaatccagatccaggcatatttatcactcagaatcgagcccccctacttctgttttgcccgttttctttttgcagtttcctttcacagtttgacacaaccacaaaagtcttt

SEQ ID NO: 6742 - DNA, 1018 bp, Zea Mays
ggcgatgttgaagctgccgatcccgggaataaagctgctgcggaaccggtgggagatgtagctgctgcggaacacgaaagttttgcattatttaagttttaatcaaggaaatggtccaagggtgcatcactggaataagctcgagaccacaagtgtcatatctcctctaatctttactctctcaggttccagttgaatatgttcattgctacaatgaagccgttttgttgtttgctgtccgccgccgtattcggggtcttcgcctgcctctatgggctcagggcggacaggggcctacaagatctcctcgggccaaggaatcgttcccctccggcgacctccctcctccctttcgtctcaggccttccactgtatctccatcaaagcgaaggatcagaggctactccgttaggaggagaggtaccatgccaacagaatgcttagcttttacgcaccagcgcgtgacgccatgtgggagcaaagttgggaaaatggatattggcggtggtcgagaggtcactcttattggaagtctagaaatgccaaaggatgacatatggcttgtcacagctatcctatctggtctgattgaataatgtgcgaagatataagtcatatatttcttggcctcctatcttcgcctcaggcagctgggagtggttttatactcgctgatgacatcaagtcttaggtgcttccattgatcaataactcagggaaatatggagggatcatgatgtggttcaagtactatgatgatcaagatggctacaattcttgagtgaagagtgatgtttaggttgttgcctgtggtgtgtcacaatatctgtgtgttacttgtgtgtatgtgagaaattatgtgactctggagtctggatagtgcaataagtattactcaagtatatgattgaatcttctgtcatactattcaaattatgtcatattgtatcttttaaggtatgtaaacatccacttttagcgatgctaacaaaagaatagaacaacaattagtgttttc

SEQ ID NO: 6743 - DNA, 1184 bp, Zea Mays
aggcgatgttgaagctgccgatcccgggaataaagctgctgcggaaccggtgggagatgtagctgctgcggaacacgaaagttttgcattatttaagttttaatcaaggaaatggtccaagggtgcatcactggaataagctcgagaccacaagtgtcatatctcctctaatctttactctctcaggttccagttgaatatgttcattgctacaatgaagccgttttgttgtttgctgtccgccgccgtattcggggtcttcgcctgcctctatgggctcagggcggacaggggcctacaagatctcctcgggccaaggaatcgttcccctccggcgacctccctcctccctttcgtctcaggccttccactgtatctccatcaaagcgaaggatcagaggctactccgttaggaggagaggaaaggaattgtgagccttgtgttggagaagtcgaagactgagagtatatggtggctccattggtgtccatgttaatggctggcgtgttctagagcaactcggggttgtcgtagagcttagggagacttgccaaccttagggagacttgccaaccttgtcatcgcgtaccatgccaacagaatgcttagcttttacgcaccagcgcgtgacgccatgtgggagcaaagttgggaaaatggatattggcggtggtcgagaggtcactcttattggaagtctagaaatgccaaaggatgacatatggcttgtcacagctatcctatctggtctgattgaataatgtgcgaagatataagtcatatatttcttggcctcctatcttcgcctcaggcagctgggagtggttttatactcgctgatgacatcaagtcttaggtgcttccattgatcaataactcagggaaatatggagggatcatgatgtggttcaagtactatgatgatcaagatggctacaattcttgagtgaagagtgatgtttaggttgttgcctgtggtgtgtcacaatatctgtgtgttacttgtgtgtatgtgagaaattatgtgactctggagtctggatagtgcaataagtattactcaagtatatgattgaatcttctgtcatactattcaaattatgtcatattgtatcttttaaggtatgtaaacatccacttttagcgatgctaacaaaagaatagaacaacaattagtgttttc

SEQ ID NO: 6744 - DNA, 1243 bp, Zea Mays
aggcgatgttgaagctgccgatcccgggaataaagctgctgcggaaccggtgggagatgtagctgctgcggaacacgaaagttttaatcaaggaaatggtccaagggtgcatcactggaataagctcgagaccacaagtgtcatatctcctctaatctttactctctcagtctggtgtctatcagaagctactcctttctacttaaaaggtttcagccatggctgtgctgaatttgcaatggtaggttccagttgaatatgttcattgctacaatgaagccgttttgttgtttgctgtccgccgccgtattcggggtcttcgcctgcctctatgggctcagggcggacaggggcctacaagatctcctcgggccaaggaatcgttcccctccggcgacctccctcctccctttcgtctcaggccttccactgtatctccatcaaagcgaaggatcagaggctactccgttaggaggagaggaaaggaattgtgagccttgtgttggagaagtcgaagactgagagtatatggtggctccattggtgtccatgttaatggctggcgtgttctagagcaactcggggttgtcgtagagcttagggagacttgccaaccttagggagacttgccaaccttgtcatcgcgtaccatgccaacagaatgcttagcttttacgcaccagcgcgtgacgccatgtgggagcaaagttgggaaaatggatattggcggtggtcgagaggtcactcttattggaagtctagaaatgccaaaggatgacatatggcttgtcacagctatcctatctggtctgattgaataatgtgcgaagatataagtcatatatttcttggcctcctatcttcgcctcaggcagctgggagtggttttatactcgctgatgacatcaagtcttaggtgcttccattgatcaataactcagggaaatatggagggatcatgatgtggttcaagtactatgatgatcaagatggctacaattcttgagtgaagagtgatgtttaggttgttgcctgtggtgtgtcacaatatctgtgtgttacttgtgtgtatgtgagaaattatgtgactctggagtctggatagtgcaataagtattactcaagtatatgattgaatcttctgtcatactattcaaattatgtcatattgtatcttttaaggtatgtaaacatccacttttagcgatgctaacaaaagaatagaacaacaattagtgttttc

SEQ ID NO: 6745 - DNA, 1169 bp, Zea Mays
gaggcgatgttgaagctgccgatcccgggaataaagctgctgcggaaccggtgggagatgtagctgctgcggaacacgaaagttttaatcaaggaaatggtccaagggtgcatcactggaataagctcgagaccacaagtgtcatatctcctctaatctttactctctcaggttccagttgaatatgttcattgctacaatgaagccgttttgttgtttgctgtccgccgccgtattcggggtcttcgcctgcctctatgggctcagggcggacaggggcctacaagatctcctcgggccaaggaatcgttcccctccggcgacctccctcctccctttcgtctcaggccttccactgtatctccatcaaagcgaaggatcagaggctactccgttaggaggagaggaaaggaattgtgagccttgtgttggagaagtcgaagactgagagtatatggtggctccattggtgtccatgttaatggctggcgtgttctagagcaactcggggttgtcgtagagcttagggagacttgccaaccttagggagacttgccaaccttgtcatcgcgtaccatgccaacagaatgcttagcttttacgcaccagcgcgtgacgccatgtgggagcaaagttgggaaaatggatattggcggtggtcgagaggtcactcttattggaagtctagaaatgccaaaggatgacatatggcttgtcacagctatcctatctggtctgattgaataatgtgcgaagatataagtcatatatttcttggcctcctatcttcgcctcaggcagctgggagtggttttatactcgctgatgacatcaagtcttaggtgcttccattgatcaataactcagggaaatatggagggatcatgatgtggttcaagtactatgatgatcaagatggctacaattcttgagtgaagagtgatgtttaggttgttgcctgtggtgtgtcacaatatctgtgtgttacttgtgtgtatgtgagaaattatgtgactctggagtctggatagtgcaataagtattactcaagtatatgattgaatcttctgtcatactattcaaattatgtcatattgtatcttttaaggtatgtaaacatccacttttagcgatgctaacaaaagaatagaacaacaattagtgttttc

SEQ ID NO: 6746 - DNA, 1194 bp, Zea Mays
agaggcgatgttgaagctgccgatcccgggaataaagctgctgcggaaccggtgggagatgtagctgctgcggaacacgaaagttttaatcaaggaaatggtccaagggtgcatcactggaataagctcgagaccacaagtgtcatatctcctctaatctttactctctcaggttccagttgaatatgttcattgctacaatgaagccgttttgttgtttgctgtccgccgccgtattcggggtcttcgcctgcctctatgggctcagggcggacaggggcctacaagatctcctcgggccaaggaatcgttcccctccggcgacctccctcctccctttcgtctcaggccttccactgtatctccatcaaagcgaaggatcagaggctactccgttaggaggagaggaaaggaattgtgagccttgtgttggagaagtcgaagactgagagtatatggtggctccattggtgtccatgttaatggctggcgtgttctagagcaactcggggttgtcgtagagcttagggagacttgccaaccttagggagacttgccaaccttgtcatcgcgtaccatgccaacagaatgcttagcttttacgcaccagcgcgtgacgccatgtgggagcaaagttgggaaaatggatattggcggtggtcgagaggtcactcttattggaagtctagaaatgccaaaggatgacatatggcttgtcacagctatcctatctggtctgattgaataatgtgcgaagatataagtcattggctatcaatttttgtgaatcagatatttcttggcctcctatcttcgcctcaggcagctgggagtggttttatactcgctgatgacatcaagtcttaggtgcttccattgatcaataactcagggaaatatggagggatcatgatgtggttcaagtactatgatgatcaagatggctacaattcttgagtgaagagtgatgtttaggttgttgcctgtggtgtgtcacaatatctgtgtgttacttgtgtgtatgtgagaaattatgtgactctggagtctggatagtgcaataagtattactcaagtatatgattgaatcttctgtcatactattcaaattatgtcatattgtatcttttaaggtatgtaaacatccacttttagcgatgctaacaaaagaatagaacaacaattagtgttttc

SEQ ID NO: 6747 - DNA, 1890 bp, Zea Mays
tgatcattgtggtttatggttcacattggaatttatgtgttgttcgtgcttgatgaattttctccaaaggaacaagggagacaatgagaggcgatgttgaagctatcgatcccgggaataaagctgctgcggaaccggtgggagatgtagctgcgctatcgtcaaggctggctaggaggctactacatggatcatggtgccctcctcggtgccaggggatatgcttggatcagagtaggggtaggtgagggtgaggattgtccatttatcgcctacaatttcttcaataccattgatatttaagtcatctcatcgagcttctttatatattattccgcaacttaatctattttcttgtcccaaaaatcatcaccacatctagttaccttatgttgttttgatttgttggtcgctgctccttggagaacattcatgctatggacacaaactcaggtggacgtggtgttcgacaattcaaaacatacctattacatatattggaaaaggaaaccccaggcgtttcaaagttagagtttcacagcttgcagcgaatttgggttctttttaatttgttgctttagtattgaattaacgtatgatcattgtggtttatggttcgcattggaatttatgtgttgttcgtgcttgatgaattttctccaaaagaacaagggagacaataagaggcgatgttgaagctgccgatcccgggaataaagctgctgcggaaccggtgggagatgtagctgctgcggaacacgaaagttttgcattatttaagttttaatcaaggaaatggtccaagggtgcatcactggaataagctcgagaccacaagtgtcatatctcctctaatctttactctctcaggtatatgcatgcttggcattgtcttaatttatttatcacttctaaactaagaatacgttaagctcttcatattttgttgtttatcctaatttgtctccattcggcttcatagtctggtgtctatcagaagctactcctttctacttaaaaggtttcagccatggctgtgctgaatttgcaatggtaggttccagttgaatatgttcattgctacaatgaagccgttttgttgtttgctgtccgccgccgtattcggggtcttcgcctgcctctatgggctcagggcggacaggggcctacaagatctcctcgggccaaggaatcgttcccctccggcgacctccctcctccctttcgtctcaggccttccactgtatctccatcaaagcgaaggatcagaggctactccgttaggaggagaggtaccatgccaacagaatgcttagcttttacgcaccagcgcgtgacgccatgtgggagcaaagttgggaaaatggatattggcggtggtcgagaggtcactcttattggaagtctagaaatgccaaaggatgacatatggcttgtcacagctatcctatctggtctgattgaataatgtgcgaagatataagtcatatatttcttggcctcctatcttcgcctcaggcagctgggagtggttttatactcgctgatgacatcaagtcttaggtgcttccattgatcaataactcagggaaatatggagggatcatgatgtggttcaagtactatgatgatcaagatggctacaattcttgagtgaagagtgatgtttaggttgttgcctgtggtgtgtcacaatatctgtgtgttacttgtgtgtatgtgagaaattatgtgactctggagtctggatagtgcaataagtattactcaagtatatgattgaatcttctgtcatactattcaaattatgtcatattgtatcttttaaggtatgtaaacatccacttttagcgatgctaacaaaagaatagaacaacaattagtgttttc

SEQ ID NO: 6748 - DNA, 1766 bp, Zea Mays
tgatcattgtggtttatggttcacattggaatttatgtgttgttcgtgcttgatgaattttctccaaaggaacaagggagacaatgagaggcgatgttgaagctatcgatcccgggaataaagctgctgcggaaccggtgggagatgtagctgcgctatcgtcaaggctggctaggaggctactacatggatcatggtgccctcctcggtgccaggggatatgcttggatcagagtaggggtaggtggacgtggtgttcgacaattcaaaacatacctattacatatattggaaaaggaaaccccaggcgtttcaaagttagagtttcacagcttgcagcgaatttgggttctttttaatttgttgctttagtattgaattaacgtatgatcattgtggtttatggttcgcattggaatttatgtgttgttcgtgcttgatgaattttctccaaaagaacaagggagacaataagaggtgtgtaatatgaactctacctaatgccttgttgctctacaaaatgtcccatatgtattcttctgtactctaatcttgtttgttgttgttggtcatccttatactttcccccactattgcaaggcgatgttgaagctgccgatcccgggaataaagctgctgcggaaccggtgggagatgtagctgctgcggaacacgaaagttttaatcaaggaaatggtccaagggtgcatcactggaataagctcgagaccacaagtgtcatatctcctctaatctttactctctcaggttccagttgaatatgttcattgctacaatgaagccgttttgttgtttgctgtccgccgccgtattcggggtcttcgcctgcctctatgggctcagggcggacaggggcctacaagatctcctcgggccaaggaatcgttcccctccggcgacctccctcctccctttcgtctcaggccttccactgtatctccatcaaagcgaaggatcagaggctactccgttaggaggagaggaaaggaattgtgagccttgtgttggagaagtcgaagactgagagtatatggtggctccattggtgtccatgttaatggctggcgtgttctagagcaactcggggttgtcgtagagcttagggagacttgccaaccttagggagacttgccaaccttgtcatcgcgtaccatgccaacagaatgcttagcttttacgcaccagcgcgtgacgccatgtgggagcaaagttgggaaaatggatattggcggtggtcgagaggtcactcttattggaagtctagaaatgccaaaggatgacatatggcttgtcacagctatcctatctggtctgattgaataatgtgcgaagatataagtcatatatttcttggcctcctatcttcgcctcaggcagctgggagtggttttatactcgctgatgacatcaagtcttaggtgcttccattgatcaataactcagggaaatatggagggatcatgatgtggttcaagtactatgatgatcaagatggctacaattcttgagtgaagagtgatgtttaggttgttgcctgtggtgtgtcacaatatctgtgtgttacttgtgtgtatgtgagaaattatgtgactctggagtctggatagtgcaataagtattactcaagtatatgattgaatcttctgtcatactattcaaattatgtcatattgtatcttttaaggtatgtaaacatccacttttagcgatgctaacaaaagaatagaacaacaattagtgttttc

SEQ ID NO: 6749 - DNA, 1762 bp, Zea Mays
tgatcattgtggtttatggttcacattggaatttatgtgttgttcgtgcttgatgaattttctccaaaggaacaagggagacaatgagaggcgatgttgaagctatcgatcccgggaataaagctgctgcggaaccggtgggagatgtagctgcgctatcgtcaaggctggctaggaggctactacatggatcatggtgccctcctcggtgccaggggatatgcttggatcagagtaggggtggacgtggtgttcgacaattcaaaacatacctattacatatattggaaaaggaaaccccaggcgtttcaaagttagagtttcacagcttgcagcgaatttgggttctttttaatttgttgctttagtattgaattaacgtatgatcattgtggtttatggttcgcattggaatttatgtgttgttcgtgcttgatgaattttctccaaaagaacaagggagacaataagaggtgtgtaatatgaactctacctaatgccttgttgctctacaaaatgtcccatatgtattcttctgtactctaatcttgtttgttgttgttggtcatccttatactttcccccactattgcaaggcgatgttgaagctgccgatcccgggaataaagctgctgcggaaccggtgggagatgtagctgctgcggaacacgaaagttttaatcaaggaaatggtccaagggtgcatcactggaataagctcgagaccacaagtgtcatatctcctctaatctttactctctcaggttccagttgaatatgttcattgctacaatgaagccgttttgttgtttgctgtccgccgccgtattcggggtcttcgcctgcctctatgggctcagggcggacaggggcctacaagatctcctcgggccaaggaatcgttcccctccggcgacctccctcctccctttcgtctcaggccttccactgtatctccatcaaagcgaaggatcagaggctactccgttaggaggagaggaaaggaattgtgagccttgtgttggagaagtcgaagactgagagtatatggtggctccattggtgtccatgttaatggctggcgtgttctagagcaactcggggttgtcgtagagcttagggagacttgccaaccttagggagacttgccaaccttgtcatcgcgtaccatgccaacagaatgcttagcttttacgcaccagcgcgtgacgccatgtgggagcaaagttgggaaaatggatattggcggtggtcgagaggtcactcttattggaagtctagaaatgccaaaggatgacatatggcttgtcacagctatcctatctggtctgattgaataatgtgcgaagatataagtcatatatttcttggcctcctatcttcgcctcaggcagctgggagtggttttatactcgctgatgacatcaagtcttaggtgcttccattgatcaataactcagggaaatatggagggatcatgatgtggttcaagtactatgatgatcaagatggctacaattcttgagtgaagagtgatgtttaggttgttgcctgtggtgtgtcacaatatctgtgtgttacttgtgtgtatgtgagaaattatgtgactctggagtctggatagtgcaataagtattactcaagtatatgattgaatcttctgtcatactattcaaattatgtcatattgtatcttttaaggtatgtaaacatccacttttagcgatgctaacaaaagaatagaacaacaattagtgttttc

SEQ ID NO: 6750 - DNA, 1660 bp, Zea Mays
tgatcattgtggtttatggttcacattggaatttatgtgttgttcgtgcttgatgaattttctccaaaggaacaagggagacaatgagaggcgatgttgaagctatcgatcccgggaataaagctgctgcggaaccggtgggagatgtagctgcgctatcgtcaaggctggctaggaggctactacatggatcatggtgccctcctcggtgccaggggatatgcttggatcagagtaggggtagaacattcatgctatggacacaaactcaggtggacgtggtgttcgacaattcaaaacatacctattacatatattggaaaaggaaaccccaggcgtttcaaagttagagtttcacagcttgcagcgaatttgggttctttttaatttgttgctttagtattgaattaacgtatgatcattgtggtttatggttcgcattggaatttatgtgttgttcgtgcttgatgaattttctccaaaagaacaagggagacaataagaggcgatgttgaagctgccgatcccgggaataaagctgctgcggaaccggtgggagatgtagctgctgcggaacacgaaaggaaatggtccaagggtgcatcactggaataagctcgagaccacaagtgtcatatctcctctaatctttactctctcaggttccagttgaatatgttcattgctacaatgaagccgttttgttgtttgctgtccgccgccgtattcggggtcttcgcctgcctctatgggctcagggcggacaggggcctacaagatctcctcgggccaaggaatcgttcccctccggcgacctccctcctccctttcgtctcaggccttccactgtatctccatcaaagcgaaggatcagaggctactccgttaggaggagaggaaaggaattgtgagccttgtgttggagaagtcgaagactgagagtatatggtggctccattggtgtccatgttaatggctggcgtgttctagagcaactcggggttgtcgtagagcttagggagacttgccaaccttagggagacttgccaaccttgtcatcgcgtaccatgccaacagaatgcttagcttttacgcaccagcgcgtgacgccatgtgggagcaaagttgggaaaatggatattggcggtggtcgagaggtcactcttattggaagtctagaaatgccaaaggatgacatatggcttgtcacagctatcctatctggtctgattgaataatgtgcgaagatataagtcatatatttcttggcctcctatcttcgcctcaggcagctgggagtggttttatactcgctgatgacatcaagtcttaggtgcttccattgatcaataactcagggaaatatggagggatcatgatgtggttcaagtactatgatgatcaagatggctacaattcttgagtgaagagtgatgtttaggttgttgcctgtggtgtgtcacaatatctgtgtgttacttgtgtgtatgtgagaaattatgtgactctggagtctggatagtgcaataagtattactcaagtatatgattgaatcttctgtcatactattcaaattatgtcatattgtatcttttaaggtatgtaaacatccacttttagcgatgctaacaaaagaatagaacaacaattagtgttttc

SEQ ID NO: 6751 - DNA, 1647 bp, Zea Mays
tgatcattgtggtttatggttcacattggaatttatgtgttgttcgtgcttgatgaattttctccaaaggaacaagggagacaatgagaggcgatgttgaagctatcgatcccgggaataaagctgctgcggaaccggtgggagatgtagctgcgctatcgtcaaggctggctaggaggctactacatggatcatggtgccctcctcggtgccaggggatatgcttggatcagagtaggggtagaacattcatgctatggacacaaactcaggtggacgtggtgttcgacaattcaaaacatacctattacatatattggaaaaggaaaccccaggcgtttcaaagttagagtttcacagcttgcagcgaatttgggttctttttaatttgttgctttagtattgaattaacgtatgatcattgtggtttatggttcgcattggaatttatgtgttgttcgtgcttgatgaattttctccaaaagaacaagggagacaataagaggcgatgttgaagctgccgatcccgggaataaagctgctgcggaaccggtgggagatgtagctgctgcggaacacgaaagggtgcatcactggaataagctcgagaccacaagtgtcatatctcctctaatctttactctctcaggttccagttgaatatgttcattgctacaatgaagccgttttgttgtttgctgtccgccgccgtattcggggtcttcgcctgcctctatgggctcagggcggacaggggcctacaagatctcctcgggccaaggaatcgttcccctccggcgacctccctcctccctttcgtctcaggccttccactgtatctccatcaaagcgaaggatcagaggctactccgttaggaggagaggaaaggaattgtgagccttgtgttggagaagtcgaagactgagagtatatggtggctccattggtgtccatgttaatggctggcgtgttctagagcaactcggggttgtcgtagagcttagggagacttgccaaccttagggagacttgccaaccttgtcatcgcgtaccatgccaacagaatgcttagcttttacgcaccagcgcgtgacgccatgtgggagcaaagttgggaaaatggatattggcggtggtcgagaggtcactcttattggaagtctagaaatgccaaaggatgacatatggcttgtcacagctatcctatctggtctgattgaataatgtgcgaagatataagtcatatatttcttggcctcctatcttcgcctcaggcagctgggagtggttttatactcgctgatgacatcaagtcttaggtgcttccattgatcaataactcagggaaatatggagggatcatgatgtggttcaagtactatgatgatcaagatggctacaattcttgagtgaagagtgatgtttaggttgttgcctgtggtgtgtcacaatatctgtgtgttacttgtgtgtatgtgagaaattatgtgactctggagtctggatagtgcaataagtattactcaagtatatgattgaatcttctgtcatactattcaaattatgtcatattgtatcttttaaggtatgtaaacatccacttttagcgatgctaacaaaagaatagaacaacaattagtgttttc

SEQ ID NO: 6752 - DNA, 2029 bp, Zea Mays
tgatcattgtggtttatggttcacattggaatttatgtgttgttcgtgcttgatgaattttctccaaaggaacaagggagacaatgagaggcgatgttgaagctatcgatcccgggaataaagctgctgcggaaccggtgggagatgtagctgcgctatcgtcaaggctggctaggaggctactacatggatcatggtgccctcctcggtgccaggggatatgcttggatcagagtaggggtaggtgagggtgaggattgtccatttatcgcctacaatttcttcaataccattgatatttaagtcatctcatcgagcttctttatatattattccgcaacttaatctattttcttgtcccaaaaatcatcaccacatctagttaccttatgttgttttgatttgttggtcgctgctccttggagaacattcatgctatggacacaaactcaggtggacgtggtgttcgacaattcaaaacatacctattacatatattggaaaaggcgtttcaaagttagagtttcacagcttgcagcgaatttgggttctttttaatttgttgctttagtattgaattaacgtatgatcattgtggtttatggttcgcattggaatttatgtgttgttcgtgcttgatgaattttctccaaaagaacaagggagacaataagaggcgatgttgaagctgccgatcccgggaataaagctgctgcggaaccggtgggagatgtagctgctgcggaacacgaaagttttaatcaaggaaatggtccaagggtgcatcactggaataagctcgagaccacaagtgtcatatctcctctaatctttactctctcaggtatatgcatgcttggcattgtcttaatttatttatcacttctaaactaagaatacgttaagctcttcatattttgttgtttatcctaatttgtctccattcggcttcatagtctggtgtctatcagaagctactcctttctacttaaaaggtttcagccatggctgtgctgaatttgcaatggtaggttccagttgaatatgttcattgctacaatgaagccgttttgttgtttgctgtccgccgccgtattcggggtcttcgcctgcctctatgggctcagggcggacaggggcctacaagatctcctcgggccaaggaatcgttcccctccggcgacctccctcctccctttcgtctcaggccttccactgtatctccatcaaagcgaaggatcagaggctactccgttaggaggagaggaaaggaattgtgagccttgtgttggagaagtcgaagactgagagtatatggtggctccattggtgtccatgttaatggctggcgtgttctagagcaactcggggttgtcgtagagcttagggagacttgccaaccttagggagacttgccaaccttgtcatcgcgtaccatgccaacagaatgcttagcttttacgcaccagcgcgtgacgccatgtgggagcaaagttgggaaaatggatattggcggtggtcgagaggtcactcttattggaagtctagaaatgccaaaggatgacatatggcttgtcacagctatcctatctggtctgattgaataatgtgcgaagatataagtcatatatttcttggcctcctatcttcgcctcaggcagctgggagtggttttatactcgctgatgacatcaagtcttaggtgcttccattgatcaataactcagggaaatatggagggatcatgatgtggttcaagtactatgatgatcaagatggctacaattcttgagtgaagagtgatgtttaggttgttgcctgtggtgtgtcacaatatctgtgtgttacttgtgtgtatgtgagaaattatgtgactctggagtctggatagtgcaataagtattactcaagtatatgattgaatcttctgtcatactattcaaattatgtcatattgtatcttttaaggtatgtaaacatccacttttagcgatgctaacaaaagaatagaacaacaattagtgttttc

SEQ ID NO: 6753 - DNA, 1735 bp, Zea Mays
tgatcattgtggtttatggttcacattggaatttatgtgttgttcgtgcttgatgaattttctccaaaggaacaagggagacaatgagaggcgatgttgaagctatcgatcccgggaataaagctgctgcggaaccggtgggagatgtagctgcgctatcgtcaaggctggctaggaggctactacatggatcatggtgccctcctcggtgccaggggatatgcttggatcagagtaggggtagaacattcatgctatggacacaaactcaggtggacgtggtgttcgacaattcaaaacatacctattacatatattggaaaaggaaaccccaggcgtttcaaagttagagtttcacagcttgcagcgaatttgggttctttttaatttgttgctttagtattgaattaacgtatgatcattgtggtttatggttcgcattggaatttatgtgttgttcgtgcttgatgaattttctccaaaagaacaagggagacaataagaggcgatgttgaagctgccgatcccgggaataaagctgctgcggaaccggtgggagatgtagctgctgcggaacacgaaaggaaatggtccaagggtgcatcactggaataagctcgagaccacaagtgtcatatctcctctaatctttactctctcagtctggtgtctatcagaagctactcctttctacttaaaaggtttcagccatggctgtgctgaatttgcaatggtaggttccagttgaatatgttcattgctacaatgaagccgttttgttgtttgctgtccgccgccgtattcggggtcttcgcctgcctctatgggctcagggcggacaggggcctacaagatctcctcgggccaaggaatcgttcccctccggcgacctccctcctccctttcgtctcaggccttccactgtatctccatcaaagcgaaggatcagaggctactccgttaggaggagaggaaaggaattgtgagccttgtgttggagaagtcgaagactgagagtatatggtggctccattggtgtccatgttaatggctggcgtgttctagagcaactcggggttgtcgtagagcttagggagacttgccaaccttagggagacttgccaaccttgtcatcgcgtaccatgccaacagaatgcttagcttttacgcaccagcgcgtgacgccatgtgggagcaaagttgggaaaatggatattggcggtggtcgagaggtcactcttattggaagtctagaaatgccaaaggatgacatatggcttgtcacagctatcctatctggtctgattgaataatgtgcgaagatataagtcatatatttcttggcctcctatcttcgcctcaggcagctgggagtggttttatactcgctgatgacatcaagtcttaggtgcttccattgatcaataactcagggaaatatggagggatcatgatgtggttcaagtactatgatgatcaagatggctacaattcttgagtgaagagtgatgtttaggttgttgcctgtggtgtgtcacaatatctgtgtgttacttgtgtgtatgtgagaaattatgtgactctggagtctggatagtgcaataagtattactcaagtatatgattgaatcttctgtcatactattcaaattatgtcatattgtatcttttaaggtatgtaaacatccacttttagcgatgctaacaaaagaatagaacaacaattagtgttttc

SEQ ID NO: 6754 - DNA, 2010 bp, Zea Mays
tgatcattgtggtttatggttcacattggaatttatgtgttgttcgtgcttgatgaattttctccaaaggaacaagggagacaatgagaggcgatgttgaagctatcgatcccgggaataaagctgctgcggaaccggtgggagatgtagctgcgctatcgtcaaggctggctaggaggctactacatggatcatggtgccctcctcggtgccaggggatatgcttggatcagagtaggggtaggtgagggtgaggattgtccatttatcgcctacaatttcttcaataccattgatatttaagtcatctcatcgagcttctttatatattattccgcaacttaatctattttcttgtcccaaaaatcatcaccacatctagttaccttatgttgttttgatttgttggtcgctgctccttggagaacattcatgctatggacacaaactcaggtggacgtggtgttcgacaattcaaaacatacctattacatatattggaaaaggaaaccccaggcgtttcaaagttagagtttcacagcttgcagcgaatttgggttctttttaatttgttgctttagtattgaattaacgtatgatcattgtggtttatggttcgcattggaatttatgtgttgttcgtgcttgatgaattttctccaaaagaacaagggagacaataagaggtgtgtaatatgaactctacctaatgccttgttgctctacaaaatgtcccatatgtattcttctgtactctaatcttgtttgttgttgttggtcatccttatactttcccccactattgcaaggcgatgttgaagctgccgatcccgggaataaagctgctgcggaaccggtgggagatgtagctgctgcggaacacgaaaggtattatgccaatctgtttttgcttttcctaatatatatgaacatggatgaatcacaagcaacttcctaatatatatgaacgcaaatgaagttttgcattatttaagttttaatcaaggaaatggtccaagggtgcatcactggaataagctcgagaccacaagtgtcatatctcctctaatctttactctctcagggcggacaggggcctacaagatctcctcgggccaaggaatcgttcccctccggcgacctccctcctccctttcgtctcaggccttccactgtatctccatcaaagcgaaggatcagaggctactccgttaggaggagaggaaaggaattgtgagccttgtgttggagaagtcgaagactgagagtatatggtggctccattggtgtccatgttaatggctggcgtgttctagagcaactcggggttgtcgtagagcttagggagacttgccaaccttagggagacttgccaaccttgtcatcgcgtaccatgccaacagaatgcttagcttttacgcaccagcgcgtgacgccatgtgggagcaaagttgggaaaatggatattggcggtggtcgagaggtcactcttattggaagtctagaaatgccaaaggatgacatatggcttgtcacagctatcctatctggtctgattgaataatgtgcgaagatataagtcattggctatcaatttttgtgaatcagatatttcttggcctcctatcttcgcctcaggcagctgggagtggttttatactcgctgatgacatcaagtcttaggtgcttccattgatcaataactcagggaaatatggagggatcatgatgtggttcaagtactatgatgatcaagatggctacaattcttgagtgaagagtgatgtttaggttgttgcctgtggtgtgtcacaatatctgtgtgttacttgtgtgtatgtgagaaattatgtgactctggagtctggatagtgcaataagtattactcaagtatatgattgaatcttctgtcatactattcaaattatgtcatattgtatcttttaaggtatgtaaacatccacttttagcgatgctaacaaaagaatagaacaacaattagtgttttc

SEQ ID NO: 6755 - DNA, 1763 bp, Zea Mays
tgatcattgtggtttatggttcacattggaatttatgtgttgttcgtgcttgatgaattttctccaaaggaacaagggagacaatgagaggcgatgttgaagctatcgatcccgggaataaagctgctgcggaaccggtgggagatgtagctgcgctatcgtcaaggctggctaggaggctactacatggatcatggtgccctcctcggtgccaggggatatgcttggatcagagtaggggtaggtgagggtgaggattgtccatttatcgcctacaatttcttcaataccattgatatttaagtcatctcatcgagcttctttatatattattccgcaacttaatctattttcttgtcccaaaaatcatcaccacatctagttaccttatgttgttttgatttgttggtcgctgctccttggagaacattcatgctatggacacaaactcaggtggacgtggtgttcgacaattcaaaacatacctattacatatattggaaaaggaaaccccaggcgtttcaaagttagagtttcacagcttgcagcgaatttgggttctttttaatttgttgctttagtattgaattaacgtatgatcattgtggtttatggttcgcattggaatttatgtgttgttcgtgcttgatgaattttctccaaaagaacaagggagacaataagaggcgatgttgaagctgccgatcccgggaataaagctgctgcggaaccggtgggagatgtagctgctgcggaacacgaaaggttccagttgaatatgttcattgctacaatgaagccgttttgttgtttgctgtccgccgccgtattcggggtcttcgcctgcctctatgggctcagggcggacaggggcctacaagatctcctcgggccaaggaatcgttcccctccggcgacctccctcctccctttcgtctcaggccttccactgtatctccatcaaagcgaaggatcagaggctactccgttaggaggagaggaaaggaattgtgagccttgtgttggagaagtcgaagactgagagtatatggtggctccattggtgtccatgttaatggctggcgtgttctagagcaactcggggttgtcgtagagcttagggagacttgccaaccttagggagacttgccaaccttgtcatcgcgtaccatgccaacagaatgcttagcttttacgcaccagcgcgtgacgccatgtgggagcaaagttgggaaaatggatattggcggtggtcgagaggtcactcttattggaagtctagaaatgccaaaggatgacatatggcttgtcacagctatcctatctggtctgattgaataatgtgcgaagatataagtcatatatttcttggcctcctatcttcgcctcaggcagctgggagtggttttatactcgctgatgacatcaagtcttaggtgcttccattgatcaataactcagggaaatatggagggatcatgatgtggttcaagtactatgatgatcaagatggctacaattcttgagtgaagagtgatgtttaggttgttgcctgtggtgtgtcacaatatctgtgtgttacttgtgtgtatgtgagaaattatgtgactctggagtctggatagtgcaataagtattactcaagtatatgattgaatcttctgtcatactattcaaattatgtcatattgtatcttttaaggtatgtaaacatccacttttagcgatgctaacaaaagaatagaacaacaattagtgttttc

SEQ ID NO: 6756 - DNA, 1695 bp, Zea Mays
cagacatttcaaagttagagtttcacagcttgcagtgaatttgggttctttttaatttgttgctttagtattgaattaacgtatgatcattgtggtttatggttcacattggaatttatgtgttgttcgtgcttgatgaattttctccaaaggaacaagggagacaatgagagtttcacagcttgcagcgaatttgggttctttttaatttgttgctttagtattgaattaacgtatgatcattgtggtttatggttcgcattggaatttatgtgttgttcgtgcttgatgaattttctccaaaagaacaagggagacaataagaggcgatgttgaagctgccgatcccgggaataaagctgctgcggaaccggtgggagatgtagctgctgcggaacacgaaagttttgcattatttaagttttaatcaaggaaatggtccaagggtgcatcactggaataagctcgagaccacaagtgtcatatctcctctaatctttactctctcaggtatatgcatgcttggcattgtcttaatttatttatcacttctaaactaagaatacgttaagctcttcatattttgttgtttatcctaatttgtctccattcggcttcatagtctggtgtctatcagaagctactcctttctacttaaaaggtttcagccatggctgtgctgaatttgcaatggtaggttccagttgaatatgttcattgctacaatgaagccgttttgttgtttgctgtccgccgccgtattcggggtcttcgcctgcctctatgggctcagggcggacaggggcctacaagatctcctcgggccaaggaatcgttcccctccggcgacctccctcctccctttcgtctcaggccttccactgtatctccatcaaagcgaaggatcagaggctactccgttaggaggagaggaaaggaattgtgagccttgtgttggagaagtcgaagactgagagtatatggtggctccattggtgtccatgttaatggctggcgtgttctagagcaactcggggttgtcgtagagcttagggagacttgccaaccttagggagacttgccaaccttgtcatcgcgtaccatgccaacagaatgcttagcttttacgcaccagcgcgtgacgccatgtgggagcaaagttgggaaaatggatattggcggtggtcgagaggtcactcttattggaagtctagaaatgccaaaggatgacatatggcttgtcacagctatcctatctggtctgattgaataatgtgcgaagatataagtcatatatttcttggcctcctatcttcgcctcaggcagctgggagtggttttatactcgctgatgacatcaagtcttaggtgcttccattgatcaataactcagggaaatatggagggatcatgatgtggttcaagtactatgatgatcaagatggctacaattcttgagtgaagagtgatgtttaggttgttgcctgtggtgtgtcacaatatctgtgtgttacttgtgtgtatgtgagaaattatgtgactctggagtctggatagtgcaataagtattactcaagtatatgattgaatcttctgtcatactattcaaattatgtcatattgtatcttttaaggtatgtaaacatccacttttagcgatgctaacaaaagaatagaacaacaattagtgttttc

SEQ ID NO: 6757 - DNA, 1760 bp, Zea Mays
gaaacccagacatttcaaagttagagtttcacagcttgcagtgaatttgggttctttttaatttgttgctttagtattgaattaacgtatgatcattgtggtttatggttcacattggaatttatgtgttgttcgtgcttgatgaattttctccaaaggaacaagggagacaatgagaggcgatgttgaagctatcgatcccgggaataaagctgctgcggaaccggtgggagatgtagctgcgctatcgtcaaggctggctaggaggctactacatggatcatggtgccctcctcggtgccaggggatatgcttggatcagagtaggggtagaacattcatgctatggacacaaactcaggtggacgtggtgttcgacaattcaaaacatacctattacatatattggaaaaggaaaccccaggcgtttcaaagttagagtttcacagcttgcagcgaatttgggttctttttaatttgttgctttagtattgaattaacgtatgatcattgtggtttatggttcgcattggaatttatgtgttgttcgtgcttgatgaattttctccaaaagaacaagggagacaataagaggcgatgttgaagctgccgatcccgggaataaagctgctgcggaaccggtgggagatgtagctgctgcggaacacgaaagttttaatcaaggaaatggtccaagggtgcatcactggaataagctcgagaccacaagtgtcatatctcctctaatctttactctctcaggttccagttgaatatgttcattgctacaatgaagccgttttgttgtttgctgtccgccgccgtattcggggtcttcgcctgcctctatgggctcagggcggacaggggcctacaagatctcctcgggccaaggaatcgttcccctccggcgacctccctcctccctttcgtctcaggccttccactgtatctccatcaaagcgaaggatcagaggctactccgttaggaggagaggaaaggaattgtgagccttgtgttggagaagtcgaagactgagagtatatggtggctccattggtgtccatgttaatggctggcgtgttctagagcaactcggggttgtcgtagagcttagggagacttgccaaccttagggagacttgccaaccttgtcatcgcgtaccatgccaacagaatgcttagcttttacgcaccagcgcgtgacgccatgtgggagcaaagttgggaaaatggatattggcggtggtcgagaggtcactcttattggaagtctagaaatgccaaaggatgacatatggcttgtcacagctatcctatctggtctgattgaataatgtgcgaagatataagtcatatatttcttggcctcctatcttcgcctcaggcagctgggagtggttttatactcgctgatgacatcaagtcttaggtgcttccattgatcaataactcagggaaatatggagggatcatgatgtggttcaagtactatgatgatcaagatggctacaattcttgagtgaagagtgatgtttaggttgttgcctgtggtgtgtcacaatatctgtgtgttacttgtgtgtatgtgagaaattatgtgactctggagtctggatagtgcaataagtattactcaagtatatgattgaatcttctgtcatactattcaaattatgtcatattgtatcttttaaggtatgtaaacatccacttttagcgatgctaacaaaagaatagaacaacaattagtgttttc

SEQ ID NO: 6758 - DNA, 1975 bp, Zea Mays
gaaacccagacatttcaaagttagagtttcacagcttgcagtgaatttgggttctttttaatttgttgctttagtattgaattaacgtatgatcattgtggtttatggttcacattggaatttatgtgttgttcgtgcttgatgaattttctccaaaggaacaagggagacaatgagaggcgatgttgaagctatcgatcccgggaataaagctgctgcggaaccggtgggagatgtagctgcgctatcgtcaaggctggctaggaggctactacatggatcatggtgccctcctcggtgccaggggatatgcttggatcagagtaggggtaggtgagggtgaggattgtccatttatcgcctacaatttcttcaataccattgatatttaagtcatctcatcgagcttctttatatattattccgcaacttaatctattttcttgtcccaaaaatcatcaccacatctagttaccttatgttgttttgatttgttggtcgctgctccttggagaacattcatgctatggacacaaactcaggtggacgtggtgttcgacaattcaaaacatacctattacatatattggaaaaggaaaccccaggcgtttcaaagttagagtttcacagcttgcagcgaatttgggttctttttaatttgttgctttagtattgaattaacgtatgatcattgtggtttatggttcgcattggaatttatgtgttgttcgtgcttgatgaattttctccaaaagaacaagggagacaataagaggcgatgttgaagctgccgatcccgggaataaagctgctgcggaaccggtgggagatgtagctgctgcggaacacgaaaggaaatggtccaagggtgcatcactggaataagctcgagaccacaagtgtcatatctcctctaatctttactctctcagtctggtgtctatcagaagctactcctttctacttaaaaggtttcagccatggctgtgctgaatttgcaatggtaggttccagttgaatatgttcattgctacaatgaagccgttttgttgtttgctgtccgccgccgtattcggggtcttcgcctgcctctatgggctcagggcggacaggggcctacaagatctcctcgggccaaggaatcgttcccctccggcgacctccctcctccctttcgtctcaggccttccactgtatctccatcaaagcgaaggatcagaggctactccgttaggaggagaggaaaggaattgtgagccttgtgttggagaagtcgaagactgagagtatatggtggctccattggtgtccatgttaatggctggcgtgttctagagcaactcggggttgtcgtagagcttagggagacttgccaaccttagggagacttgccaaccttgtcatcgcgtaccatgccaacagaatgcttagcttttacgcaccagcgcgtgacgccatgtgggagcaaagttgggaaaatggatattggcggtggtcgagaggtcactcttattggaagtctagaaatgccaaaggatgacatatggcttgtcacagctatcctatctggtctgattgaataatgtgcgaagatataagtcatgcagctgggagtggttttatactcgctgatgacatcaagtcttaggtgcttccattgatcaataactcagggaaatatggagggatcatgatgtggttcaagtactatgatgatcaagatggctacaattcttgagtgaagagtgatgtttaggttgttgcctgtggtgtgtcacaatatctgtgtgttacttgtgtgtatgtgagaaattatgtgactctggagtctggatagtgcaataagtattactcaagtatatgattgaatcttctgtcatactattcaaattatgtcatattgtatcttttaaggtatgtaaacatccacttttagcgatgctaacaaaagaatagaacaacaattagtgttttc

SEQ ID NO: 6759 - DNA, 2133 bp, Zea Mays
gaaacccagacatttcaaagttagagtttcacagcttgcagtgaatttgggttctttttaatttgttgctttagtattgaattaacgtatgatcattgtggtttatggttcacattggaatttatgtgttgttcgtgcttgatgaattttctccaaaggaacaagggagacaatgagaggcgatgttgaagctatcgatcccgggaataaagctgctgcggaaccggtgggagatgtagctgcgctatcgtcaaggctggctaggaggctactacatggatcatggtgccctcctcggtgccaggggatatgcttggatcagagtaggggtaggtgagggtgaggattgtccatttatcgcctacaatttcttcaataccattgatatttaagtcatctcatcgagcttctttatatattattccgcaacttaatctattttcttgtcccaaaaatcatcaccacatctagttaccttatgttgttttgatttgttggtcgctgctccttggagaacattcatgctatggacacaaactcaggtggacgtggtgttcgacaattcaaaacatacctattacatatattggaaaaggaaaccccaggcgtttcaaagttagagtttcacagcttgcagcgaatttgggttctttttaatttgttgctttagtattgaattaacgtatgatcattgtggtttatggttcgcattggaatttatgtgttgttcgtgcttgatgaattttctccaaaagaacaagggagacaataagaggtgtgtaatatgaactctacctaatgccttgttgctctacaaaatgtcccatatgtattcttctgtactctaatcttgtttgttgttgttggtcatccttatactttcccccactattgcaaggcgatgttgaagctgccgatcccgggaataaagctgctgcggaaccggtgggagatgtagctgctgcggaacacgaaagttttgcattatttaagttttaatcaaggaaatggtccaagggtgcatcactggaataagctcgagaccacaagtgtcatatctcctctaatctttactctctcagccatggctgtgctgaatttgcaatggtaggttccagttgaatatgttcattgctacaatgaagccgttttgttgtttgctgtccgccgccgtattcggggtcttcgcctgcctctatgggctcagggcggacaggggcctacaagatctcctcgggccaaggaatcgttcccctccggcgacctccctcctccctttcgtctcaggccttccactgtatctccatcaaagcgaaggatcagaggctactccgttaggaggagaggaaaggaattgtgagccttgtgttggagaagtcgaagactgagagtatatggtggctccattggtgtccatgttaatggctggcgtgttctagagcaactcggggttgtcgtagagcttagggagacttgccaaccttagggagacttgccaaccttgtcatcgcgtaccatgccaacagaatgcttagcttttacgcaccagcgcgtgacgccatgtgggagcaaagttgggaaaatggatattggcggtggtcgagaggtcactcttattggaagtctagaaatgccaaaggatgacatatggcttgtcacagctatcctatctggtctgattgaataatgtgcgaagatataagtcattggctatcaatttttgtgaatcagatatttcttggcctcctatcttcgcctcaggcagctgggagtggttttatactcgctgatgacatcaagtcttaggtgcttccattgatcaataactcagggaaatatggagggatcatgatgtggttcaagtactatgatgatcaagatggctacaattcttgagtgaagagtgatgtttaggttgttgcctgtggtgtgtcacaatatctgtgtgttacttgtgtgtatgtgagaaattatgtgactctggagtctggatagtgcaataagtattactcaagtatatgattgaatcttctgtcatactattcaaattatgtcatattgtatcttttaaggtatgtaaacatccacttttagcgatgctaacaaaagaatagaacaacaattagtgttttc

SEQ ID NO: 6760 - DNA, 2246 bp, Zea Mays
gaaacccagacatttcaaagttagagtttcacagcttgcagtgaatttgggttctttttaatttgttgctttagtattgaattaacgtatgatcattgtggtttatggttcacattggaatttatgtgttgttcgtgcttgatgaattttctccaaaggaacaagggagacaatgagaggcgatgttgaagctatcgatcccgggaataaagctgctgcggaaccggtgggagatgtagctgcgctatcgtcaaggctggctaggaggctactacatggatcatggtgccctcctcggtgccaggggatatgcttggatcagagtaggggtaggtgagggtgaggattgtccatttatcgcctacaatttcttcaataccattgatatttaagtcatctcatcgagcttctttatatattattccgcaacttaatctattttcttgtcccaaaaatcatcaccacatctagttaccttatgttgttttgatttgttggtcgctgctccttggagaacattcatgctatggacacaaactcaggtggacgtggtgttcgacaattcaaaacatacctattacatatattggaaaaggaaaccccaggcgtttcaaagttagagtttcacagcttgcagcgaatttgggttctttttaatttgttgctttagtattgaattaacgtatgatcattgtggtttatggttcgcattggaatttatgtgttgttcgtgcttgatgaattttctccaaaagaacaagggagacaataagaggtgtgtaatatgaactctacctaatgccttgttgctctacaaaatgtcccatatgtattcttctgtactctaatcttgtttgttgttgttggtcatccttatactttcccccactattgcaaggcgatgttgaagctgccgatcccgggaataaagctgctgcggaaccggtgggagatgtagctgctgcggaacacgaaagttttaatcaaggaaatggtccaagggtgcatcactggaataagctcgagaccacaagtgtcatatctcctctaatctttactctctcaggtatatgcatgcttggcattgtcttaatttatttatcacttctaaactaagaatacgttaagctcttcatattttgttgtttatcctaatttgtctccattcggcttcatagtctggtgtctatcagaagctactcctttctacttaaaaggtttcagccatggctgtgctgaatttgcaatggtaggttccagttgaatatgttcattgctacaatgaagccgttttgttgtttgctgtccgccgccgtattcggggtcttcgcctgcctctatgggctcagggcggacaggggcctacaagatctcctcgggccaaggaatcgttcccctccggcgacctccctcctccctttcgtctcaggccttccactgtatctccatcaaagcgaaggatcagaggctactccgttaggaggagaggaattgtgagccttgtgttggagaagtcgaagactgagagtatatggtggctccattggtgtccatgttaatggctggcgtgttctagagcaactcggggttgtcgtagagcttagggagacttgccaaccttagggagacttgccaaccttgtcatcgcgtaccatgccaacagaatgcttagcttttacgcaccagcgcgtgacgccatgtgggagcaaagttgggaaaatggatattggcggtggtcgagaggtcactcttattggaagtctagaaatgccaaaggatgacatatggcttgtcacagctatcctatctggtctgattgaataatgtgcgaagatataagtcatatatttcttggcctcctatcttcgcctcaggcagctgggagtggttttatactcgctgatgacatcaagtcttaggtgcttccattgatcaataactcagggaaatatggagggatcatgatgtggttcaagtactatgatgatcaagatggctacaattcttgagtgaagagtgatgtttaggttgttgcctgtggtgtgtcacaatatctgtgtgttacttgtgtgtatgtgagaaattatgtgactctggagtctggatagtgcaataagtattactcaagtatatgattgaatcttctgtcatactattcaaattatgtcatattgtatcttttaaggtatgtaaacatccacttttagcgatgctaacaaaagaatagaacaacaattagtgttttc

SEQ ID NO: 6761 - DNA, 2030 bp, Zea Mays
ccattgcatcgaccgcgtcgttcccttactaggaaacccagacatttcaaagttagagtttcacagcttgcagtgaatttgggttctttttaatttgttgctttagtattgaattaacgtatgatcattgtggtttatggttcacattggaatttatgtgttgttcgtgcttgatgaattttctccaaaggaacaagggagacaatgagaggcgatgttgaagctatcgatcccgggaataaagctgctgcggaaccggtgggagatgtagctgcgctatcgtcaaggctggctaggaggctactacatggatcatggtgccctcctcggtgccaggggatatgcttggatcagagtaggggtaggtgagggtgaggattgtccatttatcgcctacaatttcttcaataccattgatatttaagtcatctcatcgagcttctttatatattattccgcaacttaatctattttcttgtcccaaaaatcatcaccacatctagttaccttatgttgttttgatttgttggtcgctgctccttggagaacattcatgctatggacacaaactcaggtggacgtggtgttcgacaattcaaaacatacctattacatatattggaaaaggaaaccccaggcgtttcaaagttagagtttcacagcttgcagcgaatttgggttctttttaatttgttgctttagtattgaattaacgtatgatcattgtggtttatggttcgcattggaatttatgtgttgttcgtgcttgatgaattttctccaaaagaacaagggagacaataagaggtgtgtaatatgaactctacctaatgccttgttgctctacaaaatgtcccatatgtattcttctgtactctaatcttgtttgttgttgttggtcatccttatactttcccccactattgcaaggcgatgttgaagctgccgatcccgggaataaagctgctgcggaaccggtgggagatgtagctgctgcggaacacgaaagttttaatcaaggaaatggtccaagggtgcatcactggaataagctcgagaccacaagtgtcatatctcctctaatctttactctctcagtctggtgtctatcagaagctactcctttctacttaaaaggtttcagccatggctgtgctgaatttgcaatggtaggttccagttgaatatgttcattgctacaatgaagccgttttgttgtttgctgtccgccgccgtattcggggtcttcgcctgcctctatgggctcagggcggacaggggcctacaagatctcctcgggccaaggaatcgttcccctccggcgacctccctcctccctttcgtctcaggccttccactgtatctccatcaaagcgaaggatcagaggctactccgttaggaggagaggtaccatgccaacagaatgcttagcttttacgcaccagcgcgtgacgccatgtgggagcaaagttgggaaaatggatattggcggtggtcgagaggtcactcttattggaagtctagaaatgccaaaggatgacatatggcttgtcacagctatcctatctggtctgattgaataatgtgcgaagatataagtcattggctatcaatttttgtgaatcagatatttcttggcctcctatcttcgcctcaggcagctgggagtggttttatactcgctgatgacatcaagtcttaggtgcttccattgatcaataactcagggaaatatggagggatcatgatgtggttcaagtactatgatgatcaagatggctacaattcttgagtgaagagtgatgtttaggttgttgcctgtggtgtgtcacaatatctgtgtgttacttgtgtgtatgtgagaaattatgtgactctggagtctggatagtgcaataagtattactcaagtatatgattgaatcttctgtcatactattcaaattatgtcatattgtatcttttaaggtatgtaaacatccacttttagcgatgctaacaaaagaatagaacaacaattagtgttttc

SEQ ID NO: 6762 - DNA, 1432 bp, Zea Mays
tctgcggccattgcatcgaccgcgtcgttcccttactaggaacaagggagacaatgagaggcgatgttgaagctgccgatcccgggaataaagctgctgcggaaccggtgggagatgtagctgctgcggaacacgaaaggtattatgccaatctgtttttgcttttcctaatatatatgaacatggatgaatcacaagcaacttcctaatatatatgaacgcaaatgaagttttgcattatttaagttttaatcaaggaaatggtccaagggtgcatcactggaataagctcgagaccacaagtgtcatatctcctctaatctttactctctcagtctggtgtctatcagaagctactcctttctacttaaaaggtttcagccatggctgtgctgaatttgcaatggtaggttccagttgaatatgttcattgctacaatgaagccgttttgttgtttgctgtccgccgccgtattcggggtcttcgcctgcctctatgggctcagggcggacaggggcctacaagatctcctcgggccaaggaatcgttcccctccggcgacctccctcctccctttcgtctcaggccttccactgtatctccatcaaagcgaaggatcagaggctactccgttaggaggagaggaaaggaattgtgagccttgtgttggagaagtcgaagactgagagtatatggtggctccattggtgtccatgttaatggctggcgtgttctagagcaactcggggttgtcgtagagcttagggagacttgccaaccttagggagacttgccaaccttgtcatcgcgtaccatgccaacagaatgcttagcttttacgcaccagcgcgtgacgccatgtgggagcaaagttgggaaaatggatattggcggtggtcgagaggtcactcttattggaagtctagaaatgccaaaggatgacatatggcttgtcacagctatcctatctggtctgattgaataatgtgcgaagatataagtcattggctatcaatttttgtgaatcagatatttcttggcctcctatcttcgcctcaggcagctgggagtggttttatactcgctgatgacatcaagtcttaggtgcttccattgatcaataactcagggaaatatggagggatcatgatgtggttcaagtactatgatgatcaagatggctacaattcttgagtgaagagtgatgtttaggttgttgcctgtggtgtgtcacaatatctgtgtgttacttgtgtgtatgtgagaaattatgtgactctggagtctggatagtgcaataagtattactcaagtatatgattgaatcttctgtcatactattcaaattatgtcatattgtatcttttaaggtatgtaaacatccacttttagcgatgctaacaaaagaatagaacaacaattagtgttttc

SEQ ID NO: 6763 - DNA, 2016 bp, Zea Mays
cgctcgcggtagtgctgcgtctgcggccattgcatcgaccgcgtcgttcccttactaggaaacccagacatttcaaagttagagtttcacagcttgcagtgaatttgggttctttttaatttgttgctttagtattgaattaacgtatgatcattgtggtttatggttcacattggaatttatgtgttgttcgtgcttgatgaattttctccaaaggaacaagggagacaatgagaggcgatgttgaagctatcgatcccgggaataaagctgctgcggaaccggtgggagatgtagctgcgctatcgtcaaggctggctaggaggctactacatggatcatggtgccctcctcggtgccaggggatatgcttggatcagagtaggggtagaacattcatgctatggacacaaactcaggtggacgtggtgttcgacaattcaaaacatacctattacatatattggaaaaggaaaccccaggcgtttcaaagttagagtttcacagcttgcagcgaatttgggttctttttaatttgttgctttagtattgaattaacgtatgatcattgtggtttatggttcgcattggaatttatgtgttgttcgtgcttgatgaattttctccaaaagaacaagggagacaataagaggtgtgtaatatgaactctacctaatgccttgttgctctacaaaatgtcccatatgtattcttctgtactctaatcttgtttgttgttgttggtcatccttatactttcccccactattgcaaggcgatgttgaagctgccgatcccgggaataaagctgctgcggaaccggtgggagatgtagctgctgcggaacacgaaagttttaatcaaggaaatggtccaagggtgcatcactggaataagctcgagaccacaagtgtcatatctcctctaatctttactctctcagtctggtgtctatcagaagctactcctttctacttaaaaggtttcagccatggctgtgctgaatttgcaatggtaggttccagttgaatatgttcattgctacaatgaagccgttttgttgtttgctgtccgccgccgtattcggggtcttcgcctgcctctatgggctcagggcggacaggggcctacaagatctcctcgggccaaggaatcgttcccctccggcgacctccctcctccctttcgtctcaggccttccactgtatctccatcaaagcgaaggatcagaggctactccgttaggaggagaggaaaggaattgtgagccttgtgttggagaagtcgaagactgagagtatatggtggctccattggtgtccatgttaatggctggcgtgttctagagcaactcggggttgtcgtagagcttagggagacttgccaaccttagggagacttgccaaccttgtcatcgcgtaccatgccaacagaatgcttagcttttacgcaccagcgcgtgacgccatgtgggagcaaagttgggaaaatggatattggcggtggtcgagaggtcactcttattggaagtctagaaatgccaaaggatgacatatggcttgtcacagctatcctatctggtctgattgaataatgtgcgaagatataagtcatatatttcttggcctcctatcttcgcctcaggcagctgggagtggttttatactcgctgatgacatcaagtcttaggtgcttccattgatcaataactcagggaaatatggagggatcatgatgtggttcaagtactatgatgatcaagatggctacaattcttgagtgaagagtgatgtttaggttgttgcctgtggtgtgtcacaatatctgtgtgttacttgtgtgtatgtgagaaattatgtgactctggagtctggatagtgcaataagtattactcaagtatatgattgaatcttctgtcatactattcaaattatgtcatattgtatcttttaaggtatgtaaacatccacttttagcgatgctaacaaaagaatagaacaacaattagtgttttc

SEQ ID NO: 6764 - DNA, 1909 bp, Zea Mays
cgctcgcggtagtgctgcgtctgcggccattgcatcgaccgcgtcgttcccttactaggaaacccagacatttcaaagttagagtttcacagcttgcagtgaatttgggttctttttaatttgttgctttagtattgaattaacgtatgatcattgtggtttatggttcacattggaatttatgtgttgttcgtgcttgatgaattttctccaaaggaacaagggagacaatgagaggcgatgttgaagctatcgatcccgggaataaagctgctgcggaaccggtgggagatgtagctgcgctatcgtcaaggctggctaggaggctactacatggatcatggtgccctcctcggtgccaggggatatgcttggatcagagtaggggtagaacattcatgctatggacacaaactcaggtggacgtggtgttcgacaattcaaaacatacctattacatatattggaaaaggaaaccccaggcgtttcaaagttagagtttcacagcttgcagcgaatttgggttctttttaatttgttgctttagtattgaattaacgtatgatcattgtggtttatggttcgcattggaatttatgtgttgttcgtgcttgatgaattttctccaaaagaacaagggagacaataagaggcgatgttgaagctgccgatcccgggaataaagctgctgcggaaccggtgggagatgtagctgctgcggaacacgaaagttttgcattatttaagttttaatcaaggaaatggtccaagggtgcatcactggaataagctcgagaccacaagtgtcatatctcctctaatctttactctctcagtctggtgtctatcagaagctactcctttctacttaaaaggtttcagccatggctgtgctgaatttgcaatggtaggttccagttgaatatgttcattgctacaatgaagccgttttgttgtttgctgtccgccgccgtattcggggtcttcgcctgcctctatgggctcagggcggacaggggcctacaagatctcctcgggccaaggaatcgttcccctccggcgacctccctcctccctttcgtctcaggccttccactgtatctccatcaaagcgaaggatcagaggctactccgttaggaggagaggaaaggaattgtgagccttgtgttggagaagtcgaagactgagagtatatggtggctccattggtgtccatgttaatggctggcgtgttctagagcaactcggggttgtcgtagagcttagggagacttgccaaccttagggagacttgccaaccttgtcatcgcgtaccatgccaacagaatgcttagcttttacgcaccagcgcgtgacgccatgtgggagcaaagttgggaaaatggatattggcggtggtcgagaggtcactcttattggaagtctagaaatgccaaaggatgacatatggcttgtcacagctatcctatctggtctgattgaataatgtgcgaagatataagtcatatatttcttggcctcctatcttcgcctcaggcagctgggagtggttttatactcgctgatgacatcaagtcttaggtgcttccattgatcaataactcagggaaatatggagggatcatgatgtggttcaagtactatgatgatcaagatggctacaattcttgagtgaagagtgatgtttaggttgttgcctgtggtgtgtcacaatatctgtgtgttacttgtgtgtatgtgagaaattatgtgactctggagtctggatagtgcaataagtattactcaagtatatgattgaatcttctgtcatactattcaaattatgtcatattgtatcttttaaggtatgtaaacatccacttttagcgatgctaacaaaagaatagaacaacaattagtgttttc

SEQ ID NO: 6765 - DNA, 2050 bp, Zea Mays
acgcgccacccgctcgcggtagtgctgcgtctgcggccattgcatcgaccgcgtcgttcccttactaggaaacccagacatttcaaagttagagtttcacagcttgcagtgaatttgggttctttttaatttgttgctttagtattgaattaacgtatgatcattgtggtttatggttcacattggaatttatgtgttgttcgtgcttgatgaattttctccaaaggaacaagggagacaatgagaggcgatgttgaagctatcgatcccgggaataaagctgctgcggaaccggtgggagatgtagctgcgctatcgtcaaggctggctaggaggctactacatggatcatggtgccctcctcggtgccaggggatatgcttggatcagagtaggggtaggtgagggtgaggattgtccatttatcgcctacaatttcttcaataccattgatatttaagtcatctcatcgagcttctttatatattattccgcaacttaatctattttcttgtcccaaaaatcatcaccacatctagttaccttatgttgttttgatttgttggtcgctgctccttggagaacattcatgctatggacacaaactcaggtggacgtggtgttcgacaattcaaaacatacctattacatatattggaaaaggaaaccccaggcgtttcaaagttagagtttcacagcttgcagcgaatttgggttctttttaatttgttgctttagtattgaattaacgtatgatcattgtggtttatggttcgcattggaatttatgtgttgttcgtgcttgatgaattttctccaaaagaacaagggagacaataagaggcgatgttgaagctgccgatcccgggaataaagctgctgcggaaccggtgggagatgtagctgctgcggaacacgaaagttttgcattatttaagttttaatcaaggaaatggtccaagggtgcatcactggaataagctcgagaccacaagtgtcatatctcctctaatctttactctctcagggttccagttgaatatgttcattgctacaatgaagccgttttgttgtttgctgtccgccgccgtattcggggtcttcgcctgcctctatgggctcagggcggacaggggcctacaagatctcctcgggccaaggaatcgttcccctccggcgacctccctcctccctttcgtctcaggccttccactgtatctccatcaaagcgaaggatcagaggctactccgttaggaggagaggaaaggaattgtgagccttgtgttggagaagtcgaagactgagagtatatggtggctccattggtgtccatgttaatggctggcgtgttctagagcaactcggggttgtcgtagagcttagggagacttgccaaccttagggagacttgccaaccttgtcatcgcgtaccatgccaacagaatgcttagcttttacgcaccagcgcgtgacgccatgtgggagcaaagttgggaaaatggatattggcggtggtcgagaggtcactcttattggaagtctagaaatgccaaaggatgacatatggcttgtcacagctatcctatctggtctgattgaataatgtgcgaagatataagtcattggctatcaatttttgtgaatcagatatttcttggcctcctatcttcgcctcaggcagctgggagtggttttatactcgctgatgacatcaagtcttaggtgcttccattgatcaataactcagggaaatatggagggatcatgatgtggttcaagtactatgatgatcaagatggctacaattcttgagtgaagagtgatgtttaggttgttgcctgtggtgtgtcacaatatctgtgtgttacttgtgtgtatgtgagaaattatgtgactctggagtctggatagtgcaataagtattactcaagtatatgattgaatcttctgtcatactattcaaattatgtcatattgtatcttttaaggtatgtaaacatccacttttagcgatgctaacaaaagaatagaacaacaattagtgttttc

SEQ ID NO: 6766 - DNA, 2049 bp, Zea Mays
acgcgccacccgctcgcggtagtgctgcgtctgcggccattgcatcgaccgcgtcgttcccttactaggaaacccagacatttcaaagttagagtttcacagcttgcagtgaatttgggttctttttaatttgttgctttagtattgaattaacgtatgatcattgtggtttatggttcacattggaatttatgtgttgttcgtgcttgatgaattttctccaaaggaacaagggagacaatgagaggcgatgttgaagctatcgatcccgggaataaagctgctgcggaaccggtgggagatgtagctgcgctatcgtcaaggctggctaggaggctactacatggatcatggtgccctcctcggtgccaggggatatgcttggatcagagtaggggtaggtgagggtgaggattgtccatttatcgcctacaatttcttcaataccattgatatttaagtcatctcatcgagcttctttatatattattccgcaacttaatctattttcttgtcccaaaaatcatcaccacatctagttaccttatgttgttttgatttgttggtcgctgctccttggagaacattcatgctatggacacaaactcaggtggacgtggtgttcgacaattcaaaacatacctattacatatattggaaaaggaaaccccaggcgtttcaaagttagagtttcacagcttgcagcgaatttgggttctttttaatttgttgctttagtattgaattaacgtatgatcattgtggtttatggttcgcattggaatttatgtgttgttcgtgcttgatgaattttctccaaaagaacaagggagacaataagaggcgatgttgaagctgccgatcccgggaataaagctgctgcggaaccggtgggagatgtagctgctgcggaacacgaaagttttgcattatttaagttttaatcaaggaaatggtccaagggtgcatcactggaataagctcgagaccacaagtgtcatatctcctctaatctttactctctcaggttccagttgaatatgttcattgctacaatgaagccgttttgttgtttgctgtccgccgccgtattcggggtcttcgcctgcctctatgggctcagggcggacaggggcctacaagatctcctcgggccaaggaatcgttcccctccggcgacctccctcctccctttcgtctcaggccttccactgtatctccatcaaagcgaaggatcagaggctactccgttaggaggagaggaaaggaattgtgagccttgtgttggagaagtcgaagactgagagtatatggtggctccattggtgtccatgttaatggctggcgtgttctagagcaactcggggttgtcgtagagcttagggagacttgccaaccttagggagacttgccaaccttgtcatcgcgtaccatgccaacagaatgcttagcttttacgcaccagcgcgtgacgccatgtgggagcaaagttgggaaaatggatattggcggtggtcgagaggtcactcttattggaagtctagaaatgccaaaggatgacatatggcttgtcacagctatcctatctggtctgattgaataatgtgcgaagatataagtcattggctatcaatttttgtgaatcagatatttcttggcctcctatcttcgcctcaggcagctgggagtggttttatactcgctgatgacatcaagtcttaggtgcttccattgatcaataactcagggaaatatggagggatcatgatgtggttcaagtactatgatgatcaagatggctacaattcttgagtgaagagtgatgtttaggttgttgcctgtggtgtgtcacaatatctgtgtgttacttgtgtgtatgtgagaaattatgtgactctggagtctggatagtgcaataagtattactcaagtatatgattgaatcttctgtcatactattcaaattatgtcatattgtatcttttaaggtatgtaaacatccacttttagcgatgctaacaaaagaatagaacaacaattagtgttttc

SEQ ID NO: 6767 - DNA, 2035 bp, Zea Mays
gtacgcgccacccgctcgcggtagtgctgcgtctgcggccattgcatcgaccgcgtcgttcccttactaggaaacccagacatttcaaagttagagtttcacagcttgcagtgaatttgggttctttttaatttgttgctttagtattgaattaacgtatgatcattgtggtttatggttcacattggaatttatgtgttgttcgtgcttgatgaattttctccaaaggaacaagggagacaatgagaggcgatgttgaagctatcgatcccgggaataaagctgctgcggaaccggtgggagatgtagctgcgctatcgtcaaggctggctaggaggctactacatggatcatggtgccctcctcggtgccaggggatatgcttggatcagagtaggggtaggtgagggtgaggattgtccatttatcgcctacaatttcttcaataccattgatatttaagtcatctcatcgagcttctttatatattattccgcaacttaatctattttcttgtcccaaaaatcatcaccacatctagttaccttatgttgttttgatttgttggtcgctgctccttggagaacattcatgctatggacacaaactcaggtggacgtggtgttcgacaattcaaaacatacctattacatatattggaaaaggaaaccccaggcgtttcaaagttagagtttcacagcttgcagcgaatttgggttctttttaatttgttgctttagtattgaattaacgtatgatcattgtggtttatggttcgcattggaatttatgtgttgttcgtgcttgatgaattttctccaaaagaacaagggagacaataagaggcgatgttgaagctgccgatcccgggaataaagctgctgcggaaccggtgggagatgtagctgctgcggaacacgaaagttttaatcaaggaaatggtccaagggtgcatcactggaataagctcgagaccacaagtgtcatatctcctctaatctttactctctcaggttccagttgaatatgttcattgctacaatgaagccgttttgttgtttgctgtccgccgccgtattcggggtcttcgcctgcctctatgggctcagggcggacaggggcctacaagatctcctcgggccaaggaatcgttcccctccggcgacctccctcctccctttcgtctcaggccttccactgtatctccatcaaagcgaaggatcagaggctactccgttaggaggagaggaaaggaattgtgagccttgtgttggagaagtcgaagactgagagtatatggtggctccattggtgtccatgttaatggctggcgtgttctagagcaactcggggttgtcgtagagcttagggagacttgccaaccttagggagacttgccaaccttgtcatcgcgtaccatgccaacagaatgcttagcttttacgcaccagcgcgtgacgccatgtgggagcaaagttgggaaaatggatattggcggtggtcgagaggtcactcttattggaagtctagaaatgccaaaggatgacatatggcttgtcacagctatcctatctggtctgattgaataatgtgcgaagatataagtcattggctatcaatttttgtgaatcagatatttcttggcctcctatcttcgcctcaggcagctgggagtggttttatactcgctgatgacatcaagtcttaggtgcttccattgatcaataactcagggaaatatggagggatcatgatgtggttcaagtactatgatgatcaagatggctacaattcttgagtgaagagtgatgtttaggttgttgcctgtggtgtgtcacaatatctgtgtgttacttgtgtgtatgtgagaaattatgtgactctggagtctggatagtgcaataagtattactcaagtatatgattgaatcttctgtcatactattcaaattatgtcatattgtatcttttaaggtatgtaaacatccacttttagcgatgctaacaaaagaatagaacaacaattagtgttttc

SEQ ID NO: 6768 - DNA, 1698 bp, Zea Mays
ctcgtggtacgcgccacccgctcgcggtagtgctgcgtctgcggccattgcatcgaccgcgtcgttcccttactaggaaacccagacatttcaaagttagagtttcacagcttgcagtgaatttgggttctttttaatttgttgctttagtattgaattaacgtatgatcattgtggtttatggttcacattggaatttatgtgttgttcgtgcttgatgaattttctccaaaggaacaagggagacaatgagaggcgatgttgaagctatcgatcccgggaataaagctgctgcggaaccggtgggagatgtagctgcgctatcgtcaaggctggctaggaggctactacatggatcatggtgccctcctcggtgccaggggatatgcttggatcagagtagggaacattcatgctatggacacaaactcaggtggacgtggtgttcgacaattcaaaacatacctattacatatattggaaaaggaaaccccaggcgtttcaaagttagagtttcacagcttgcagcgaatttggaacaagggagacaataagaggcgatgttgaagctgccgatcccgggaataaagctgctgcggaaccggtgggagatgtagctgctgcggaacacgaaagttttaatcaaggaaatggtccaagggtgcatcactggaataagctcgagaccacaagtgtcatatctcctctaatctttactctctcagtctggtgtctatcagaagctactcctttctacttaaaaggtttcagccatggctgtgctgaatttgcaatgggcggacaggggcctacaagatctcctcgggccaaggaatcgttcccctccggcgacctccctcctccctttcgtctcaggccttccactgtatctccatcaaagcgaaggatcagaggctactccgttaggaggagaggaaaggaattgtgagccttgtgttggagaagtcgaagactgagagtatatggtggctccattggtgtccatgttaatggctggcgtgttctagagcaactcggggttgtcgtagagcttagggagacttgccaaccttagggagacttgccaaccttgtcatcgcgtaccatgccaacagaatgcttagcttttacgcaccagcgcgtgacgccatgtgggagcaaagttgggaaaatggatattggcggtggtcgagaggtcactcttattggaagtctagaaatgccaaaggatgacatatggcttgtcacagctatcctatctggtctgattgaataatgtgcgaagatataagtcatatatttcttggcctcctatcttcgcctcaggcagctgggagtggttttatactcgctgatgacatcaagtcttaggtgcttccattgatcaataactcagggaaatatggagggatcatgatgtggttcaagtactatgatgatcaagatggctacaattcttgagtgaagagtgatgtttaggttgttgcctgtggtgtgtcacaatatctgtgtgttacttgtgtgtatgtgagaaattatgtgactctggagtctggatagtgcaataagtattactcaagtatatgattgaatcttctgtcatactattcaaattatgtcatattgtatcttttaaggtatgtaaacatccacttttagcgatgctaacaaaagaatagaacaacaattagtgttttc

SEQ ID NO: 6769 - DNA, 1984 bp, Zea Mays
ctcgtggtacgcgccacccgctcgcggtagtgctgcgtctgcggccattgcatcgaccgcgtcgttcccttactaggaaacccagacatttcaaagttagagtttcacagcttgcagtgaatttgggttctttttaatttgttgctttagtattgaattaacgtatgatcattgtggtttatggttcacattggaatttatgtgttgttcgtgcttgatgaattttctccaaaggaacaagggagacaatgagaggcgatgttgaagctatcgatcccgggaataaagctgctgcggaaccggtgggagatgtagctgcgctatcgtcaaggctggctaggaggctactacatggatcatggtgccctcctcggtgccaggggatatgcttggatcagagtaggggtaggtgagggtgaggattgtccatttatcgcctacaatttcttcaataccattgatatttaagtcatctcatcgagcttctttatatattattccgcaacttaatctattttcttgtcccaaaaatcatcaccacatctagttaccttatgttgttttgatttgttggtcgctgctccttggagaacattcatgctatggacacaaactcaggtggacgtggtgttcgacaattcaaaacatacctattacatatattggaaaaggaaaccccaggcgtttcaaagttagagtttcacagcttgcagcgaatttgggttctttttaatttgttgctttagtattgaattaacgtatgatcattgtggtttatggttcgcattggaatttatgtgttgttcgtgcttgatgaattttctccaaaagaacaagggagacaataagaggcgatgttgaagctgccgatcccgggaataaagctgctgcggaaccggtgggagatgtagctgctgcggaacacgaaagttttaatcaaggaaatggtccaagggtgcatcactggaataagctcgagaccacaagtgtcatatctcctctaatctttactctctcagtctggtgtctatcagaagctactcctttctacttaaaagggcggacaggggcctacaagatctcctcgggccaaggaatcgttcccctccggcgacctccctcctccctttcgtctcaggccttccactgtatctccatcaaagcgaaggatcagaggctactccgttaggaggagaggaaaggaattgtgagccttgtgttggagaagtcgaagactgagagtatatggtggctccattggtgtccatgttaatggctggcgtgttctagagcaactcggggttgtcgtagagcttagggagacttgccaaccttagggagacttgccaaccttgtcatcgcgtaccatgccaacagaatgcttagcttttacgcaccagcgcgtgacgccatgtgggagcaaagttgggaaaatggatattggcggtggtcgagaggtcactcttattggaagtctagaaatgccaaaggatgacatatggcttgtcacagctatcctatctggtctgattgaataatgtgcgaagatataagtcattggctatcaatttttgtgaatcagatatttcttggcctcctatcttcgcctcaggcagctgggagtggttttatactcgctgatgacatcaagtcttaggtgcttccattgatcaataactcagggaaatatggagggatcatgatgtggttcaagtactatgatgatcaagatggctacaattcttgagtgaagagtgatgtttaggttgttgcctgtggtgtgtcacaatatctgtgtgttacttgtgtgtatgtgagaaattatgtgactctggagtctggatagtgcaataagtattactcaagtatatgattgaatcttctgtcatactattcaaattatgtcatattgtatcttttaaggtatgtaaacatccacttttagcgatgctaacaaaagaatagaacaacaattagtgttttc

SEQ ID NO: 6770 - DNA, 1832 bp, Zea Mays
ctcgtggtacgcgccacccgctcgcggtagtgctgcgtctgcggccattgcatcgaccgcgtcgttcccttactaggaaacccagacatttcaaagttagagtttcacagcttgcagtgaatttgggttctttttaatttgttgctttagtattgaattaacgtatgatcattgtggtttatggttcacattggaatttatgtgttgttcgtgcttgatgaattttctccaaaggaacaagggagacaatgagaggcgatgttgaagctatcgatcccgggaataaagctgctgcggaaccggtgggagatgtagctgcgctatcgtcaaggctggctaggaggctactacatggatcatggtgccctcctcggtgccaggggatatgcttggatcagagtagggaacattcatgctatggacacaaactcaggtggacgtggtgttcgacaattcaaaacatacctattacatatattggaaaaggaaaccccaggcgtttcaaagttagagtttcacagcttgcagcgaatttgggttctttttaatttgttgctttagtattgaattaacgtatgatcattgtggtttatggttcgcattggaatttatgtgttgttcgtgcttgatgaattttctccaaaagaacaagggagacaataagaggcgatgttgaagctgccgatcccgggaataaagctgctgcggaaccggtgggagatgtagctgctgcggaacacgaaagttttaatcaaggaaatggtccaagggtgcatcactggaataagctcgagaccacaagtgtcatatctcctctaatctttactctctcaggttccagttgaatatgttcattgctacaatgaagccgttttgttgtttgctgtccgccgccgtattcggggtcttcgcctgcctctatgggctcagggcggacaggggcctacaagatctcctcgggccaaggaatcgttcccctccggcgacctccctcctccctttcgtctcaggccttccactgtatctccatcaaagcgaaggatcagaggctactccgttaggaggagaggaaaggaattgtgagccttgtgttggagaagtcgaagactgagagtatatggtggctccattggtgtccatgttaatggctggcgtgttctagagcaactcggggttgtcgtagagcttagggagacttgccaaccttagggagacttgccaaccttgtcatcgcgtaccatgccaacagaatgcttagcttttacgcaccagcgcgtgacgccatgtgggagcaaagttgggaaaatggatattggcggtggtcgagaggtcactcttattggaagtctagaaatgccaaaggatgacatatggcttgtcacagctatcctatctggtctgattgaataatgtgcgaagatataagtcatatatttcttggcctcctatcttcgcctcaggcagctgggagtggttttatactcgctgatgacatcaagtcttaggtgcttccattgatcaataactcagggaaatatggagggatcatgatgtggttcaagtactatgatgatcaagatggctacaattcttgagtgaagagtgatgtttaggttgttgcctgtggtgtgtcacaatatctgtgtgttacttgtgtgtatgtgagaaattatgtgactctggagtctggatagtgcaataagtattactcaagtatatgattgaatcttctgtcatactattcaaattatgtcatattgtatcttttaaggtatgtaaacatccacttttagcgatgctaacaaaagaatagaacaacaattagtgttttc

SEQ ID NO: 6771 - DNA, 1390 bp, Zea Mays
gggtaaggggtcccgtgtttctctgacagctgggccccgcgttactcttgcctccaggccttccgggagtttggcgacccgtctcgggctcttgtgggggctagggtttaggcactaagcggcggccggcggcggcggggaggatggcggaggcggtcgtgaggtgcctccgggacggacggctcgacggcgagcacgcgccggcactggctgtggagggatcactcaagtgctgcccgctcgcggcgggtgcgatgctccacatcgcggccgcattcgcctcccaggtcgccgcagggaaggcgcaggccaggggactggtggttgtggcgtttgatcggagcccacaggtgtacctggaattcatgcgccgccgcaaccttgacgcaaatgctttggaccgatgtgttagaatattggattgctactctgacccacttggatggaagcagaagattcaaaatcagcagcatcaagggaacagtgcaaagcagttctcaacaaataaagataatattactgtttatagaagtgtgaaggatgttacaaaattgatgtcctccactactgaacttggaggaggttttgaaggagaaggcaaaacatatttttctgtggctgttgactcaattagctccatgttaaggcatgcttcagtgtcatcaatttcaggccttcttagtaaccttcgaagccatgaacaagtatcatcaatcttttggatgatacattcagacctccatgagcccaaggtaccccgagcatttgaatgtctttctactatggttgcttgtgtggagccagcacttgtggatcctgtttgtggagagagtccgggaaacatgtctatccttgagcaaaattattcaaaagcaaaatttattgttcgccttaaacgacgaaatggacgggtgaagcacctttacgagaacctgtatattgaggggaatgatatcaaatttgattcggctccttctgtaagtatagaagtgaaccaaagtctagtgcctaaggttcagttcaatcttgagctgtcagagaaggagcgtagcgacagggcaaatgttgttcttcctttcgaacatcaaggaaatggccaaccaattcatatatatgatggtcgccggtccctacctgaggctcaacgtgaccccaatttaactgcaccgccccttgtggatgaagtaaaaaatcccaaatctggaactgcaaagggtgaaatacattacttccgtgattcagatgacgagcaacctgactcggatgaagatccagatgatgatttggacatataagagtgtacaccttctggctgacgctctggtacggccgcgtccggttccgcgccacgccgtagccgttgccggtcgctgacaggccttcctccact

SEQ ID NO: 6772 - DNA, 1438 bp, Zea Mays
gggtaaggggtcccgtgtttctctgacagctgggccccgcgttactcttgcctccaggccttccgggagtttggcgacccgtctcgggctcttgtgggggctagggtttaggcactaagcggcggccggcggcggcggggaggatggcggaggcggtcgtgaggtgcctccgggacggacggctcgacggcgagcacgcgccggcactggctgtggagggatcactcaagtgctgcccgctcgcggcgggtgcgatgctccacatcgcggccgcattcgcctcccaggtcgccgcagggaaggcgcaggccaggggactggtggttgtggcgtttgatcggagcccacaggtgtacctggaattcatgcgccgccgcaaccttgacgcaaatgctttggaccgatgtgttagaatattggattgctactctgacccacttggatggaagcagaagattcaaaatcagcagcatcaagggaacagtgcaaagcagttctcaacaaataaagataatattactgtttatagaagtgtgaaggatgttacaaaattgatgtcctccactactgaacttggaggaggttttgaaggagaaggcaaaacatatttttctgtggctgttgactcaattagctccatgttaaggcatgcttcagtgtcatcaatttcaggccttcttagtaaccttcgaagccatgaacaagtatcatcaatcttttggatgatacattcagacctccatgagcccaaggtaccccgagcatttgaatgtctttctactatggttgcttgtgtggagccagcacttgtggatcctgtttgtggagagagtccgggaaacatgtctatccttgagcaaaattattcaaaagcaaaatttattgttcgccttaaacgacgaaatggacgggtgaagcacctttacgagaacctgtatattgaggggaatgatatcaaatttgattcggctccttctgtaagtatagaagtgaaccaaagtctagtgcctaaggttcagttcaatcttgagctgtcagagaaggagcgtagcgacagggcaaatgttgttcttcctttcgaacatcaaggaaatggccaaccaattcatatatatgatggtcgccggtccctacctgaggctcaacgtgaccccaatttaactgcaccgccccttgtggatgaagtaaaaaatcccaaatctggaactgcaaagggtgaaatacattacttccgtgattcagatgacgagcaacctgactcggatgaagatccagatgatgatttggacatataagagtgtaggtgctctttacttcagtaggtggcatgtgcacatgaattttaaggtacaccttctggctgacgctctggtacggccgcgtccggttccgcgccacgccgtagccgttgccggtcgctgacaggccttcctccact

SEQ ID NO: 6773 - DNA, 1376 bp, Zea Mays
gggtaaggggtcccgtgtttctctgacagctgggccccgcgttactcttgcctccaggccttccgggagtttggcgacccgtctcgggctcttgtgggggctagggtttaggcactaagcggcggccggcggcggcggggaggatggcggaggcggtcgtgaggtgcctccgggacggacggctcgacggcgagcacgcgccggcactggctgtggagggatcactcaagtgctgcccgctcgcggcgggtgcgatgctccacatcgcggccgcattcgcctcccaggtcgccgcagggaaggcgcaggccaggggactggtggttgtggcgtttgatcggagcccacaggtgtacctggaattcatgcgccgccgcaaccttgacgcaaatgctttggaccgatgtgttagaatattggattgctactctgacccacttggatggaagcagaagattcaaaatcagcagcatcaagggaacagtgcaaagcagttctcaacaaataaagataatattactgtttatagaagtgtgaaggatgttacaaaattgatgtcctccactactgaacttggaggaggttttgaaggagaaggcaaaacatatttttctgtggctgttgactcaattagctccatgttaaggcatgcttcagtgtcatcaatttcaggccttcttagtaaccttcgaagccatgaacaagtatcatcaatcttttggatgatacattcagacctccatgagcccaaggtaccccgagcatttgaatgtctttctactatggttgcttgtgtggagccagcacttgtggatcctgtttgtggagagagtccgggaaacatgtctatccttgagcaaaattattcaaaagcaaaatttattgttcgccttaaacgacgaaatggacgggtgaagcacctttacgagaacctgtatattgaggggaatgatatcaaatttgattcggctccttctgtaagtatagaagtgaaccaaagtctagtgcctaaggttcagttcaatcttgagctgtcagagaaggagcgtagcgacagggcaaatgttgttcttcctttcgaacatcaaggaaatggccaaccaattcatatatatgatggtcgccggtccctacctgaggctcaacgtgaccccaatttaactgcaccgccccttgtggatgaagtaaaaaatcccaaatctggaactgcaaagggtgaaatacattacttccgtgattcagatgacgagcaacctgactcggatgaagatccagatgatgatttggacatataagagtgtaggtgctctttacttcagtaggtggcatgtgcacatgaattttaaggcacagggatgagatagatatagagctac

SEQ ID NO: 6774 - DNA, 1374 bp, Zea Mays
gggtaaggggtcccgtgtttctctgacagctgggccccgcgttactcttgcctccaggccttccgggagtttggcgacccgtctcgggctcttgtgggggctagggtttaggcactaagcggcggccggcggcggcggggaggatggcggaggcggtcgtgaggtgcctccgggacggacggctcgacggcgagcacgcgccggcactggctgtggagggatcactcaagtgctgcccgctcgcggcgggtgcgatgctccacatcgcggccgcattcgcctcccaggtcgccgcagggaaggcgcaggccaggggactggtggttgtggcgtttgatcggagcccacaggtgtacctggaattcatgcgccgccgcaaccttgacgcaaatgctttggaccgatgtgttagaatattggattgctactctgacccacttggatggaagcagaagattcaaaatcagcagcatcaagggaacagtgcaaagcagttctcaacaaataaagataatattactgtttatagaagtgtgaaggatgttacaaaattgatgtcctccactactgaacttggaggaggttttgaaggagaaggcaaaacatatttttctgtggctgttgactcaattagctccatgttaaggcatgcttcagtgtcatcaatttcaggccttcttagtaaccttcgaagccatgaacaagtatcatcaatcttttggatgatacattcagacctccatgagcccaaggtaccccgagcatttgaatgtctttctactatggttgcttgtgtggagccagcacttgtggatcctgtttgtggagagagtccgggaaacatgtctatccttgagcaaaattattcaaaagcaaaatttattgttcgccttaaacgacgaaatggacgggtgaagcacctttacgagaacctgtatattgaggggaatgatatcaaatttgattcggctccttctgtaagtatagaagtgaaccaaagtctagtgcctaaggttcagttcaatcttgagctgtcagagaaggagcgtagcgacagggcaaatgttgttcttcctttcgaacatcaaggaaatggccaaccaattcatatatatgatggtcgccggtccctacctgaggctcaacgtgaccccaatttaactgcaccgccccttgtggatgaagtaaaaaatcccaaatctggaactgcaaagggtgaaatacattacttccgtgattcagatgacgagcaacctgactcggatgaagatccagatgatgatttggacatataagagtgtaggtgctctttacttcagtaggtggcatgtgcacatgaattttaagcgctattctctccgccatgagttgttc

SEQ ID NO: 6775 - DNA, 1369 bp, Zea Mays
gggtaaggggtcccgtgtttctctgacagctgggccccgcgttactcttgcctccaggccttccgggagtttggcgacccgtctcgggctcttgtgggggctagggtttaggcactaagcggcggccggcggcggcggggaggatggcggaggcggtcgtgaggtgcctccgggacggacggctcgacggcgagcacgcgccggcactggctgtggagggatcactcaagtgctgcccgctcgcggcgggtgcgatgctccacatcgcggccgcattcgcctcccaggtcgccgcagggaaggcgcaggccaggggactggtggttgtggcgtttgatcggagcccacaggtgtacctggaattcatgcgccgccgcaaccttgacgcaaatgctttggaccgatgtgttagaatattggattgctactctgacccacttggatggaagcagaagattcaaaatcagcagcatcaagggaacagtgcaaagcagttctcaacaaataaagataatattactgtttatagaagtgtgaaggatgttacaaaattgatgtcctccactactgaacttggaggaggttttgaaggagaaggcaaaacatatttttctgtggctgttgactcaattagctccatgttaaggcatgcttcagtgtcatcaatttcaggccttcttagtaaccttcgaagccatgaacaagtatcatcaatcttttggatgatacattcagacctccatgagcccaaggtaccccgagcatttgaatgtctttctactatggttgcttgtgtggagccagcacttgtggatcctgtttgtggagagagtccgggaaacatgtctatccttgagcaaaattattcaaaagcaaaatttattgttcgccttaaacgacgaaatggacgggtgaagcacctttacgagaacctgtatattgaggggaatgatatcaaatttgattcggctccttctgtaagtatagaagtgaaccaaagtctagtgcctaaggttcagttcaatcttgagctgtcagagaaggagcgtagcgacagggcaaatgttgttcttcctttcgaacatcaaggaaatggccaaccaattcatatatatgatggtcgccggtccctacctgaggctcaacgtgaccccaatttaactgcaccgccccttgtggatgaagtaaaaaatcccaaatctggaactgcaaagggtgaaatacattacttccgtgattcagatgacgagcaacctgactcggatgaagatccagatgatgatttggacatataagagttatttgggaatgcattgttagcttccatttggagtagaggtccaccgtcccggaacgcaccgagttgttg

SEQ ID NO: 6776 - DNA, 1526 bp, Zea Mays
gggtaaggggtcccgtgtttctctgacagctgggccccgcgttactcttgcctccaggccttccgggagtttggcgacccgtctcgggctcttgtgggggctagggtttaggcactaagcggcggccggcggcggcggggaggatggcggaggcggtcgtgaggtgcctccgggacggacggctcgacggcgagcacgcgccggcactggctgtggagggatcactcaagtgctgcccgctcgcggcgggtgcgatgctccacatcgcggccgcattcgcctcccaggtcgccgcagggaaggcgcaggccaggggactggtggttgtggcgtttgatcggagcccacaggtgtacctggaattcatgcgccgccgcaaccttgacgcaaatgctttggaccgatgaagattcaaaatcagcagcatcaagggaacagtgcaaagcagttctcaacaaataaagataatattactgtttatagaagtgtgaaggatgttacaaaattgatgtcctccactactgaacttggaggaggttttgaaggagaaggcaaaacatatttttctgtggctgttgactcaattagctccatgttaaggcatgcttcagtgtcatcaatttcaggccttcttagtaaccttcgaagccatgaacaagtatcatcaatcttttggatgatacattcagacctccatgagcccaaggtaccccgagcatttgaatgtctttctactatggttgcttgtgtggagccagcacttgtggatcctgtttgtggagagagtccgggaaacatgtctatccttgagcaaaattattcaaaagcaaaatttattgttcgccttaaacgacgaaatggacgggtgaagcacctttacgagaacctgtatattgaggggaatgatatcaaatttgattcggctccttctgtaagtatagaagtgaaccaaagtctagtgcctaaggttcagttcaatcttgagctgtcagagaaggagcgtagcgacagggcaaatgttgttcttcctttcgaacatcaaggaaatggccaaccaattcatatatatgatggtcgccggtccctacctgaggctcaacgtgaccccaatttaactgcaccgccccttgtggatgaagtaaaaaatcccaaatctggaactgcaaagggtgaaatacattacttccgtgattcagatgacgagcaacctgactcggatgaagatccagatgatgatttggacatataagagtgtaggtgctctttacttcagtaggtggcatgtgcacatgaattttaaggtataggttgagaactgctatcttttgtaggttaatccttttttagcgctcccatgctttaccttgtcaatcgtagttgcaaaaaaacttgaagcgctaaaattaatgacttgtattacttattttagagtatatttgcacaaaacaaccttgctagaatcttgataaaacccaaagaatttggtgtttatatctgtttaattacatggaatgtttgccttgcca

SEQ ID NO: 6777 - DNA, 1502 bp, Zea Mays
gggtaaggggtcccgtgtttctctgacagctgggccccgcgttactcttgcctccaggccttccgggagtttggcgacccgtctcgggctcttgtgggggctagggtttaggcactaagcggcggccggcggcggcggggaggatggcggaggcggtcgtgaggtgcctccgggacggacggctcgacggcgagcacgcgccggcactggctgtggagggatcactcaagtgctgcccgctcgcggcgggtgcgatgctccacatcgcggccgcattcgcctcccaggtcgccgcagggaaggcgcaggccaggggactggtggttgtggcgtttgatcggagcccacaggtgtacctggaattcatgcgccgccgcaaccttgacgcaaatgctttggaccgatgtgttagaatattggattgctactctgacccacttggatggaagcagaagattcaaaatcagcagcatcaagggaacagtgcaaagcagttctcaacaaataaagataatattactgtttatagaagtgtgaaggatgttacaaaattgatgtcctccactactgaacttggaggaggttttgaaggagaaggcaaaacatatttttctgtggctgttgactcaaacaagtatcatcaatcttttggatgatacattcagacctccatgagcccaaggtaccccgagcatttgaatgtctttctactatggttgcttgtgtggagccagcacttgtggatcctgtttgtggagagagtccgggaaacatgtctatccttgagcaaaattattcaaaagcaaaatttattgttcgccttaaacgacgaaatggacgggtgaagcacctttacgagaacctgtatattgaggggaatgatatcaaatttgattcggctccttctgtaagtatagaagtgaaccaaagtctagtgcctaaggttcagttcaatcttgagctgtcagagaaggagcgtagcgacagggcaaatgttgttcttcctttcgaacatcaaggaaatggccaaccaattcatatatatgatggtcgccggtccctacctgaggctcaacgtgaccccaatttaactgcaccgccccttgtggatgaagtaaaaaatcccaaatctggaactgcaaagggtgaaatacattacttccgtgattcagatgacgagcaacctgactcggatgaagatccagatgatgatttggacatataagagtgtaggtgctctttacttcagtaggtggcatgtgcacatgaattttaaggtataggttgagaactgctatcttttgtaggttaatccttttttagcgctcccatgctttaccttgtcaatcgtagttgcaaaaaaacttgaagcgctaaaattaatgacttgtattacttattttagagtatatttgcacaaaacaaccttgctagaatcttgataaaacccaaagaatttggtgtttatatctgtttaattacatggaatgtttgccttgcca

SEQ ID NO: 6778 - DNA, 3495 bp, Zea Mays
gtttctttcattgggctcaggacaaggaggtcagcggcccaccaatgaaatgcaatctcgctctaactcgtgcttggatgggcctccgttgagcccaccaagttctcgtctcccatggccttctcttcgattcttcctcttccctccgcctgccgcgccgtcaagcaacgccgcctccggtccccatggacaccaccacaccttccacttccgtctcgccggcggccgcatccgcccccgccccctactcggactcagctcttgtctcggccgtggctgacgcgcttgtctccgcctcgtgccagtcctcgccgccacccatggacaccctcctggccccgtacctcccgcgcctcacctcctcgcaccacccgcaagtgatcgcccttgccgccgccaacccatcactcgcctctccgcacactctcctcgcctaccgccgcctcttttctcctccgtcctgtctcccatccctactcccgctcctctccattctcccctaccgcaacctcctcccaacccttctcgacttcgtcccgctcgacccattgcgccacctccaccgccacctccttgctagcttccctacaagtgcgctcgccgacgcggcgctctccacgtacgcccgcctacgcctcccccacctcgccgcacaactcctccactcattccgccgccgcgggtgcgtccgcccctccctccaggcagccaacgccgtgctctccgcactcgcgcgcagtccgtccacctcgccgcaggcctctcttgatgccttccactcccttatcgccctgcggctccaccccaatcactacaccttcaacctcctggtgcacacccactgctccaaaggcacccttgccgacgccctctccacgctgtccaaaatgcagggtttcggcctctccccagatgccgtcacctacaacaccctcctcaacgctcattgtcgcaagggtatgctcggtgaagcgcggacgctgctggccaggatgaagaaggagggtatcgtgcccaccagggccacgtacaatacccttgtctcagcgtacgcgaggcttgggtggatcaagcaggcgaccgatgttgtggaagccatgacggcattcggtttcgagcctgacctgtggacatacaatgtgctcgctgcagggctgtgccaggcagggaaggtggacgaggcatttaagctgaaggatgagatggagcagcttggcatagtatcgcctgacgtagtcacctacaatacccttgttgatgcatgcttcaagtgtcagcgctcttctgatgcactgaatctgctcgaggaaatgcgtgagaaaggggtgaagtcaagtttggtcacacataacattattgtgaagggcctttgcagggaggggcaattggaagaggcgttggggcgtctggaaatgatgacagaggagggattgacaccggatgtgattacatacaatacattgattgatgcatcctgcaaagccggaaatgttgccaaagcatttgtgttgatggatgagatggtgagaagtggactcaaaatggacactttcaccctaaacactttgctatataacctatgcaaagagaaacgttacgaagaggctgaggagctcttgcgtgcaccgccgcagaggggctttgtacctgacgaagtcagctatggtacagtgatggcagcctactttaaggagtataaaccagagcctgctctgtgtctgtgggatgaaatgatcaagaggaagttaacgcctagtatttctacttacaacacattgatcaaagggctttctacaatggggaagttgacagaggcgattgacaaattgaatgagctgatggagatggggttggtaccagacgacaccacctacaatatcatcattcatgcctactgtaaggaaggggacttggagaaagctttccagttccacaacaagatggtggagaattcttttaagccagatgttgttacctgcaacactttaatgaatgggctttgtctgtatggaaggcttgagaaagcgatgaagctttttgagtcatgggtagaaaaagggaagaaggttgatgttatcacatataacaccttaattcaagctttgtgcaaagataatgatgtcgatacagctttgcgtttctttgctgatatggaggtcagaggcttgcagcctgatgtatttacatacaatgtcctgttgtctgcactgtctgaggcaggacgatcagtggaagcacaaaaaatgctgcataaattaaatgagagcggaaaattatatggaagatttttttatccttcaataaaatcctctgtggaggcagtcgagacagggaaggacccagaggttaaatctgacattgaatctgttggaaacacacaaggtgatgatcaggagagctataataaatatataaaggaactctgcattggtgggcaactgaaagaagccaaggctgttttggatgagatgatgcaaaagggcatgtctgttgacaattcaacttatatcactttaatggaaggccttatcaaaaggcaaaagaggcaaacacatgcagctggataggatatggctgagttttgctgctctgatatgtgacattgtccatggttttgccataacttcatcagttggtcataaactgactagcgcagagggtgatgctagcctttctagcaagagaaaatgaagatcagtctgaacagatgcaattggcgccaaagcatcacatatggatgacaatctattgtgattcctgaacagctggaagcttggtggcaactggcaagcaaactattctcttaggctgagtccagtgcacagcctccatacgtaggttggttttcagatccaacagataaaggtgcaactggaggaggtgctccatacgtaggtggagcatatggatgaggtgctccatacggaggtggagcatatggagcataaggaggtactccatacggaggtggagcatatgaaggaggggcgtatggaggtatctggaaagaagcttgacttccgtccacagcaggtgggggaggggcatacggacgtaccgggaatgaggcttgaattccggcttgggaagttggaggttgaccatatgaagacggtggatattgatacaaatgatagggataagggtatggtggtggacgcgcagccggaaatagtgcacggaggagtgaggctgaaacatcggagcgacgatgtagtgaagaagactcatctaacggaagggttgtaggtgacccatcggactgcaagagatccgtgaaggtgttcaaatctggggaccaacccgacattgtgtgaagaaaggggagtttggaagagaaaaatgagatggaatggtgtttggaatgagctccacccgggtaggggtatatatacagggattggggatgaaatttgtgattttttgcaaaaaaaatttcgaattttttggactccaaacggtcaaaaacggctagcacacgtggaccaatcagat

SEQ ID NO: 6779 - DNA, 3490 bp, Zea Mays
gtttctttcattgggctcaggacaaggaggtcagcggcccaccaatgaaatgcaatctcgctctaactcgtgcttggatgggcctccgttgagcccaccaagttctcgtctcccatggccttctcttcgattcttcctcttccctccgcctgccgcgccgtcaagcaacgccgcctccggtccccatggacaccaccacaccttccacttccgtctcgccggcggccgcatccgcccccgccccctactcggactcagctcttgtctcggccgtggctgacgcgcttgtctccgcctcgtgccagtcctcgccgccacccatggacaccctcctggccccgtacctcccgcgcctcacctcctcgcaccacccgcaagtgatcgcccttgccgccgccaacccatcactcgcctctccgcacactctcctcgcctaccgccgcctcttttctcctccgtcctgtctcccatccctactcccgctcctctccattctcccctaccgcaacctcctcccaacccttctcgacttcgtcccgctcgacccattgcgccacctccaccgccacctccttgctagcttccctacaagtgcgctcgccgacgcggcgctctccacgtacgcccgcctacgcctcccccacctcgccgcacaactcctccactcattccgccgccgcgggtgcgtccgcccctccctccaggcagccaacgccgtgctctccgcactcgcgcgcagtccgtccacctcgccgcaggcctctcttgatgccttccactcccttatcgccctgcggctccaccccaatcactacaccttcaacctcctggtgcacacccactgctccaaaggcacccttgccgacgccctctccacgctgtccaaaatgcagggtttcggcctctccccagatgccgtcacctacaacaccctcctcaacgctcattgtcgcaagggtatgctcggtgaagcgcggacgctgctggccaggatgaagaaggagggtatcgtgcccaccagggccacgtacaatacccttgtctcagcgtacgcgaggcttgggtggatcaagcaggcgaccgatgttgtggaagccatgacggcattcggtttcgagcctgacctgtggacatacaatgtgctcgctgcagggctgtgccaggcagggaaggtggacgaggcatttaagctgaaggatgagatggagcagcttggcatagtatcgcctgacgtagtcacctacaatacccttgttgatgcatgcttcaagtgtcagcgctcttctgatgcactgaatctgctcgaggaaatgcgtgagaaaggggtgaagtcaagtttggtcacacataacattattgtgaagggcctttgcagggaggggcaattggaagaggcgttggggcgtctggaaatgatgacagaggagggattgacaccggatgtgattacatacaatacattgattgatgcatcctgcaaagccggaaatgttgccaaagcatttgtgttgatggatgagatggtgagaagtggactcaaaatggacactttcaccctaaacactttgctatataacctatgcaaagagaaacgttacgaagaggctgaggagctcttgcgtgcaccgccgcagaggggctttgtacctgacgaagtcagctatggtacagtgatggcagcctactttaaggagtataaaccagagcctgctctgtgtctgtgggatgaaatgatcaagaggaagttaacgcctagtatttctacttacaacacattgatcaaagggctttctacaatggggaagttgacagaggcgattgacaaattgaatgagctgatggagatggggttggtaccagacgacaccacctacaatatcatcattcatgcctactgtaaggaaggggacttggagaaagctttccagttccacaacaagatggtggagaattcttttaagccagatgttgttacctgcaacactttaatgaatgggctttgtctgtatggaaggcttgagaaagcgatgaagctttttgagtcatgggtagaaaaagggaagaaggttgatgttatcacatataacaccttaattcaagctttgtgcaaagataatgatgtcgatacagctttgcgtttctttgctgatatggaggtcagaggcttgcagcctgatgtatttacatacaatgtcctgttgtctgcactgtctgaggcaggacgatcagtggaagcacaaaaaatgctgcataaattaaatgagagcggaaaattatatggaagatttttttatccttcaataaaatcctctgtggaggcagtcgagacagggaaggacccagaggttaaatctgacattgaatctgttggaaacacacaaggtgatgatcaggagagctataataaatatataaaggaactctgcattggtgggcaactgaaagaagccaaggctgttttggatgagatgatgcaaaagggcatgtctgttgacaattcaacttatatcactttaatggaaggccttatcaaaaggcaaaagaggcaaacacatgcagctggataggatatggctgagttttgctgctctgatatgtgacattgtccatggttttgccataacttcatcagttggtcataaactgactagagggtgatgctagcctttctagcaagagaaaatgaagatcagtctgaacagatgcaattggcgccaaagcatcacatatggatgacaatctattgtgattcctgaacagctggaagcttggtggcaactggcaagcaaactattctcttaggctgagtccagtgcacagcctccatacgtaggttggttttcagatccaacagataaaggtgcaactggaggaggtgctccatacgtaggtggagcatatggatgaggtgctccatacggaggtggagcatatggagcataaggaggtactccatacggaggtggagcatatgaaggaggggcgtatggaggtatctggaaagaagcttgacttccgtccacagcaggtgggggaggggcatacggacgtaccgggaatgaggcttgaattccggcttgggaagttggaggttgaccatatgaagacggtggatattgatacaaatgatagggataagggtatggtggtggacgcgcagccggaaatagtgcacggaggagtgaggctgaaacatcggagcgacgatgtagtgaagaagactcatctaacggaagggttgtaggtgacccatcggactgcaagagatccgtgaaggtgttcaaatctggggaccaacccgacattgtgtgaagaaaggggagtttggaagagaaaaatgagatggaatggtgtttggaatgagctccacccgggtaggggtatatatacagggattggggatgaaatttgtgattttttgcaaaaaaaatttcgaattttttggactccaaacggtcaaaaacggctagcacacgtggaccaatcagat

SEQ ID NO: 6780 - DNA, 3526 bp, Zea Mays
gtttctttcattgggctcaggacaaggaggtcagcggcccaccaatgaaatgcaatctcgctctaactcgtgcttggatgggcctccgttgagcccaccaagttctcgtctcccatggccttctcttcgattcttcctcttccctccgcctgccgcgccgtcaagcaacgccgcctccggtccccatggacaccaccacaccttccacttccgtctcgccggcggccgcatccgcccccgccccctactcggactcagctcttgtctcggccgtggctgacgcgcttgtctccgcctcgtgccagtcctcgccgccacccatggacaccctcctggccccgtacctcccgcgcctcacctcctcgcaccacccgcaagtgatcgcccttgccgccgccaacccatcactcgcctctccgcacactctcctcgcctaccgccgcctcttttctcctccgtcctgtctcccatccctactcccgctcctctccattctcccctaccgcaacctcctcccaacccttctcgacttcgtcccgctcgacccattgcgccacctccaccgccacctccttgctagcttccctacaagtgcgctcgccgacgcggcgctctccacgtacgcccgcctacgcctcccccacctcgccgcacaactcctccactcattccgccgccgcgggtgcgtccgcccctccctccaggcagccaacgccgtgctctccgcactcgcgcgcagtccgtccacctcgccgcaggcctctcttgatgccttccactcccttatcgccctgcggctccaccccaatcactacaccttcaacctcctggtgcacacccactgctccaaaggcacccttgccgacgccctctccacgctgtccaaaatgcagggtttcggcctctccccagatgccgtcacctacaacaccctcctcaacgctcattgtcgcaagggtatgctcggtgaagcgcggacgctgctggccaggatgaagaaggagggtatcgtgcccaccagggccacgtacaatacccttgtctcagcgtacgcgaggcttgggtggatcaagcaggcgaccgatgttgtggaagccatgacggcattcggtttcgagcctgacctgtggacatacaatgtgctcgctgcagggctgtgccaggcagggaaggtggacgaggcatttaagctgaaggatgagatggagcagcttggcatagtatcgcctgacgtagtcacctacaatacccttgttgatgcatgcttcaagtgtcagcgctcttctgatgcactgaatctgctcgaggaaatgcgtgagaaaggggtgaagtcaagtttggtcacacataacattattgtgaagggcctttgcagggaggggcaattggaagaggcgttggggcgtctggaaatgatgacagaggagggattgacaccggatgtgattacatacaatacattgattgatgcatcctgcaaagccggaaatgttgccaaagcatttgtgttgatggatgagatggtgagaagtggactcaaaatggacactttcaccctaaacactttgctatataacctatgcaaagagaaacgttacgaagaggctgaggagctcttgcgtgcaccgccgcagaggggctttgtacctgacgaagtcagctatggtacagtgatggcagcctactttaaggagtataaaccagagcctgctctgtgtctgtgggatgaaatgatcaagaggaagttaacgcctagtatttctacttacaacacattgatcaaagggctttctacaatggggaagttgacagaggcgattgacaaattgaatgagctgatggagatggggttggtaccagacgacaccacctacaatatcatcattcatgcctactgtaaggaaggggacttggagaaagctttccagttccacaacaagatggtggagaattcttttaagccagatgttgttacctgcaacactttaatgaatgggctttgtctgtatggaaggcttgagaaagcgatgaagctttttgagtcatgggtagaaaaagggaagaaggttgatgttatcacatataacaccttaattcaagctttgtgcaaagataatgatgtcgatacagctttgcgtttctttgctgatatggaggtcagaggcttgcagcctgatgtatttacatacaatgtcctgttgtctgcactgtctgaggcaggacgatcagtggaagcacaaaaaatgctgcataaattaaatgagagcggaaaattatatggaagatttttttatccttcaataaaatcctctgtggaggcagtcgagacagggaaggacccagaggttaaatctgacattgaatctgttggaaacacacaaggtgatgatcaggagagctataataaatatataaaggaactctgcattggtgggcaactgaaagaagccaaggctgttttggatgagatgatgcaaaagggcatgtctgttgacaattcaacttatatcactttaatggaaggccttatcaaaaggcaaaagaggcaaacacatgcagctggataggatatggctgagttttgctgctctgatatgtgacattgtccatggttttgccataacttcatcagttggtcataaactgactagagggtgatgctagcctttctagcaagagaaaatgaagatcagtctgaacagatgcaattggcgccaaagcatcacatatggatgacaatctattgtgattcctgaacagctggttcacttcaattgaatatggggaatgctttttgcagaagcttggtggcaactggcaagcaaactattctcttaggctgagtccagtgcacagcctccatacgtaggttggttttcagatccaacagataaaggtgcaactggaggaggtgctccatacgtaggtggagcatatggatgaggtgctccatacggaggtggagcatatggagcataaggaggtactccatacggaggtggagcatatgaaggaggggcgtatggaggtatctggaaagaagcttgacttccgtccacagcaggtgggggaggggcatacggacgtaccgggaatgaggcttgaattccggcttgggaagttggaggttgaccatatgaagacggtggatattgatacaaatgatagggataagggtatggtggtggacgcgcagccggaaatagtgcacggaggagtgaggctgaaacatcggagcgacgatgtagtgaagaagactcatctaacggaagggttgtaggtgacccatcggactgcaagagatccgtgaaggtgttcaaatctggggaccaacccgacattgtgtgaagaaaggggagtttggaagagaaaaatgagatggaatggtgtttggaatgagctccacccgggtaggggtatatatacagggattggggatgaaatttgtgattttttgcaaaaaaaatttcgaattttttggactccaaacggtcaaaaacggctagcacacgtggaccaatcagat

SEQ ID NO: 6781 - DNA, 3531 bp, Zea Mays
gtttctttcattgggctcaggacaaggaggtcagcggcccaccaatgaaatgcaatctcgctctaactcgtgcttggatgggcctccgttgagcccaccaagttctcgtctcccatggccttctcttcgattcttcctcttccctccgcctgccgcgccgtcaagcaacgccgcctccggtccccatggacaccaccacaccttccacttccgtctcgccggcggccgcatccgcccccgccccctactcggactcagctcttgtctcggccgtggctgacgcgcttgtctccgcctcgtgccagtcctcgccgccacccatggacaccctcctggccccgtacctcccgcgcctcacctcctcgcaccacccgcaagtgatcgcccttgccgccgccaacccatcactcgcctctccgcacactctcctcgcctaccgccgcctcttttctcctccgtcctgtctcccatccctactcccgctcctctccattctcccctaccgcaacctcctcccaacccttctcgacttcgtcccgctcgacccattgcgccacctccaccgccacctccttgctagcttccctacaagtgcgctcgccgacgcggcgctctccacgtacgcccgcctacgcctcccccacctcgccgcacaactcctccactcattccgccgccgcgggtgcgtccgcccctccctccaggcagccaacgccgtgctctccgcactcgcgcgcagtccgtccacctcgccgcaggcctctcttgatgccttccactcccttatcgccctgcggctccaccccaatcactacaccttcaacctcctggtgcacacccactgctccaaaggcacccttgccgacgccctctccacgctgtccaaaatgcagggtttcggcctctccccagatgccgtcacctacaacaccctcctcaacgctcattgtcgcaagggtatgctcggtgaagcgcggacgctgctggccaggatgaagaaggagggtatcgtgcccaccagggccacgtacaatacccttgtctcagcgtacgcgaggcttgggtggatcaagcaggcgaccgatgttgtggaagccatgacggcattcggtttcgagcctgacctgtggacatacaatgtgctcgctgcagggctgtgccaggcagggaaggtggacgaggcatttaagctgaaggatgagatggagcagcttggcatagtatcgcctgacgtagtcacctacaatacccttgttgatgcatgcttcaagtgtcagcgctcttctgatgcactgaatctgctcgaggaaatgcgtgagaaaggggtgaagtcaagtttggtcacacataacattattgtgaagggcctttgcagggaggggcaattggaagaggcgttggggcgtctggaaatgatgacagaggagggattgacaccggatgtgattacatacaatacattgattgatgcatcctgcaaagccggaaatgttgccaaagcatttgtgttgatggatgagatggtgagaagtggactcaaaatggacactttcaccctaaacactttgctatataacctatgcaaagagaaacgttacgaagaggctgaggagctcttgcgtgcaccgccgcagaggggctttgtacctgacgaagtcagctatggtacagtgatggcagcctactttaaggagtataaaccagagcctgctctgtgtctgtgggatgaaatgatcaagaggaagttaacgcctagtatttctacttacaacacattgatcaaagggctttctacaatggggaagttgacagaggcgattgacaaattgaatgagctgatggagatggggttggtaccagacgacaccacctacaatatcatcattcatgcctactgtaaggaaggggacttggagaaagctttccagttccacaacaagatggtggagaattcttttaagccagatgttgttacctgcaacactttaatgaatgggctttgtctgtatggaaggcttgagaaagcgatgaagctttttgagtcatgggtagaaaaagggaagaaggttgatgttatcacatataacaccttaattcaagctttgtgcaaagataatgatgtcgatacagctttgcgtttctttgctgatatggaggtcagaggcttgcagcctgatgtatttacatacaatgtcctgttgtctgcactgtctgaggcaggacgatcagtggaagcacaaaaaatgctgcataaattaaatgagagcggaaaattatatggaagatttttttatccttcaataaaatcctctgtggaggcagtcgagacagggaaggacccagaggttaaatctgacattgaatctgttggaaacacacaaggtgatgatcaggagagctataataaatatataaaggaactctgcattggtgggcaactgaaagaagccaaggctgttttggatgagatgatgcaaaagggcatgtctgttgacaattcaacttatatcactttaatggaaggccttatcaaaaggcaaaagaggcaaacacatgcagctggataggatatggctgagttttgctgctctgatatgtgacattgtccatggttttgccataacttcatcagttggtcataaactgactagcgcagagggtgatgctagcctttctagcaagagaaaatgaagatcagtctgaacagatgcaattggcgccaaagcatcacatatggatgacaatctattgtgattcctgaacagctggttcacttcaattgaatatggggaatgctttttgcagaagcttggtggcaactggcaagcaaactattctcttaggctgagtccagtgcacagcctccatacgtaggttggttttcagatccaacagataaaggtgcaactggaggaggtgctccatacgtaggtggagcatatggatgaggtgctccatacggaggtggagcatatggagcataaggaggtactccatacggaggtggagcatatgaaggaggggcgtatggaggtatctggaaagaagcttgacttccgtccacagcaggtgggggaggggcatacggacgtaccgggaatgaggcttgaattccggcttgggaagttggaggttgaccatatgaagacggtggatattgatacaaatgatagggataagggtatggtggtggacgcgcagccggaaatagtgcacggaggagtgaggctgaaacatcggagcgacgatgtagtgaagaagactcatctaacggaagggttgtaggtgacccatcggactgcaagagatccgtgaaggtgttcaaatctggggaccaacccgacattgtgtgaagaaaggggagtttggaagagaaaaatgagatggaatggtgtttggaatgagctccacccgggtaggggtatatatacagggattggggatgaaatttgtgattttttgcaaaaaaaatttcgaattttttggactccaaacggtcaaaaacggctagcacacgtggaccaatcagat

SEQ ID NO: 6782 - DNA, 850 bp, Zea Mays
atgcggcgtgctgtcaccccatcgtcccatatttcctccgccgacgatccgaaggcttccacgttcgcggtggacgactgggtcatcaccgtccgcgaggtgttcggccccgtgcccactcatgaggaatccatggctgccacgctcgacctcaaggacgccttcgagatcacaatggaagcttctgaggctatcatgatatgtcccagaaacgaatggcccaagaaatatgttgtatatggtatgtctaagaaggaagataacaacgaaaatttagtcgtctcatccggaacttctggacgtgttgtgcaagcattcacattgctacaggagagccctgaagctcaggttgttgtggcctcacttgcttctgataagaatgtctgggatgctgtgatgaagaacgaaaaggttatcaagttctacaagacatatgagtcaaagcttagcaagtgttctagtgttgcttcaagtgtgtcggggcatgaggtggaggatggtgaggcagctagcctgcaaagcaacacttacctccctcaaagcgctggtgaatcagtcaaggattatttggagaaaatgaaggccctggtgtccgagatgatggccaatctatcaaacattatgcaagatcttgtcgcaacctctgacgagggccgtagcaagggggagatcaagaccctgacaacgagctcctgcaaagacttttcgaatgcgccctctgcctttgtgctcctggctgttgcgtcgatcatggtagttttgcttaagcgcgtttaggtcagtcaaaaataaaatagaatgaagataaaggaaacttggacacattagcatgattatttatctcttcatg

SEQ ID NO: 6783 - DNA, 2672 bp, Zea Mays
cgagagtcgagacgagtacggacgtaacccaacggaaggcacgctgcgcgggcacaagccaggtgtccgagtgcccctccactctactctcacgccgtacccaccacaatgtgacgggcgacctttccagagcaacgccgcagttcgcgaactgttcgcaaggaaggcagccacccagccataccaattaccaaaccactcatcaggtcgcgttgccagccgctcaagccaagacagccccactaatctccctgggatcgcggctcgggctaagctaatcggggcgccccaaccatctctcgccaagatctcgacaaggactagcccatggtgagctgcgccgattttaatatctgctagcttctgaaattgttctattgttgtattctacagctagctggtagcaggtttgttttagtttagattagctttcatttgtcctcttcgcttctctggatcaacctgccatgcgcgtgtcaactggagtagttaagcggcgccatgggtatgcggagcaggcacccaaaggcgttgggtttccgctggtacccggcggcaacccaccggtccctaactctggtactgtggagcctagcggcattggtcgtcgttgtgaatttccatcttctcatcattcataaggaggagggtgagaatatgagtacacacgagatccgccgatcgattatgagggaactggaagtggtggaggaggagaagttccggctagctcctccccggagccggaggaatccccgggctgtgcgccgcaagggagagaagaagtcgcctacaatagtggatgagttcttggatgagtcttctgcagtgcatgatatgttcttcccagaactgaacacggctgtggatccaatcaatggtggaaatgacagcatgtacttctactacccaggaagaatttggttggacactgatggaaaaccaattcaagctcatggaggaggtgtcctgtatgataagaggaccaacacctatttctggtacggggagaacaaggatggcaaaacctacaaagctcacagcaagggagcagacagggttgacatcattggagtaagttgctattcttcgaaggacctgtgggcatggaaaaatgaagggcttgtcctccgtggtgagaagaatggaacacatgatcttcacaaatccaatgtcctagagaggcccaaggtgatatacaatgatcggactggcaaatatgtgatgtggatgcacatagatgatgcgaactacaccaaagcttcagttggtgtggccgtcagtgactctccgacaggcccattcacttatctctacagcaagcgtccacatgactgtgagagtagagacatgaccatcttcaaggatgatgatgggaaggcctacctgatatactcttctgaggacaacagcgagctccacattggtccgctaactgacgactaccttgatgtcactgatgtgatgcgaaggcttctcatcgcacagcatcgagaagctcctgcgctcttcaagcatgaaggcacctactatatggtaacgtctggctgcacaggctgggctccaaacactgcgctggctcacgcagcaacatcagtgatgggaccttgggagacgctggggaatccttgtgtgggagggaacgaggtcttcagatcaacaacgttcttctcccagagcacatttgtcttgccggttccagggctgccgggctcattcatcttcatggctgatcggtggaacccatccgatcttagagattcgcggtatgtctggctgcctctgacgatagggggagtccctgatgaagccgcagactatagcttcatgttccctctctggtcccgggtgtccatctactggcacaaacggtggcgtctccctgaggagtggagggattcttgaaaaatctgaagttcttttagaataattcaagatgtggtacattgatagataccaaagtatcgacatacgacacgtcggtctacactgtataggtcagatgtagatgcagggtttgtaaatgtgcagtttttggagtttgcactgaaatcagataaaactttgtggccttttgggcgaggtgttgtggcgatccactcgtcttactttcaagaataatctgcttgcccattcagcattggtcttaccgtttgatctagttggaaatgtgtgctgacggctatgtaacctgattcagggtctcatgatcatttggtcattctttgtgcatctgaatgtcacgcctggtgtgccggcctagctacaggtccaaggggtgacaggagacggagtgctctgctggagagttttgtctaaggtggtgtgtgatggcttcaagtttcagtttcagtgtggagctgtagtttataatatcaatttaaatattttttaaaaaataatctaaataataaataaaatgacttatctaaatgtttttaaatatcttctaaaggtttacagcttcacgattttctggagcacctaatgacctgcttcactaactctaccaaattttctggaactagagcggtccagctatcctaaacagtgcctaaatatttcatagtttgttttggcacctgtatgggctcattgtaagagagttaaactctgctatataagggagaactaagaagaaaaggagaatacaaataccgtgaccaacttct

SEQ ID NO: 6784 - DNA, 2619 bp, Zea Mays
caacgcacagctactgcctggcatactcgagagtcgagacgagtacggacgtaacccaacggaaggcacgctgcgcgggcacaagccaggtgtccgagtgcccctccactctactctcacgccgtacccaccacaatgtgacgggcgacctttccagagcaacgccgcagttcgcgaactgttcgcaaggaaggcagccacccagccataccaattaccaaaccactcatcaggtcgcgttgccagccgctcaagccaagacagccccactaatctccctgggatcgcggctcgggctaagctaatcggggcgccccaaccatctctcgccaagatctcgacaaggactagcccatgcgcgtgtcaactggagtagttaagcggcgccatgggtatgcggagcaggcacccaaaggcgttgggtttccgctggtacccggcggcaacccaccggtccctaactctggtactgtggagcctagcggcattggtcgtcgttgtgaatttccatcttctcatcattcataaggaggagggtgagaatatgagtacacacgagatccgccgatcgattatgagggaactggaagtggtggaggaggagaagttccggctagctcctccccggagccggaggaatccccgggctgtgcgccgcaagggagagaagaagtcgcctacaatagtggatgagttcttggatgagtcttctgcagtgcatgatatgttcttcccagaactgaacacggctgtggatccaatcaatggtggaaatgacagcatgtacttctactacccaggaagaatttggttggacactgatggaaaaccaattcaagctcatggaggaggtgtcctgtatgataagaggaccaacacctatttctggtacggggagaacaaggatggcaaaacctacaaagctcacagcaagggagcagacaggattctgttggtgaggccaaatttctaggggacgtattggaagttatggtctattggtaaggttgacatcattggagtaagttgctattcttcgaaggacctgtgggcatggaaaaatgaagggcttgtcctccgtggtgagaagaatggaacacatgatcttcacaaatccaatgtcctagagaggcccaaggtgatatacaatgatcggactggcaaatatgtgatgtggatgcacatagatgatgcgaactacaccaaagcttcagttggtgtggccgtcagtgactctccgacaggcccattcacttatctctacagcaagcgtccacatgactgtgagagtagagacatgaccatcttcaaggatgatgatgggaaggcctacctgatatactcttctgaggacaacagcgagctccacattggtccgctaactgacgactaccttgatgtcactgatgtgatgcgaaggcttctcatcgcacagcatcgagaagctcctgcgctcttcaagcatgaaggcacctactatatggtaacgtctggctgcacaggctgggctccaaacactgcgctggctcacgcagcaacatcagtgatgggaccttgggagacgctggggaatccttgtgtgggagggaacgaggtcttcagatcaacaacgttcttctcccagagcacatttgtcttgccggttccagggctgccgggctcattcatcttcatggctgatcggtggaacccatccgatcttagagattcgcggtatgtctggctgcctctgacgatagggggagtccctgatgaagccgcagactatagcttcatgttccctctctggtcccgggtgtccatctactggcacaaacggtggcgtctccctgaggagtggagggattcttgaaaaatctgaagttcttttagaataattcaagatgtggtacattgatagataccaaagtatcgacatacgacacgtcggtctacactgtataggtcagatgtagatgcagggtttgtaaatgtgcagtttttggagtttgcactgaaatcagataaaactttgtggccttttgggcgaggtgttgtggcgatccactcgtcttactttcaagaataatctgcttgcccattcagcattggtcttaccgtttgatctagttggaaatgtgtgctgacggctatgtaacctgattcagggtctcatgatcatttggtcattctttgtgcatctgaatgtcacgcctggtgtgccggcctagctacaggtccaaggggtgacaggagacggagtgctctgctggagagttttgtctaaggtggtgtgtgatggcttcaagtttcagtttcagtgtggagctgtagtttataatatcaatttaaatattttttaaaaaataatctaaataataaataaaatgacttatctaaatgtttttaaatatcttctaaaggtttacagcttcacgattttctggagcacctaatgacctgcttcactaactctaccaaattttctggaactagagcggtccagctatcctaaacagtgcctaaatatttcatagtttgttttggcacctgtatgggctcattgtaagagagttaaactctgctatataagggagaactaagaagaaaaggagaatacaaataccgtgaccaacttct

SEQ ID NO: 6785 - DNA, 331 bp, Zea Mays
tggcctcattgcctgcccctgcgagtgggacgcgacgcgatttgaggatgattcgcaaagcatttcggaagactatggttgttagggtacatggatacctgggggcggcggcgcggccgctgcgggaggacgcgatagaaggggaggtggtggcgatgaggtgtgagaagtggatgcgcgagaggggaggaggcagtgctcgccgccgccgccgccgcgcagacggaggcggaggtgcttggagagcgatgccgccatctcggaggtcagcgagggccaggggttggtcgtttggactttggactcgagagctcggactggacgggagaac

SEQ ID NO: 6786 - DNA, 1412 bp, Zea Mays
cgaactgacttcaggtagcgcaaacatgcctgaaagcacgcatatgggccacaccgcatcctctgcgtccatccgcctcttgggcgcctgcgtaccgcacgatcgaaccctggaaaccctcgaatcaaatatatatgtagtccgccagccaaactgaagttctcgagcacctgcagcgccgccagacactccgtagtctgtaccccaagcaccggcgcggcggcggcggctaccatggcagtcgggaagaacaagaggatctccaagggaaagaagggtggtaagaaaaagaccgtcgatcccttctctaagaaggactggtatgacatcaaggccccatcggtcttcagtgtgcgcaacattgggaagactctcgtgtccaggacacagggtaccaggattgcctctgatggtctgaagcacagagtctttgaggtttgtctagctgatcttcagggtgacgaggatcaggcttacaggaaaatcaggctccgtgctgaagatgtgcaaggcaggaatgtgctcacaaacttctggggcatgaattttaccaccgataagctcagatctctagtaaagaagtggcagacattgattgaagcccatgttgatgtcaagacaaccgacaactacatgctgcgtttgttctgcattggttttaccaagaggcgcccaaaccaggtcaagagaacctgctatgctcaggcatcccagattcggcagattcaccgcaagatggatgagattatgatcaaccaggcttctacatgtgacctaaaagaacttgtttctaagttcattccggaggttattggcaaaaagattgagaagtctacctccagcatcttcccacttcaaaacgtcttcatccgcaaggtgaagatactcatggcccccaagtttgatctcgggaagttgatggaggttcatggcgactacaaagaggacgttggtgtgaagcttgagaggcctgtcgagggtgatgaggctatgcaggaggttgctgctgccgagtagtttatttgctacttctttatctagacgaatctggacaggaggtcccttatgacgcgaacttcataaaattgtctggcgacatgttttcttctgtccctgccctaaactctaaacccaaaggttattcgtaacaagtgttttaagattatttttgtttatgtttgggttcgagtactgctgtgtgcatgattattttttgtttggttatcgataatccagtttctcattcgtgcttatttgttgtgagctggtagtggagcatgtgttaaatgtatgtgatgctctgccgtgtttaagattagtctcagcattttactggtgccgcaccatcctcctctcgcttcttccacgccagctcttaactctattcttgtcattgcttcagtgcagtcttt

SEQ ID NO: 6787 - DNA, 941 bp, Zea Mays
aaactgaagttctcgagcacctgcagcgccgccagacactccgtagtctgtaccccaagcaccggcgcggcggcggcggctaccatggcagtcgggaagaacaagaggatctccaagggaaagaagggtggtaagaaaaagaccgtcgatcccttctctaagaaggactggtatgacatcaaggccccatcggtcttcagtgtgcgcaacattgggaagactctcgtgtccaggacacagggtaccaggattgcctctgatggtctgaagcacagagtctttgaggtttgtctagctgatcttcagggtgacgaggatcaggcttacaggaaaatcaggctccgtgctgaagatgtgcaaggcaggaatgtgctcacaaacttctggggcatgaattttaccaccgataagctcagatctctagtaaagaagtggcagacattgattgaagcccatgttgatgtcaagacaaccgacaactacatgctgcgtttgttctgcattggttttaccaagaggcgcccaaaccaggtcaagagaacctgctatgctcaggcatcccagattcggcagattcaccgcaagatggatgagattatgatcaaccaggcttctacatgtgacctaaaagaacttgtttctaagttcattccggaggttattggcaaaaagattgagaagtctacctccagcatcttcccacttcaaaacgtcttcatccgcaaggtgaagatactcatggcccccaagtttgatctcgggaagttgatggagaggacgttggtgtgaagcttgagaggcctgtcgagggtgatgaggctatgcaggaggttgctgctgccgagtagtttatttgctacttctttatctagacgaatctggacaggaggtcccttatgacgcgaacttcataaaattgtctggcgacatgttttcttctg

SEQ ID NO: 6788 - DNA, 1469 bp, Zea Mays
ccgcggttcattcgcccacctcatctccctctcccgccccgccttagaaaaagaacacgaggagcgcgcgtgctccccggccccgcggcaggcagacacgcatcgatgggcaactgccaggcggcggagacggcgacggtgctgatccagcacccgggcggcggccgcacggagcgcgcctactgggcgctctcggcgggggccgtcatggcggcgaacccgggccactacgtcgcggccgtcatcaccgtcccgcagccgggcggcgcgggagacgacggagctgcctctgcctctgccgccgcgcccgtgaagcacctcaagctgctccgccccgacgacacgctcctgctcggccgcgtctaccgcctcgtcagcttcgaaggtactactgcgcgtgcagcgcgcgtcgtgcacgggcacggcactggctccgaacgagcctacgttcgtggtcgtgttaggccgcccgtcacttcgcgtgtccgtatttggttcggaccagaatgctactgtttcaccgtcgctgccggacagctctttcgtcttgcgccttcattttctcatgtcgctttttgctgccggtccaactaacgaacgtgagtgaactgtgtgtgtgtgtgtgtgtgttggggacgggcagaggtgctgcgggagttcgcgtcgaagcggcacgtgaagctgagccgcgtgacggtccgggccaaggacgaaggcgaggacgtgaagccggcgcccaagcatcgccgccgtcgcgccagcggcggcggagagcgtaaggaatcggagcggtcactcgccaaggtcatggggcagacggaggagcagctggtgccggaggcaggcccggcctcgggccccgcccccagctcctccaagcaaggggacgccgacacgccggccggcctcgacgccgacctggaggcgctcctgcagccgcacggggcgttgctcggccgccgagccggccggcagtggaggcccgcgctgcagagcatcgccgaaggcgaagggtaaaggggggcggggcggcgggcgccaccagctcgaccgttcggtccgcggtcggtgagcagccgagctccgtcgtctccgtctccgtgcaaggtcaactgcaacttgcgaggctgacagcgtattgtaaaataagttcattgttagcgcgcccgactggtgtccagatgtgtagcggcagcagttggctaagcatagcactagactagtatagtagtatccatgcatggatttgatggtgtgtttgtaataaggtaagtagtatacggtatcgcataaaatctttatcctgttctttgtgagctcaatcatcgtcatgggatggacagcgggccgggcgacgtgcatatatgtggttcgatttggcgtggttttacaacacccgaccctttccataataaacgaagcacatgcagcagcccagtagtagtcagtcagtcgtgggttggaatcgg

SEQ ID NO: 6789 - DNA, 2332 bp, Zea Mays
tctctctctctctcgctgctttgcttgcttcccccacccccagtcagctgagcctccgccgacctcgacgaagtggcggcagaacacgcgcagttgctgagttacggcacacaccgcagcagtgcacaccacatccacacacgcgcctggcggtggagtgacaactgacaggcatcgggttgcttccggcggtggccattgccaaccccgccccatctccttcgtcatgcgtacaagacatccccacatcgccgctcctccacctcctcctcgcctgacgtcatccccgcaccggcactgcaccacaaatccatcccccctcccctcccggcccctgcattgcatccattcttcttgcttccccgaaacctcgcgcttggtctgacctgacgcaacgcgtcctcgatccctgagataaagctcgcggcattcgcttgttccgccaaattcagtcccttgaatttcctgagctgtcgaagtttttcttctggttcgattcttcggagaccccctggcatttgtgggttccgccattgctcgctggtttgatccgtcctagttgccgaagcgcctgttgatttggttctaaaatacatcgttcgtccttccaagttcaaaaggggggaaaaggctcttctttttttggatcctgatttgagtgtgtcacctttgcttccggcaatggggaacaacagcagcagcggcggcggcaacaggcgtccggagcactcggagtcggcgctgccgcccgaggcgtcgccggcggaagagctgagctcttatgaggcagcgtgccggtcggacccggagctgcgcacgttcgacacgacgctgcagcggcgcaccagccgcgccatctcgacgctggcggtgggcgtcgaggtgcggtcgatgtcgctggactcgctccgagaggtcaccggctgcctcctcgacatgaaccaggaggtggtgcgcgtcatcctcgactgcaagaaggacatctggaagagccccgagctgttcgacctcgtcgaggattacttcgagagcagcctccagaccctcgatttctgcaccgcactcgacaagtgcctcaagcgagcccgcgactcccagcttctcctccacgtcgcgctccagcgcttcgacgacgaggaaggcagcgacgccgccgccgccgctccctccgcccggtacgcgcgcacgctgcacgagctgcgccagttcaaggcggccggggatcccttcacggacgagttcttcgccgccttccaggccgtttaccggcagcagctggccatgctggagaagctgcagcagcgcaagcaccggctcgacaagaaggtcaagaccatcaaggcgtggcgccgggtgtcaagcatcatcttcgcgaccacgttcgcggccgtgctcatctgctcggtggttgccgcggccatcgctgccccgcctgtcgctgcggcattggccgcggccgctgcagtcccgctgggatctatggggaagtggatagattctttgctgaaagggtatcaggacgcgctccgtggacagaaggaggtggtgagcgcaatgcaggttggcacgttcattgccatcaaggatttggacagtatcagagtcctcatcaaccgggtggaggtggagatcagctcaatggtagactgtgtagagtttgcggagcgggatgaggaggcggtgaaatttggggtggaggagatcaagaagaagctggaaaactttatgaagagtgtcgaagatcttggggaacaagcagaccggtgtagccgggatatccgtcgggcaaggacggtcgtgctgcaaaggatcatccggcatccaaactgaaaaataaggggaaatgtaagggatccagtgatagcgatgcgcaagaaagagtctgtggctgagacgagcaagcaaacaccaccattgcccaaaagcaacaaataatggtcgtggtcttatgtgaagaagaatttttctagttgtccactgtccaagtctctactgtttatggttaaggtcactggaagagttgttattttctggttaccattccattctttatatgggttacttagattgggtgagatggagtgagtttaattctcaaccaaatcagaatctttcataatttttttcaatatcattcaatccatataaccgaacaaggcttttaaggagtaaaggtgtttacttatatcccggtatgtctctgttagaatacccgtttagggtttgaggtcttccccgtgtaatgaccatctcacccctctgtaatgtgtctggtccagtttactcagcctattaatatatcacccaacccctgttagggttagggttttca

SEQ ID NO: 6790 - DNA, 2327 bp, Zea Mays
tctctctctctctcgctgctttgcttgcttcccccacccccagtcagctgagcctccgccgacctcgacgaagtggcggcagaacacgcgcagttgctgagttacggcacacaccgcagcagtgcacaccacatccacacacgcgcctggcggtggagtgacaactgacaggcatcgggttgcttccggcggtggccattgccaaccccgccccatctccttcgtcatgcgtacaagacatccccacatcgccgctcctccacctcctcctcgcctgacgtcatccccgcaccggcactgcaccacaaatccatcccccctcccctcccggcccctgcattgcatccattcttcttgcttccccgaaacctcgcgcttggtctgacctgacgcaacgcgtcctcgatccctgagataaagctcgcggcattcgcttgttccgccaaattcagtcccttgaatttcctgagctgtcgaagtttttcttctggttcgattcttcggagaccccctggcatttgtgggttccgccattgctcgctggtttgatccgtcctagttgccgaagcgcctgttgatttggttctaaaatacatcgttcgtccttccaagttcaaaaggggggaaaaggctcttctttttttggatcctgatttgagtgtgtcacctttgcttccggcaatggggaacaacagcagcagcggcggcggcaacaggcgtccggagcactcggagtcggcgctgccgcccgaggcgtcgccggcggaagagctgagctcttatgaggcagcgtgccggtcggacccggagctgcgcacgttcgacacgacgctgcagcggcgcaccagccgcgccatctcgacgctggcggtgggcgtcgaggtgcggtcgatgtcgctggactcgctccgagaggtcaccggctgcctcctcgacatgaaccaggaggtggtgcgcgtcatcctcgactgcaagaaggacatctggaagagccccgagctgttcgacctcgtcgaggattacttcgagagcagcctccagaccctcgatttctgcaccgcactcgacaagtgcctcaagcgagcccgcgactcccagcttctcctccacgtcgcgctccagcgcttcgacgacgaggaaggcagcgacgccgccgccgccgctccctccgcccggtacgcgcgcacgctgcacgagctgcgccagttcaaggcggccggggatcccttcacggacgagttcttcgccgccttccaggccgtttaccggcagcagctggccatgctggagaagctgcagcagcgcaagcaccggctcgacaagaaggtcaagaccatcaaggcgtggcgccgggtgtcaagcatcatcttcgcgaccacgttcgcggccgtgctcatctgctcggtggttgccgcggccatcgctgccccgcctgtcgctgcggcattggccgcggccgctgcagtcccgctgggatctatggggaagtggatagattctttgctgaaagggtatcaggacgcgctccgtggacagaaggaggtggtgagcgcaatgcaggttggcacgttcattgccatcaaggatttggacagtatcagagtcctcatcaaccgggtggaggtggagatcagctcaatggtagactgtgtagagtttgcggagcgggatgaggaggcggtgaaatttggggtggaggagatcaagaagaagctggaaaactttatgaagagtgtcgaagatcttggggaacaagcagaccggtgtagccgggatatccgtcgggcaaggacggtcgtgctgcaaaggatcatccggcatccaaactgaaaaataaggggaaatggatccagtgatagcgatgcgcaagaaagagtctgtggctgagacgagcaagcaaacaccaccattgcccaaaagcaacaaataatggtcgtggtcttatgtgaagaagaatttttctagttgtccactgtccaagtctctactgtttatggttaaggtcactggaagagttgttattttctggttaccattccattctttatatgggttacttagattgggtgagatggagtgagtttaattctcaaccaaatcagaatctttcataatttttttcaatatcattcaatccatataaccgaacaaggcttttaaggagtaaaggtgtttacttatatcccggtatgtctctgttagaatacccgtttagggtttgaggtcttccccgtgtaatgaccatctcacccctctgtaatgtgtctggtccagtttactcagcctattaatatatcacccaacccctgttagggttagggttttca

SEQ ID NO: 6791 - DNA, 607 bp, Zea Mays
atggtctaccaacgatccggatacacgcttcgtacatccggttgcgcgttgtatgctcgtagccgctgcggacattttcgagaagggacccgaaagcgttgtggaaaaaggggaaaaggggagcggtctgctcatgtttctctccaccacactgcttggccgactagacggagcggatctccctcccaatccaccgtcaatggccaccgacctccggagaacgcggacgacgatggagtggaggacgaacgtgccgccgtgccctctccagagcggtgcgaggtgctggtttctgcgatcgcgggggtgctggccagcacgctgagggagcacgacgagcgggtggccatcatcgttcggctccacgatggggacgtcgctgcaaccgaccgtcttaatggaggtggccagagttccaatccggtaaaaaaattggacgcaccaaataccacttgaaagcaaggattttcagcattcgaaagaggatttcaacaacgaacatgctaatcaagtccatacatcaacacatagacaattttgatataattatttgtactggtgcgtcaagtggttctatctataattataatatttttgtcctattgat

SEQ ID NO: 6792 - DNA, 1420 bp, Zea Mays
ctgattccctggttgtgaagaactgtaacaatcaaacgattgttgagctgaagtagaaggaaaaatggcaagcgcaagaggaaacaataagggtggctcatataatgagtatgagcaacaaaagcttgaaaatattgaaaggaacaaaaggaggttagaagaattcaacatccctgcaatcatcaactctttggggcagcaacaaaatcgatctaggaaaacttcaaagaaagttcagaacagaaatattgtatcaactgaacgtccaaacttgcgaccaagactacaaagaaacaattgtcagtttgatgaagaacatgtgcttgctgatttggagccagtaggagatttccttagtaacaatgaagacctacagattggtgaccaaagcaatggtacagtgagaaagaaaggaaggggaataacgaagaaagatgacatattctcaaggacaccagatatgcctaaactcaaaatatctcttaatgattatggacagccaattggtgaaaacgctaggcaactttcaagtgttatcgggtgtcaagttagaaagaagatatcaattgcttgtgtagattggaggcttgttgatgttaaaaagaagtacgagctgtggactgaaataaagtcatactttgatattgatgacgctgccttaaattgggttacacgcactgctgggaggaaatggaaagaatttaaggcaaatatcaaggagctgtattttgatcctgagctgactatagatgatgttggggaatgtccagacaaaagaattagtgatgatgattggaaatttctctataactattggaagacttctgaatttcagactctctcgaaagtgggaaaagcaaaccggcaaaaactgcagctgcaccatactactggaagtgcgaaacttaaagatcttattgaaatctacccagagttgaaagagcggacaattcaggaaggtgatgcatatgctattctttgtggactgaaagagccaaaaggatatgtccgtcttatgggtctaggcccgactcctcaagatgttggtactccaggattaaagtgttatgcaccaacaagacttcaaatggaggttatggctcgaaagaaagctgaaagtgacagggatgctctagagcaacgtgtttttgagttgcaggctcaaatggagcaaagggcacaacaagatagggatgcaaggttgaatgaaactggtgatgctggactagatgaaggggaggaagattatgtttctgaagatgatgttgatgacaacttacatgaccaggtgcatggtttaacctcatcaagaacaacagcacacaaaaaagaaccgcaccaaggagtaatgaaacttctcgctctcaacatgatgctcttgttggaaaagatgtcatattatatgccttgttgagatcag

SEQ ID NO: 6793 - DNA, 2639 bp, Zea Mays
aaaaaatttagcagaaatttgagaattccatcgtaagcaagcaatcaaagccgagagtgacagacgcttgatcactctctgcaaacagtgctgaccgccaaggcaaccaacctttcctgcttcccagtcccagcccaactcttcgcaaatagccggagaatattagaccctcgctacacgacaaagcgcctgccggggtctgcgccccgcttgactccactagcgagatgcccatcgcctcgcctgtgcccgcgtgtacgacgacgatgcctccacgccacgctcaccgtcccggtgagctcacctcccctagttaatgcaccgctcttgcgagtcatggctccctctttgcttgcgtgtattccccgtcctttttagcggcttctccgactccttccgatcctctcgcctcgtctccgtcgtcagtcgcctagctagcttccctcacaagcagcaaggcgggagcgaacacgccggcgaccgttagctcgacgcctcgaccgacctccgcgccgtcgctccgcccttgcaaagccgcagccgcgcgcttttatgctcgcggcagctcggtttgtggtctctactagcggtatcctctcgccctcggacctttctgcgaaagcgaagattccggtatggaggtggaggcgacgcccacgacggccgtgtcatcttccggcgtggccgcgcagctgccgccgcccggcccgcccgccaagaaaaagcgtgccctccccggcatgccagatcctgacgcggaggtgatcgcgctgtcgcccaagacgctgctggcgacgaaccggttcgtgtgcgagatctgcaacaaggggttccagcgggaccagaacctgcagctccaccggcggggccacaacctgccgtggaagctgcggcagcggagcggcaaggaggtccggaagcgggtgtacgtgtgcccggagcccagctgcgtgcaccacgacccgtcgcgcgcgctcggcgacctcaccgggatcaagaagcacttctgccgcaagcacggcgagaagaagtggaagtgcgacaagtgctccaagaagtacgccgtgcagtcggactggaaggcgcacgtcaagacctgcggctcccgcgagtaccgctgcgattgcggcaccctcttctcccggagggacagcttcatcacccaccgcgccttctgtgacgcgcttgccgaagagagcgccaaggcgcgggcggaggcgccttccgcggaggatgggagctcggcagccgccgtggttccgccaccggcacccccgcctgcgccggcgccactgcgacagcaaccgcccccgcctgcgccgcatcatgcggagccacgtaatgagactgacacgaatgcgactgaggccgtccagttcgcgccgccgcctccgccaccgccgccgcctccgccaccgccgccgccgcagttacaggtaccggtgctttcgcaagcttcggtgagcgctgctgccaacgttggcgccagcagcagcagcagcagcgtcgcggggacgtcgcagagcctgctcggcggtatgttcgcgccgtcgtcgatggcgtcagcgccgcagtacgcggacctcggcggccggccggagcgcgcccatcccgccaagcccccgccgctgtgcctcgccacggacgcatcgtcgtcgatcttctcggcggcgccggcggtgaccgccgagcgccagcagttcgcgccgccgcctccgtccccgtccccgtccgcacacatgtcggccaccgcgctgctgcagaaggccgcgcagatgggcgccacctcgtcgagctcctcgttcctgcgcgggctgggcctggacgtctcctcgtcgtcgccgggcgcctcgtcgtcaggccagcagcaccagcaccaggaggccatgcgggtgtcactcccggacgcctcgctgcagcaatggccgccgcggctggagctggagccggcgccaatgctgtcggccgggctcggccttgggctgccgtacgactccaccggggctcaggtgagcctgccggagctcatgatgggccagtcgtctctgttcagcgggaagccggcgacgctggacttcctggggctcgggatgagcccgtcgggcgcgtcggcaggacgaggcctccccgcgttcgtccagcccatcggcggcatggccgggaccggggccggcgcagccgagacgttcggcgccgggcgtggcgcgcaggcaacgccgtgggagaggaatccgactcggtacgaagaaactcactcactctcctacaagaatgctgctttgcacttgcttcctcccgagtcccgtcgcttgccgttgtctcttcccgattgcttccttgcgcttgtcgtgctgccgccactgccgcggcatttaagcgcgcggcacagcggcaacgcaaaagtggaccgcgaaaataaatgggattggttgcagcctgggacgatttcgcagcaggtggctatgaacattcatcaggcttgttgcctcctgaatggttttcaagggtccgtgtcatcagctcagagcctcagagtggtggtacaagcgttccttcactattcctatcaatgccggctctgtggcgccaggttatctcctgtgttctttcttcccccggtggttggatccattgtttaa

SEQ ID NO: 6794 - DNA, 2405 bp, Zea Mays
tgatttctgaacatcaagagaatacagctctacaggcagtccatcagaaaataaatatgctttgtgtttctgtcattcacaagattggtactggcaaggtatgtattgtaggatttagttaaacagtgatccaaacagttgccgatagagacaaactctgatcaccacttgcccacaagcgaaataaaatctgcagtgtttgcagcatatatagtaagttaaaattgcagcaaaaaatgaaattaatttaacaaactcaaaatgtagcttctatcttcacattgtatgtagtaattgaacaccaagtggatttttgaactcaccaaggattcatgaccaatatattaatactgcagtataattgtttaaagaactgtgaaattaatacatatataaataataaccacatgaaggttttgcaagaatatcccttctaaatgtttataagattatataccagacaaatgacattttagcacaagggagtctggaaccctcttctcgagctgtcaatgcagcaaaacaagtaaaaatgtagcaactgaatgctatcgagtctggaaccctcttctcgagctgtcaatgcagcagaacaagtataattgtttagaagaagatcctgacatacctccaaaggtgtatgaggacattttccattcattctaataattcctggccttatttgttacacgtcctctcttagtaaatttccctctccatcctatttctctagttgtgggtcttcacaagggagtctggaaccctcttctcgagctgtcaatgcagcagaacaagtaaaatgtagtagaatgcaaaatcacaagagctaaatctagtccgggtaatcctaggaatgtacttgatagtgaagccatcatcctcgatgcgggtcttcacaagggagtctggaaccctcttcccgagctccttgagcacctcggcgagcggcttgccgatgctctcggtgagggcaacaacctcagcgaggtcataccaacagaccatagttactggggctggtgatgaaacgctccggttttggaacgtgttcccctctccaaagtcccaggtacagaaaatcaatatgaaaatatgacctcgctgtgcaaacacacaaatatttaattcttcataaggaaaacattatagcataaacctggtatatgatttgcatgcaccggctccaaaactcaacccttctcccattcactatttcttcataataggtgaccattatatatcactgcatcggcaacttaattacagtggtatttttttgaggaagaacagtaacaattagtgacttgaaatttgaaaacagcaagtgtgtgttttaaagaggaataagtgagacaacaatataaaatcgattataaggtagattcataaatatgcataaaaacataatacaaacttgtacatgtatgaatctaaacacattttagaaattccccatatatttacagtggttaaggatttgtatgagaaattctaaattatctttacagtattcgtaacctgaatagaaggtacatagaagaaaaaaatatgtcgattaaggaaggatatgctgatcataactattttaataaacgtattcacattacataaagtaagtggttatatcattgtgaactgaacaggtatgcatagccagcaaattcaatgggatatgagtgtcagtttttccttaattgggaaggcagtgtacctgttgtgaatagactttgcaggttttccaaatcagctatcgttcctagacattacactatcattcgtggatagcacctgagtagggttgtatccctcaaagaaagaattggtccattttaggtttttatattgtccatcttcagtaggaatcaatataaagcagaggaatcaagtgatgttaacaatcagtcgatcaccatccccgtggtcagtaggaatcaagtgagcatccaaccaagcgcgcaaagcagagggaagagagcgagggcatggcatcacagacgtctttggtagtgaatgctagagtcagtgaagtagatgttgccctcgtcgtcgaggtcgaggtcgaggtcgttggtgaagttgaagcgcacgccctcggcctccgttgcgagcagcgtggccagcccggcctcgcggcggactttgagcaagccgaagtaggcgtcggcgatgtacaggtccccagtcttatcgaaacagagcccgagcgggcggttgcagatatgctcgctgggagatactccagcggcgaggccttcggccctccgtggagctcctgcgtccagcacgggaaggccatcgcgaatgggacccaccgctcgccgtcccagaagacgacccggccgtcggcgacgcccgtgtatggccctgctggtcgaaggtgatgctctcgggcccctgcacctcgc

SEQ ID NO: 6795 - DNA, 1871 bp, Zea Mays
cgacatcagcattctttcaaacgaagaccggccggccataagtgtgtgagaagagacagtggcactggacacagcaagtagtgtcgaacgagagccacatcccgctctccacccgggcgcgcgtgtcctccgtttcgccatgtccaactccaagcagcacgacgccgccgacgacggcggcatcccagcccccgaggcgccggcaaagcgcccaccgcttaacaaatgtgtcggtgatgagcggagcgcagctattcatgaagcaggacctcaagatcacggacacgcagatcgagatcctcgccggcatcatcaatatctactcgctcgtcggctcgctcgcggcgggccggacgtccgactggctcggccggcggtacaccatggtgctcgcggcggccatcttcttcgcgggcgcgctcatcatgggcctcgccccgagctacacgatcctcatgcttggccgcttcgtggcgggcgtcggcgtcggatacgcgctcatgatcgcacccgtgtacacggccgaggtctcgcccacgtcggcgcgcggcctgctcacgtccttcccggaggtgttcatcaacacgggggtgctcctcgggtatgtctccaactacgccttccacggcctccccgtgcacctcagctggcgcgtcatgttcctcgtcggcgccgtcccgcctatcttcctcgcactgggggtcctcgccatgccggagtcgccgcggtggctcgtcatgcaggggcgcatcggcgacgcgcgccgcgtgctggccaagacctccaactcccccgccgaggccgaggagcggctcgccgacatcaagaatgccatcggcatcccagacggcgtcggcgacaacgacgacgacgtggtggtggtcgcccgcaggaacaagggcagccatggcgaaggggtgtggagggacctcctcatccgcccgacgccgcccgtccgccgcatactcatcgcctgcctcggcctccagttcttccagcaggcctccggcatcgactccgtggtgctgtacagcccgcgggtgttcgagaaggctgggcttaggtcgaacaacaactctttgggcgccaccatggcggtgggcgcgaccaagacgctgttcatcctggtggccacgttcttcctcgaccgcgtcgggcggagaccgctgctgctcacaagcgcgggcgggatggtggtgtcgctggtgacgctggcctcggcgttgcgcgccatcgaccggctcccagagggacaggcgacgtcgctggcgggcgtgagcatcgcggcggttctcacgttcgtggcgtccttctccatcggcatgggcccgatcgcgtgggtgtacagctcagagatattcccactgcggctccgcgcgcagggctgcgcactcggcacggcgatgaaccgggtcatgagcggcaccatcaccatgtccttcatctcgctctacaaggccatcaccttcgccgggagcttctacttgtatgcaggcattgctgctgccgggtggctgttcatgttcttcttcctgccggagacgaggggcagcaacctagaggacaccgagaagctcttcggcggtggcgaccacgacgaggacaaggaagatggacacgatgcgcagaagtccactgagttgagtagtagccaacagtgacctgatctgtatctgatagtatgtacgctagtaaaaaacacagactgttttttttttacttagattactgcacctttaaagcacgagtttctttgtgtgttgccccgcgcccatccgtctaccgcgcgcagcgccagcgaattcccccggcccggctcggtttgagacgatcagctattcagcactacggcacacatccttttgtgttag

SEQ ID NO: 6796 - DNA, 1733 bp, Zea Mays
ctcgcctagcgcgcgtgcaagcatgcacacatctcggtgatgagcggcgcgcagctgttcatgaaggaggacctcaagatcacggacacgcagatcgagatcctcgccggcgtcatcaacatctactcgctgttcggctccctcgccgccggcctcacctccgactggctcggccgccgctacaccatggtgctcgcggccgccatcttcttcacgggcgcgctcctcatgggcttcgccccgggctacgggttcctcatggtgggccgcttcgtggccggcatcggcgtcggcttcgcgctcatgatcgcccccgtctacaccgccgaggtggcgcccacctcggcgcgcggcttcctcacctccttcccggaggtgttcaacaacttcggcatcctcctcgggtacgtctccaacttcgccttcgcgcgcctccccgtccacctcagctggcgcgccatgttcctggtcggcgccgtgccgcccgtcttcctgggcgtcgccgtcctcgccatgccggagtcgccccgctggctcgtcatgcggggccgaatcgacgacgcgcgccgcgtgctgcagaagacctccgactcccccgccgaggccgaggagcgcctgctcgacatcaagaaggtggttggcatccccgagggcgtgtccgacgccgacgacgtggccgccatagtccgcgccagcggcaagggctcgtcgtcgtcgcgccacgacggggtgtggaaggagcttctcatcaacccttcccgccccgtgcgccgcatgctcatggcggggctcgggctcatgttcatccagcaggccacgggcgtggactgcgtggtcatgtacagcccgcgggtgttcgagcgggcgggcatcaagtccaagaccaactcgctgggcgcgtccatggcggtgggcgcgtgcaagaccttcttcatacccatctcgacgctgctcctggaccgcatcggccggcggccactgctgctggcgagcggcggcgggatggccatcttcctcttcacgctggccacgtccctgcacatgatggaccggcgccccgagggggaggccaccgcgctgggcgcggtcagcatcgcggccatgctgtcgttcgtggcgtcgttcgcgtccgggctgggccccgtcgcctgggtctactgctccgagatctacccgctgcggctgcgcgcgcaggccgccgccatcggcacggggctgaaccggatcatgagcggcgccaccaccatgtccttcctctcgctctccaacaccatcaccatctccggcagcttctacctctacgcctgcatcgccgccgcagggtgggtgttcatgtacttcttcctgccggagacgatgggcaagagcctggaggacaccgtgaagctcttcggcaaggacgcggacgacgaggacgtcagcgacatccgtcgtcacgtgcccactaagaagccgtctactgagctgagtgctcagcactgatcgagtaatgtgctacgcaacacgtgtcctcccgagtgtggccgaagcttatgttccgtaaagcttcgatgatgtagtataatatttttttttgtgtgtcggaactgtggtgaatctatgtatatcccgcgcctcttttgtttattagatttgtacattttttgttgatctcgtggcatggtgcgtgtgcgtagaaaaaatattattaaaaatatctatctctgcctcgtgtggcctacatgttatatttt

SEQ ID NO: 6797 - DNA, 2248 bp, Zea Mays
acctcctactcccgtaggccgcagcgtgcatcgcggctcccgctcccacactcgcctccctcatcagtggcagctagtagcggcagcacccgcagctcgcaggagagagagagagagagagagagagagagagcagccatgaaccacggaggcggagccgacaacggtgtgagccccggcaacgtcccggtgtgctactacggcgcggcggggcgcgtgccggcggcgctggagcggcgggtgcgcgccgcggagctgttcatgcggtgcgcggcgtgcgggctcgcggtgctcgccgcggcgctgctgggcgccgaccgccagacccgcaccttcttctccgtggagaaggcggcccggttcaccgacatgcagtcgctcgtattcctggtgatagcaaacgggatggcagcgtgctacagcctgctgcagggcgggaggtgcctggtgagcatcctcacaggtggtggcgtactaatcaacaggcccatggcatgggccatcttctcctgcgatcaggcaagtatttctataataataataattgtcgctgtcagcctttatgctttttcttggtcgctgtctctatgttcttgcatgcatgtgtgtttatttgtcattgtcgagtggttggttaattgttctgctatcgcttcttctaataagtttcggggccgggggtcaacacagccagacgcgaaaaatacctgcgatcaaaacaaacggtgctggacagctctgacgttcaaacagtaatgttcaatgcatattattgtcatagcaggatggaaacaggagatatgagagacttcagtttaggagtaggaacttggacgtgtcaattgtcgatatataggaacaccactttgctagctttgctatgtgcataccgtcaacactgacgttcttttagagacgagatgttgacctacaaagacaggggggaagaagttggcattaattgacaccttgatatgcattcatagcctacaggacacctcgtgctgcttgatgaaattgttgattatgatatctaattcatgtcacatccttccttgcggttagctttttttttaaaaatttgagaaatccctgtgataaaaataaacgaccagataggtgcccaaacccaaatatagagccaactgccaaacaatacaaatgaaccgcatatccgggcctcaggatagtaacggtggtagtaatttgtggtcatatacatgtgctgctgctagctagcaataggacacataagatcgctatgttccatggctagcaaatggtcgggaacactgtcaatgtacatcaacatgtgtaggagttgagtatttgctgcctgaatgcagcagccgacagtcacagtgtgcagtacaatcaagaacagcagtagcagtaggtgagattcagatgaggcaccacacgcattgtgttatgccaagatctagattgttctaaattcctgtcttctacactgatgacatgattagtcttgtgtcgaaacaattgttcttgccacaaacggtacttttgtccaagtagtgtaactctacgtactacgttctgtgaacaacctggtgggtcgtttatttgcattgcatgcatatgcaggtgatggcgtacttcacgatctcggcggtggccgtggcgatggaggcggcgatgatcggcaagtacgggtcgcagcagttccagtggatgaagacgtgccacctctacaagcgtttctgcgcgcaggcgggtggcgccgtggcctgcgcggtggcggccagcctgaacatggtcggcgtctcgctcgtctcggcgttcaacctcttccggctgtacggcagcggcaaagggaggaagtgatctcggtcggcctgctgccactaggaacacagggccggcagcgccgcctgttctcttaggttttaacacccagtatggaaccatagcgccatggatggatggatggtctcttcttctccggtttgagtttttctggtgttgggtaggcatacctgtcgtctgtcagcgtagacataaaaaaaaaggtctctgggacgctcgcccatgtatgtatgtatatgatgtgaagtgatccaaggtggttcgcgtgctatggcaataaacgtgtgggaaagcgatgtatcgtcgatgactgtcgccgcctgcagggatggcaggggaatttactctctgggttattatacaatgcggtagctggctttgctgatgctgtgccaactgccatcatttactcctgact

SEQ ID NO: 6798 - DNA, 2728 bp, Zea Mays
cttcttgcatatgcataaatgggcagtccctggccagcttcatcacgacgcagcgaagcaggcctccttcttcacaagcgcttctgctaacaggtatttctgaaaccagccgtcgtacgtccatcccaccgggagcaccggcgacgatgccgccgcgaacggtgtccgatgggggagacgacaacggcaccgacgttgctagccgaacgtcgtcgcaccgccgcacggagcacgggcatgggtacaaagtcggcgtcccaccggagaagaacctcctcgccgagatctctgacgcggtgaaggagacgttcttcgccgacgacccgctgcggcagtacaaggaccagcccaggtccaagaagatctggctcggcctgcagcacatcttcccggtgctcgactggagcaggcattactccctcggcaagttcaagggtgacttcatcgctgggctcaccattgccagcctctgcataccccaggacatcgggtattctaagcttgctaacttgccagcagaggtgggactatacagtagcttcgtgccgcctctgatatacgcagtgatgggcagctccagggacatagccatcggcccagtggccgtggtgtcgctgctgctcggtactctccttcagaatgagatcgaccccaagacacacccgctcgagtacaggcgcctagccttcacagcaacctttttcgcaggggtcactcaggcagcgctcggattcttcaggctagggtttatcatagagttcttgtctcatgctgccattgtcggattcatggccggcgctgccatcaccattgcgcttcagcagctgaaaggattccttggaattgcaaacttcaccaagaaatccgatattgtatctgttatgaaatcagtttggggaaatgttcaccatgggtggaattggcagacaatactgataggagcgaccttcctggcattccttctggttgccaagtacattgggaaaaggaataaaaagctcttctgggtgtccgcaatcgcacctctcacttcggtgatcatatccacattttttgtgtacatcactcgtgcagataagcatggcgttgcaattgtcaagaacataaggaaaggcatcaacccaccttcagctagtctaatatacttcaccggcccatacttggcgacaggattcaaaattgggatagtagctggaatgataggcctaacggaagcgattgcaattggaagaacatttgcagccctcaaggattaccagatagatgggaacaaagaaatgatggctctagggaccatgaacattgttggttcactgacttcttgctacgtagccacaggttctttctcgcggtcagcagttaattacatggctggctgcaaaacagcagtgtcaaacgttgttatgtcaattgtcgtaatgcttactttgctactgatcaccccattgttcaagtacactccaaatgccatcctttcctcgatcatcatatcagcagtgcttggtttaattgactatgaatcggcttaccttatctggaaagttgacaaactggactttctagcatgcatgggagcattttttggagtcatattttcatcggtggagtatggcttgctcattgcggttgcaatatctcttgctaaaattcttctccaagtaacacggccaagaacagttttacttggaaaccttccacgaacaactatatacaggaatgtagaacagtatcctgatgctaccaaggttccaggggtgctgattgttagagtggactcagctatatacttcacaaactctaactatgttaaagagagaatcctgaggtggctaagagatgaggaggagcaacaacaggaccagaagttaacaaaaactgagtttctaattgttgacctgtctcctgtaattgatatcgacacaagtggaatccatgctttggaggagttggcgaaagctcttgaaaaacgcaaaattcagctggttcttaccaatcccgggccggcggtgatccagaagctccgctcagcgaaattcacggacatgattggtgaagacaagatattcctcacggtcggcgacgctgtgaagaaatttgctcctaagatggtcgataatgtctgatggagtttctgggtcatgtacagtacgagcaagaagtctatctattatgtggcaaagttcagtggcaattatggatttatagagcagaaacagaacagaacgggagtaaataacatggttcgcggaatggtaaataaagaagatgctccggagttggagtgcatcacgtttgcgaggtgtggttggatagaaaacagttggtggcctagttgggcgtctatgtcagtccttgtggttgtggagtctgttccgcgttggcaagcactcagtgatggagatcaaatgcttcatggatcagcagatatgggtgcctgatgattaacatatcatcattgatcgtgaaagaagagttacctcgttggggtttcaggctttgtgtatatcttacagtacttagctcctttccttgtagtttaagttgttatgatgagcttttacatttggcttatatatgtatattctgtaacgttgatgcattgttaagtgttcctgaccccaaaaaaagggggtgcaaaaacgtgattgtgaagtgtgaggaatttgcttttatcgttcctactggcatgcatgtgcaagatgtattgggcactcatatctgctgatcc

SEQ ID NO: 6799 - DNA, 2656 bp, Zea Mays
acagtacaccacgagttgcaggtatttctgaaaccagccgtcgtacgtccatcccaccgggagcaccggcgacgatgccgccgcgaacggtgtccgatgggggagacgacaacggcaccgacgttgctagccgaacgtcgtcgcaccgccgcacggagcacgggcatgggtacaaagtcggcgtcccaccggagaagaacctcctcgccgagatctctgacgcggtgaaggagacgttcttcgccgacgacccgctgcggcagtacaaggaccagcccaggtccaagaagatctggctcggcctgcagcacatcttcccggtgctcgactggagcaggcattactccctcggcaagttcaagggtgacttcatcgctgggctcaccattgccagcctctgcataccccaggacatcgggtattctaagcttgctaacttgccagcagaggtgggactatacagtagcttcgtgccgcctctgatatacgcagtgatgggcagctccagggacatagccatcggcccagtggccgtggtgtcgctgctgctcggtactctccttcagaatgagatcgaccccaagacacacccgctcgagtacaggcgcctagccttcacagcaacctttttcgcaggggtcactcaggcagcgctcggattcttcaggctagggtttatcatagagttcttgtctcatgctgccattgtcggattcatggccggcgctgccatcaccattgcgcttcagcagctgaaaggattccttggaattgcaaacttcaccaagaaatccgatattgtatctgttatgaaatcagtttggggaaatgttcaccatgggtggaattggcagacaatactgataggagcgaccttcctggcattccttctggttgccaagtacattgggaaaaggaataaaaagctcttctgggtgtccgcaatcgcacctctcacttcggtgatcatatccacattttttgtgtacatcactcgtgcagataagcatggcgttgcaattgtcaagaacataaggaaaggcatcaacccaccttcagctagtctaatatacttcaccggcccatacttggcgacaggattcaaaattgggatagtagctggaatgataggcctaacggaagcgattgcaattggaagaacatttgcagccctcaaggattaccagatagatgggaacaaagaaatgatggctctagggaccatgaacattgttggttcactgacttcttgctacgtagccacaggttctttctcgcggtcagcagttaattacatggctggctgcaaaacagcagtgtcaaacgttgttatgtcaattgtcgtaatgcttactttgctactgatcaccccattgttcaagtacactccaaatgccatcctttcctcgatcatcatatcagcagtgcttggtttaattgactatgaatcggcttaccttatctggaaagttgacaaactggactttctagcatgcatgggagcattttttggagtcatattttcatcggtggagtatggcttgctcattgcggttgcaatatctcttgctaaaattcttctccaagtaacacggccaagaacagttttacttggaaaccttccacgaacaactatatacaggaatgtagaacagtatcctgatgctaccaaggttccaggggtgctgattgttagagtggactcagctatatacttcacaaactctaactatgttaaagagagaatcctgaggtggctaagagatgaggaggagcaacaacaggaccagaagttaacaaaaactgagtttctaattgttgacctgtctcctgtaattgatatcgacacaagtggaatccatgctttggaggagttggcgaaagctcttgaaaaacgcaaaattcagctggttcttaccaatcccgggccggcggtgatccagaagctccgctcagcgaaattcacggacatgattggtgaagacaagatattcctcacggtcggcgacgctgtgaagaaatttgctcctaagatggtcgataatgtctgatggagtttctgggtcatgtacagtacgagcaagaagtctatctattatgtggcaaagttcagtggcaattatggatttatagagcagaaacagaacagaacgggagtaaataacatggttcgcggaatggtaaataaagaagatgctccggagttggagtgcatcacgtttgcgaggtgtggttggatagaaaacagttggtggcctagttgggcgtctatgtcagtccttgtggttgtggagtctgttccgcgttggcaagcactcagtgatggagatcaaatgcttcatggatcagcagatatgggtgcctgatgattaacatatcatcattgatcgtgaaagaagagttacctcgttggggtttcaggctttgtgtatatcttacagtacttagctcctttccttgtagtttaagttgttatgatgagcttttacatttggcttatatatgtatattctgtaacgttgatgcattgttaagtgttcctgaccccaaaaaaagggggtgcaaaaacgtgattgtgaagtgtgaggaatttgcttttatcgttcctactggcatgcatgtgcaagatgtattgggcactcatatctgctgatcc

SEQ ID NO: 6800 - DNA, 2680 bp, Zea Mays
aaaaaggcagggaggaaaaggtctcgaggtcgaccaggcgaccaagtgccggagtttcgcaccgtcgtacgtccatcccaccgggagcaccggcgacgatgccgccgcgaacggtgtccgatgggggagacgacaacggcaccgacgttgctagccgaacgtcgtcgcaccgccgcacggagcacgggcatgggtacaaagtcggcgtcccaccggagaagaacctcctcgccgagatctctgacgcggtgaaggagacgttcttcgccgacgacccgctgcggcagtacaaggaccagcccaggtccaagaagatctggctcggcctgcagcacatcttcccggtgctcgactggagcaggcattactccctcggcaagttcaagggtgacttcatcgctgggctcaccattgccagcctctgcataccccaggacatcgggtattctaagcttgctaacttgccagcagaggtgggactatacagtagcttcgtgccgcctctgatatacgcagtgatgggcagctccagggacatagccatcggcccagtggccgtggtgtcgctgctgctcggtactctccttcagaatgagatcgaccccaagacacacccgctcgagtacaggcgcctagccttcacagcaacctttttcgcaggggtcactcaggcagcgctcggattcttcaggctagggtttatcatagagttcttgtctcatgctgccattgtcggattcatggccggcgctgccatcaccattgcgcttcagcagctgaaaggattccttggaattgcaaacttcaccaagaaatccgatattgtatctgttatgaaatcagtttggggaaatgttcaccatgggtggaattggcagacaatactgataggagcgaccttcctggcattccttctggttgccaagtacattgggaaaaggaataaaaagctcttctgggtgtccgcaatcgcacctctcacttcggtgatcatatccacattttttgtgtacatcactcgtgcagataagcatggcgttgcaattgtcaagaacataaggaaaggcatcaacccaccttcagctagtctaatatacttcaccggcccatacttggcgacaggattcaaaattgggatagtagctggaatgataggcctaacggaagcgattgcaattggaagaacatttgcagccctcaaggattaccagatagatgggaacaaagaaatgatggctctagggaccatgaacattgttggttcactgacttcttgctacgtagccacaggttctttctcgcggtcagcagttaattacatggctggctgcaaaacagcagtgtcaaacgttgttatgtcaattgtcgtaatgcttactttgctactgatcaccccattgttcaagtacactccaaatgccatcctttcctcgatcatcatatcagcagtgcttggtttaattgactatgaatcggcttaccttatctggaaagttgacaaactggactttctagcatgcatgggagcattttttggagtcatattttcatcggtggagtatggcttgctcattgcggttgcaatatctcttgctaaaattcttctccaagtaacacggccaagaacagttttacttggaaaccttccacgaacaactatatacaggaatgtagaacagtatcctgatgctaccaaggttccaggggtgctgattgttagagtggactcagctatatacttcacaaactctaactatgttaaagagagaatcctgaggtggctaagagatgaggaggagcaacaacaggaccagaagttaacaaaaactgagtttctaattgttgacctgtctcctgtaattgatatcgacacaagtggaatccatgctttggaggagttggcgaaagctcttgaaaaacgcaaaattcagctggttcttaccaatcccgggccggcggtgatccagaagctccgctcagcgaaattcacggacatgattggtgaagacaagatattcctcacggtcggcgacgctgtgaagaaatttgctcctaagatggtcgataatgtctgatggagtttctgggtcatgtacagtacgagcaagaagtctatctattatgtggcaaagttcagtggcaattatggatttatagagcagaaacagaacagaacgggagtaaataacatggttcgcggaatggtaaataaagaagatgctccggagttggagtgcatcacgtttgcgaggtgtggttggatagaaaacagttggtggcctagttgggcgtctatgtcagtccttgtggttgtggagtctgttccgcgttggcaagcactcagtgatggagatcaaatgcttcatggatcagcagatatgggtgcctgatgattaacatatcatcattgatcgtgaaagaagagttacctcgttggggtttcaggctttgtgtatatcttacagtacttagctcctttccttgtagtttaagttgttatgatgagcttttacatttggcttatatatgtatattctgtaacgttgatgcattgttaagtgttcctgaccccaaaaaaagggggtgcaaaaacgtgattgtgaagtgtgaggaatttgcttttatcgttcctactggcatgcatgtgcaagatgtattgggcactcatatctgctgatcc

SEQ ID NO: 6801 - DNA, 2877 bp, Zea Mays
gggaactccaaaggggaaaaaggcagggaggaaaaggtctcgaggtcgaccaggcgaccaagtgccggagtttcgcattggcccctattgaaaatagaggtttgaccttcatctctggctggagagccttcttgcatatgcataaatgggcagtccctggccagcttcatcacgacgcagcgaagcaggcctccttcttcacaagcgcttctgctaacaggcatcgtcgcatctctgtataggtatttctgaaaccagccgtcgtacgtccatcccaccgggagcaccggcgacgatgccgccgcgaacggtgtccgatgggggagacgacaacggcaccgacgttgctagccgaacgtcgtcgcaccgccgcacggagcacgggcatgggtacaaagtcggcgtcccaccggagaagaacctcctcgccgagatctctgacgcggtgaaggagacgttcttcgccgacgacccgctgcggcagtacaaggaccagcccaggtccaagaagatctggctcggcctgcagcacatcttcccggtgctcgactggagcaggcattactccctcggcaagttcaagggtgacttcatcgctgggctcaccattgccagcctctgcataccccaggacatcgggtattctaagcttgctaacttgccagcagaggtgggactatacagtagcttcgtgccgcctctgatatacgcagtgatgggcagctccagggacatagccatcggcccagtggccgtggtgtcgctgctgctcggtactctccttcagaatgagatcgaccccaagacacacccgctcgagtacaggcgcctagccttcacagcaacctttttcgcaggggtcactcaggcagcgctcggattcttcaggctagggtttatcatagagttcttgtctcatgctgccattgtcggattcatggccggcgctgccatcaccattgcgcttcagcagctgaaaggattccttggaattgcaaacttcaccaagaaatccgatattgtatctgttatgaaatcagtttggggaaatgttcaccatgggtggaattggcagacaatactgataggagcgaccttcctggcattccttctggttgccaagtacattgggaaaaggaataaaaagctcttctgggtgtccgcaatcgcacctctcacttcggtgatcatatccacattttttgtgtacatcactcgtgcagataagcatggcgttgcaattgtcaagaacataaggaaaggcatcaacccaccttcagctagtctaatatacttcaccggcccatacttggcgacaggattcaaaattgggatagtagctggaatgataggcctaacggaagcgattgcaattggaagaacatttgcagccctcaaggattaccagatagatgggaacaaagaaatgatggctctagggaccatgaacattgttggttcactgacttcttgctacgtagccacaggttctttctcgcggtcagcagttaattacatggctggctgcaaaacagcagtgtcaaacgttgttatgtcaattgtcgtaatgcttactttgctactgatcaccccattgttcaagtacactccaaatgccatcctttcctcgatcatcatatcagcagtgcttggtttaattgactatgaatcggcttaccttatctggaaagttgacaaactggactttctagcatgcatgggagcattttttggagtcatattttcatcggtggagtatggcttgctcattgcggttgcaatatctcttgctaaaattcttctccaagtaacacggccaagaacagttttacttggaaaccttccacgaacaactatatacaggaatgtagaacagtatcctgatgctaccaaggttccaggggtgctgattgttagagtggactcagctatatacttcacaaactctaactatgttaaagagagaatcctgaggtggctaagagatgaggaggagcaacaacaggaccagaagttaacaaaaactgagtttctaattgttgacctgtctcctgtaattgatatcgacacaagtggaatccatgctttggaggagttggcgaaagctcttgaaaaacgcaaaattcagctggttcttaccaatcccgggccggcggtgatccagaagctccgctcagcgaaattcacggacatgattggtgaagacaagatattcctcacggtcggcgacgctgtgaagaaatttgctcctaagatggtcgataatgtctgatggagtttctgggtcatgtacagtacgagcaagaagtctatctattatgtggcaaagttcagtggcaattatggatttatagagcagaaacagaacagaacgggagtaaataacatggttcgcggaatggtaaataaagaagatgctccggagttggagtgcatcacgtttgcgaggtgtggttggatagaaaacagttggtggcctagttgggcgtctatgtcagtccttgtggttgtggagtctgttccgcgttggcaagcactcagtgatggagatcaaatgcttcatggatcagcagatatgggtgcctgatgattaacatatcatcattgatcgtgaaagaagagttacctcgttggggtttcaggctttgtgtatatcttacagtacttagctcctttccttgtagtttaagttgttatgatgagcttttacatttggcttatatatgtatattctgtaacgttgatgcattgttaagtgttcctgaccccaaaaaaagggggtgcaaaaacgtgattgtgaagtgtgaggaatttgcttttatcgttcctactggcatgcatgtgcaagatgtattgggcactcatatctgctgatcc

SEQ ID NO: 6802 - DNA, 2885 bp, Zea Mays
attcattgaacctggacagatttgacctctatttaatactccaaaaaaaacagcggaagtttcatcactgagcccgagctgcacccctgacccacaactgcgtccacattccaaacaatcctctgccatccaatctgaaagataaaagcaggagtatcccgtttgtggggcccgggaactccaaaggggaaaaaggcagggaggaaaaggtctcgaggtcgaccaggcgaccaagtgccggagtttcgcagtatttctgaaaccagccgtcgtacgtccatcccaccgggagcaccggcgacgatgccgccgcgaacggtgtccgatgggggagacgacaacggcaccgacgttgctagccgaacgtcgtcgcaccgccgcacggagcacgggcatgggtacaaagtcggcgtcccaccggagaagaacctcctcgccgagatctctgacgcggtgaaggagacgttcttcgccgacgacccgctgcggcagtacaaggaccagcccaggtccaagaagatctggctcggcctgcagcacatcttcccggtgctcgactggagcaggcattactccctcggcaagttcaagggtgacttcatcgctgggctcaccattgccagcctctgcataccccaggacatcgggtattctaagcttgctaacttgccagcagaggtgggactatacagtagcttcgtgccgcctctgatatacgcagtgatgggcagctccagggacatagccatcggcccagtggccgtggtgtcgctgctgctcggtactctccttcagaatgagatcgaccccaagacacacccgctcgagtacaggcgcctagccttcacagcaacctttttcgcaggggtcactcaggcagcgctcggattcttcaggctagggtttatcatagagttcttgtctcatgctgccattgtcggattcatggccggcgctgccatcaccattgcgcttcagcagctgaaaggattccttggaattgcaaacttcaccaagaaatccgatattgtatctgttatgaaatcagtttggggaaatgttcaccatgggtggaattggcagacaatactgataggagcgaccttcctggcattccttctggttgccaagtacattgggaaaaggaataaaaagctcttctgggtgtccgcaatcgcacctctcacttcggtgatcatatccacattttttgtgtacatcactcgtgcagataagcatggcgttgcaattgtcaagaacataaggaaaggcatcaacccaccttcagctagtctaatatacttcaccggcccatacttggcgacaggattcaaaattgggatagtagctggaatgataggcctaacggaagcgattgcaattggaagaacatttgcagccctcaaggattaccagatagatgggaacaaagaaatgatggctctagggaccatgaacattgttggttcactgacttcttgctacgtagccacaggttctttctcgcggtcagcagttaattacatggctggctgcaaaacagcagtgtcaaacgttgttatgtcaattgtcgtaatgcttactttgctactgatcaccccattgttcaagtacactccaaatgccatcctttcctcgatcatcatatcagcagtgcttggtttaattgactatgaatcggcttaccttatctggaaagttgacaaactggactttctagcatgcatgggagcattttttggagtcatattttcatcggtggagtatggcttgctcattgcggttgcaatatctcttgctaaaattcttctccaagtaacacggccaagaacagttttacttggaaaccttccacgaacaactatatacaggaatgtagaacagtatcctgatgctaccaaggttccaggggtgctgattgttagagtggactcagctatatacttcacaaactctaactatgttaaagagagaatcctgaggtggctaagagatgaggaggagcaacaacaggaccagaagttaacaaaaactgagtttctaattgttgacctgtctcctgtaattgatatcgacacaagtggaatccatgctttggaggagttggcgaaagctcttgaaaaacgcaaaattcagctggttcttaccaatcccgggccggcggtgatccagaagctccgctcagcgaaattcacggacatgattggtgaagacaagatattcctcacggtcggcgacgctgtgaagaaatttgctcctaagatggtcgataatgtctgatggagtttctgggtcatgtacagtacgagcaagaagtctatctattatgtggcaaagttcagtggcaattatggatttatagagcagaaacagaacagaacgggagtaaataacatggttcgcggaatggtaaataaagaagatgctccggagttggagtgcatcacgtttgcgaggtgtggttggatagaaaacagttggtggcctagttgggcgtctatgtcagtccttgtggttgtggagtctgttccgcgttggcaagcactcagtgatggagatcaaatgcttcatggatcagcagatatgggtgcctgatgattaacatatcatcattgatcgtgaaagaagagttacctcgttggggtttcaggctttgtgtatatcttacagtacttagctcctttccttgtagtttaagttgttatgatgagcttttacatttggcttatatatgtatattctgtaacgttgatgcattgttaagtgttcctgaccccaaaaaaagggggtgcaaaaacgtgattgtgaagtgtgaggaatttgcttttatcgttcctactggcatgcatgtgcaagatgtattgggcactcatatctgctgatcc

SEQ ID NO: 6803 - DNA, 1684 bp, Zea Mays
ctttctcactccgacacttgaaacacgttcatcaggagctcgtcctcaggcttgctagtagcttatattacctacctagctagctagctagtcaagactcaagatccatccatgcctgcaaacatgatctccaagatccttgagaagtcgtctgtccttccgctggtggacgatgttattgcacccatccatgtgaagaccgctggaggagctcctcggaccagtgtgctgcgcaatccgaacatggagaagcttcagaagggctacctgttcccggagattagcatcaagcgtgaagctcacctgaagaagtaccctgatgccaaggtcatcagcctgggcatcggcgacacaaccgaacccattccaagcgtcgtaacgtcagctatggccgagaatctgcgcaaggtcatagctgaggaagtgtacccagacatggggattcaagagtccgaggtgttcatctcggacggagcgcagtgtgacatcgctcgcctccagacgctgttcgggcccaacgtgaccatagccgtccaagatcccaccttcccgggctacgtggacaacggcgtgatcgtggggcagaccggcagcgcggacgaggccggcaagtacgccggcatcgcgtacatgcggtgcgcgccggagaaccacttcttcccggacctctcccgcgtgccgcgcaccgacgtcatcttcttctgctcgcccaacaaccccacggggcacgcggcgtcggcggcgcagctgcgcgagctggtggacttcgcgcgccgcaacggctccatcatcgtgttcgacacggcgtacgcgtggtacgtgtcgtcgtcgtcggaggccgctggcgacggggacaagacgaagccgcggtccatctacgaggtgcccggcgcccgggaggtggccatcgagatctcctccttctccaagttcgccggcttcacgggcgtccgcctcggctgggcggtggtgcccgacgagctgcgctacgcggacggctcccccgtcgcgcgcgacttcgaccgcatcgtctgcacctgcttcaacggcgcctccagcgtcgcgcaggccggcggcctcgcctgcctctccacggaggaaggccgggacgccgtgcgccgcgtcgtgggcgtctacaaggagaacgcgcgggtgcttgtggacaccttcgcgtcgctcggcaaggaggtgtacggtggcaccgactcgccctacgtctgggtgcgcttcccgggccgccgctcctgggacgtgttcgccgagatactcgacaagacgcacgtcatcaccgtgccgggcagcggcttcggccccggcggcgagggcttcatccgtgtcagcgcgttcaacagcagggacagggtgctggaggccgcagctaggctcaagaagttccttcctggactcagcgctgttccgctctaagctccacgtacagatcctgcacctgcatggctgatgatatacctgccccgtactgataatctacatcgataataacattgtgcctcgtactgataatgtacattggtacatggctaataataacattgccatgcgctgagacgcagccatagtatcggatcatccatttctccattttattggggggtggggggggtgtgaatgagcaagtgtacaaggattcttttcgaacgatgcgtacaacgtcagaactcagaac

SEQ ID NO: 6804 - DNA, 2211 bp, Zea Mays
cgcaacgtcagtacattaaagaatataatgagaaacattggttccaccatacaagattctatcatttcactaaggatacggcaactcactttagccgaggagaaattaacttgtattaggtgctgtttggttcagaaaatgtgacataaacgtcattgtaacaaagtaacgggatggtttccactcagtaacgtaaatgggtaacaaaaactgagtaacaaagcccacaagctctgcagtctgcagcaagatgtcagacgtagcacaatggcgaccatggtggcagccagtggcaccttggtcgatggcagcggccaagacaaacagaacgccataggagtatgtggagctatgctgctatccatggctgaaaggatgtggagacggagaagacgatgacgggattgtaacgctttacgcttcacgttcgtggggcagcggtaacaagttcccacaggctggcatcggatctcacatctcagtgtgatcagattactgctgatctgaaacaaacagaatctagcaatatctgttacccctgtaatcaaatggcattacaaatttatgaaccaaacactattgtagagtattaacaattcgaagcggatatcatcagaggagatcttagtttgaaagattggcagccttaccatgacagaccaggtgtctcataatgactgggagcagatggcagaatggcagtcgacacaatactaggcgggtatacatttttattttgataggaggatgtacatttgttgttttctacatagtcattcgttgtaaactccaagcacctgaaaatgacagttctgaatggacagggcctgataatggctataccaggagaggatatacatttgctttttgactcattccttgccaactacaaaaccgaatcaacaagttcaagatcctccttcctgcaaaagagcacagctgtttatttcagatgcagcaaactctgtctacagaaaaaaaaaattgcaaactgatggtcaaattactgaagaatggaaatagaggtcagcatttaagaatggagcgccaacttctgctctgcacccgctgcaatgtacataaaaaaaactcttggggaaagatagaccccacaatattatattaagaagaagctcaattagagccccgaccgagaaaggacacgaaagttggcccccgtgaagcatgagggtttgctccctacagatcagatctttactcgttctttgaatcctcccagcccctacgaggaggatctgtcccccataagttaatccatctcgtgtgcacacaaccagagaaaccagcgagtgatcttttttaacctcagcctaaaattcgctcccactgggattcaaactcaggaccagaaaagtgctactcataccaactaactaactcagctagaggccatttcgctatattggatacatataccaaaatggaacgccgactaatgcaattattttacaaaactaacgaaaaagttgcacaaagattgattttttttaaaaaaaagagtttgattaatattacctaaaaatcagtgttgtctctatttctgatcatttttcggcccacgtttgttctctagtctgctgttcaaatgagctattgcttgcagtagatgcacattcatgcttcatatttacacagaagaatgcaattacgttctgcatgcctgaacaagtattctgagaagtttattaagttttgtgatctcgtcctatgtacagtagtccttgcctttgccttttcctttttcggtaggacacttccttatccttccagactgcaattgcttatccaggagcacacagaaagcctacatgatgagaccgcagttagtgtacgaacatgaaaacactgatggcgtgaaggagaggatggggatcagggggccatacttggtggcgtctgaatagaggaggccaccgttacaacttacaagtgtgtggctgtgcaagggaaaaagaaacgatcaagagaaaaaggatgcggcctgatgctgatgtaggagaggaaaggacagcaggaggtgggattcactggtggaattgagcaaatcttgggatggaaaggaggaacaggtgagggagggcgcagggctgagtggaacagacgatggatcatggagagtggagccactatgtttttttaactagtatatatatacagattatactacctttgattcacaatgtatgtctt

SEQ ID NO: 6805 - DNA, 2780 bp, Zea Mays
aacatgacaatatcaaatacattttcgacaggcaaattaattcagatacatggcataaaaatatagttcgcaacgtcagtacattaaagaatataatgagaaacattggttccaccatacaagattctatcatttcactaaggatacggcaactcactttagccgaggagaaattaacttgtattaggtgctgtttggttcagaaaatgtgacataaacgtcattgtaacaaagtaacgggatggtttccactcagtaacgtaaatgggtaacaaaaactgagtaacaaagcccacaagctctgcagtctgcagcaagatgtcagacgtagcacaatggcgaccatggtggcagccagtggcaccttggtcgatggcagcggccaagacaaacagaacgccataggagtatgtggagctatgctgctatccatggctgaaaggatgtggagacggagaagacgatgacgggattgtaacgctttacgcttcacgttcgtggggcagcggtaacaagttcccacaggctggcatcggatctcacatctcagtgtgatcagattactgctgatctgaaacaaacagaatctagcaatatctgttacccctgtaatcaaatggcattacaaatttatgaaccaaacactattgtagagtattaacaattcgaagcggatatcatcagaggagatcttagtttgaaagattggcagccttaccatgacagaccaggtgtctcataatgactgggagcagatggcagaatggcagtcgacacaatactaggcgggtatacatttttattttgataggaggatgtacatttgttgttttctacatagtcattcgttgtaaactccaagcacctgaaaatgacagttctgaatgtatcgatgcattcctgctcagttcatttaacaggtgccaatccattgatcagtttatcaacatacttcagttttgatttctaatccatgatgggaagttagcacaaattgagatccacaaacttaacaaagggattgttcaagtatgtttataaagctacaatatgacattctccaacacatgaaatttgctcaaatgtgattataaagctacaatacgacatttactcctgtgcatgtttaaagagattatataaagaaattttcttatacaatactgtgagaatatagtgggaagcaataaatccaccatacaacaggtcccatcgtttcacaagggaaatggcattatggcaatgccctttagccaagaagaaacttcaggtagtattaaaatcagaaattaataatcccacataaagattatgaacaattgcaagtaaatatcatcaaagcgacctgggttcataatccacgaaatattgcaagccttaccagaagggacagggcctgataatggctataccaggagaggatatacatttgctttttgactcattccttgccaactacaaaaccgaatcaacaagttcaagatcctccttcctgcaaaagagcacagctgtttatttcagatgcagcaaactctgtctacagaaaaaaaaaattgcaaactgatggtcaaattactgaagaatggaaatagaggtcagcatttaagaatggagcgccaacttctgctctgcacccgctgcaatgtacataaaaaaaactcttggggaaagatagaccccacaatattatattaagaagaagctcaattagagccccgaccgagaaaggacacgaaagttggcccccgtgaagcatgagggtttgctccctacagatcagatctttactcgttctttgaatcctcccagcccctacgaggaggatctgtcccccataagttaatccatctcgtgtgcacacaaccagagaaaccagcgagtgatcttttttaacctcagcctaaaattcgctcccactgggattcaaactcaggaccagaaaagtgctactcataccaactaactaactcagctagaggccatttcgctatattggatacatataccaaaatggaacgccgactaatgcaattattttacaaaactaacgaaaaagttgcacaaagattgattttttttaaaaaaaagagtttgattaatattacctaaaaatcagtgttgtctctatttctgatcatttttcggcccacgtttgttctctagtctgctgttcaaatgagctattgcttgcagtagatgcacattcatgcttcatatttacacagaagaatgcaattacgttctgcatgcctgaacaagtattctgagaagtttattaagttttgtgatctcgtcctatgtacagtagtccttgcctttgccttttcctttttcggtaggacacttccttatccttccagactgcaattgcttatccaggagcacacagaaagcctacatgatgagaccgcagttagtgtacgaacatgaaaacactgatggcgtgaaggagaggatggggatcagggggccatacttggtggcgtctgaatagaggaggccaccgttacaacttacaagtgtgtggctgtgcaagggaaaaagaaacgatcaagagaaaaaggatgcggcctgatgctgatgtaggagaggaaaggacagcaggaggtgggattcactggtggaattgagcaaatcttgggatggaaaggaggaacaggtgagggagggcgcagggctgagtggaacagacgatggatcatggagagtggagccactatgtttttttaactagtatatatatacagattatactacctttgattcacaatgtatgtctt

SEQ ID NO: 6806 - DNA, 1764 bp, Zea Mays
cctcttcttcgtgccatttaaaggacatttagggctgttcttcttgtggcctagctccccacaatataaacatttagggtgtgtttggttggatgtataaggagggatggaaggggatggctacagtttctatagtgtttggatgagaatcacgtggggtgaaataaataccggagtaattttttggtgacggcgtgatcccaaaaaattgaggggacggtgtcgcccccgcctcatcctactttgacttcaaaccaaagacatccttattgtccccgaattaccttccattgctttacagtttcgtttgcacatgctttcttgcccctaccgccttctaggcaacctttgattctatttttcctttgtctgcccacacctctcctacccagtggtgcccccacctcatttgccatctccacttttggccaaaaagacttatctcctagttgctctattcttccctcgtaagctttcttaaacttttctccaacacagcttccttccaagagaacaaagttggaaactatcctcctaactaccaaacaactcatacaaagccttctctctccctctccaaagagttagatatgcaatctgaacattataagtgtcatgtagtgcattttgcaactccttggctcccatgccaggtttcttcttcaagagaggtattgcttgggcagcaacccaaccactagtaggtgtctttgtccttcacctaccactagatgtacaagtgtggatatctgtcatggcagtaacctacaatagtggatgtgaaaaggttagtttaaagtaaagcaaaaacaataaattgaactcaagtcaagataattagtcatacaatgatgataggcgattcttctacttcttttctggcatgaatactccatggacaatcatcccctttacaataacctctataccttcgagtactagtagcttcaatgcctagctcaaattccttgttaattgcatattggatcattgcgagcctaaactccttcatgctactatatatatatgttaccaagcctcataactggatttttcatatcaaacattacaatgtcatcgtcaatgtccttgcattctatagctgcccctgcatcaccataatcgttttgccaaccatcacaattggttccacccatcacctcatttgtcaggcccagtgtatcatacaccacttccacgttaacaacttcttgtagtcttcctcctcccatctagggtctagctgaattgaatcccaatcaatttctaaacctactccgaatgagttagcctgcaacagatttaaaggactaagagttaactaaattgagcattaccctaaaccctaaacagagcatcaaacagtaaggatacaaaaacactacatgaccataggctgtagaaattgaactgactggtggaggagttggcgttgaaacggatgcacaggtcgggggcgcctctagcaacaagaccgccggcgaaggagaacatctagcgaaggaaggacgaggaggcgacttcggatctgtggccgatgcagtgatttgtgcctccatggatccgaacctgggcgactccgggactgttgccggcgacaaagatctcgtggctccaaactcagttgttgttgccgaatatgacggcgcagccgccgccatcacggccgatgttggagcgctcgtgagtgatggatagaggaagggcaaaagtggaagtcgactccctggttaacgcccagcatgcggagcatacctctatctc

SEQ ID NO: 6807 - DNA, 849 bp, Zea Mays
tttagatcgttaaggagaatcagaagcttcacaaaggaaatgttgagattgaaggtgacttggctactcttgccgacaagagtatctttcctggggatgttctttgggtcagagactctgaaatctttgagaaccgtgacatagcagatgagatttcagagcagaagggtgatatactgcaggttgaggaaggctttagagggactcttttgacatcaagtgtttcagcacagctttgtcagggcataacatttagtgaatgagtttcttccgtgagatatatggctgcacatacctgttggcataagctagttaaggtctctagaaggtacctgattgcttcagagggtagtcaatcatgtcagttctagcagtcctggcgaaaagttatgtctatgcttctctccatgctgtcacactaaggatgtcaaatgtatcctcgcttgaggaaaacggaagaaggctcttccttcttccctaatgtaatggtgacttaggtataccactgggctacggggctgtgatgcctgcatgcttagtgtttttttttcctgttgttggccatgcgggaccgtgagggctacgagcgacttgcattgtacttggtggttgtgcacacatcggcttattgacaggtagattactatgaaagtctcaaggcgatgcagagcattgtgcagttttttcatgccttttattttaccttagatcctaagggtgtgcaatgccatttgatatatatatacctttatgatcactctggtttgctcacctctcgttgctcatagaacagagttacgaagtcgaaaccttttccttcatttagaaaatcaatcgttattttttctg

SEQ ID NO: 6808 - DNA, 4078 bp, Zea Mays
gtccgctcggcccgtcgccgcgctcgctcctctggtcggtggacggcaccgtgccgagtgccgagtgccgaccggtcggaacggaagaaaccatccgctcatccccgttttctcttgtcccgttcaccacgcctgctctctcccttgtcatcttctggcgacgactgggcgactgccgacggccgctgctgccgccggccgctgctgccgccctagaccaggtggccagctcttgtccgagaccgttgctggcgacgagaatccaatagcttaacccctatgcaccaagggaagtcggatcctcattgctggtacaatgagcaggccgaatacccgcaacaagaacaagaggcctcgcgctgatgaatccaatagcccatctgtggctgttttcaagaagatacattccactggtgatatctcaaaaagcgatatctgtcagctttacatggtgtggaaaccgctttgccacggttgccatggtaactccaaggactcaccaaattgtttctgcgggttgattcccattggcaatggggttcgtaaatctggcctctggcagaaaactcaggaaattatccgtggtcttggtcctaatccatctagtgatcttcgtgattctagcgagacacctgctgggttgactaacctgggagcaacttgttatgcgaatagtattctacagtgcctttacatgaacacatccttccgatctggtattttctcattggatctggatgttttgaagaagcatccagttttagatcagctggttcggttgtttgcacaactacagtctagcaaaatggctttcattgattcaacgccttttattaaggcattggaattagacaatggtgtccagcaggatagccatgaatttctcaccttgtttctgtctctccttgagcaatcactaagtcactccaaggtccctggaactagagaaatagtgcaacatctgtttcgtggcagtgtatctcatgtaacaaggtgctcatcatgtggaaaggattcagcagcatcttcaaaatctgaagacttctatgaactcgagctgaatattaaaggtttcaataatttggaagaaagtctagacgactactttagtgaagaaggactagttggggagaatcaatacttttgtgaatcatgtcagaaaagggtagacgccactcgctgcataaaacttagatcacttcctccagttgttaattttcagctgaagcgttatgtattcctcccgaagacaacaaccaagaaaaagatttcttcgtctttcagtttcccagggcagcttgatatgggaaaacggttgtcaaaccctacatctagttatacatatgaactagctgctattttaattcacaagggtaccgctgctaatagtgggcactatgtggcacatataaaagatgaaagcaatgggcagtggtgggagtttgatgatgaaaccgtatccaaacttggtttgcacccttttggtgaaaacttaggaaaaacatcaaataaagatgataggaaacctcaaggcatttctatagaaggttctgttacgaacaataacaatggacaccaggaggctgcatcatcttctagccccggggagatgttttcatctacagatgcttatatgctgatgtacaaatgtaccaataaggatggcaatgctactgaaagcaacaaaattatggaattcaataatagtttgcttccacaccattttcttgatgaaattaatgaacaaaatgcatcgtgtatgaaatcctgtgaagaataccaaagcaagaaaggcagccatttggcatatataacagagaggcgccaagaagtaaaatctattctgatagaagcacccgcaaatccagaggacaattcatacttttggatttcaacagactggcttcgccaatgggcagataacatcactcctcccttatccattgacaatggaccaattcaatgtgagcatggaaaagttccagtgtctaaactcacatcaatgaagcgtctatcagctgcagcttggcagaaattattttcaaaatatggaggggggccaacattgagtggtgatgatttttgcatggtgtgtcttaaagatggggcgaaaaatgcagtatctgctgatgtctaccgtgaccgcaaagaatcatttaaaaaccttgcagaagcagctcttgctggtagttgttcagatagtccttcttacttcatctcaaaggcatgaaaaaatgctggtatcctttctgatgctgataatggaccaacgagtgctttaagatgtcgccatgggtatctcctgccggagcatgctccaggagcaaagcgggtatccgtaccagagagcctgtggttatttctctatcaaaccatcagcgagaaggttgatgatgttgttacttttccatcagactgtcaaccatgcaaaatctgtagtcaggaattgtctgatgttgcttctgttgagggtaatcttagagcagtgaaacttgagcaacgatacaaacatgaaaagttaatatctgggaagagctttgcacttcgtcctggtgaaaaatattatttggttccttcatcttggttgtcagagtggagagcttatattacaacgacgggaaaaaatatttcttcactaccagaacctcaaagtcttgaagctgttgtcagttcacttatatgtgaaaagcattcgagattgctgcaaaagcctttggatcttgtttgtaagcgcggaagcatcactcagaaaacatcaaatagtatgattggaagttattctctgaggagtggagtgcgacgcctggaaaaggtatatctgctgaaatcgcttttagcaaggacgctcaagataaagtgcacggttcctctgaagcaatgccgattacggatggaaatttggaccagtctctttatggtgcaaatgacgattttggggccagagagccctatgtcagaactgatcctgaggtttgtgaagaatgtgttggagaaagagagagctgtgcattggtgcagaagctcaactaccagaatgaagatatccacgtttattttgtccgtggaaaagcaccaccaaagtctatcaaagaagcatctaaagatgttcctgtatcagatcgtcggatttcaaagcgttccaggaggacaagctctgggaattcaatcagtttgaaagtctctggttccacatccgtctatcagttgaaactcatgatatgggaatctttagggatcgttaaggagaatcagaagcttcacaaaggaaatgttgagattgaaggtgacttggctactcttgccgacaagagtatctttcctggggatgttctttgggtcagagactctgaaatctttgagaaccgtgacatagcagatgagatttcagagcagaagggtgatatactgcaggttgaggaaggctttagagggactcttttgacatcaagtgtttcagcacagctttgtcagggcataacatttagtgaatgagtttcttccgtgagatatatggctgcacatacctgttggcataagctagttaaggtctctagaaggtacctgattgcttcagagggtagtcaatcatgtcagttctagcagtcctggcgaaaagttatgtctatgcttctctccatgctgtcacactaaggatgtcaaatgtatcctcgcttgaggaaaacggaagaaggctcttccttcttccctaatgtaatggtgacttaggtataccactgggctacggggctgtgatgcctgcatgcttagtgtttttttttcctgttgttggccatgcgggaccgtgagggctacgagcgacttgcattgtacttggtggttgtgcacacatcggcttattgacaggtagattactatgaaagtctcaaggcgatgcagagcattgtgcagttttttcatgccttttattttaccttagatcctaagggtgtgcaatgccatttgatatatatatacctttatgatcactctggtttgctcacctctcgttgctcatagaacagagttacgaagtcgaaaccttttccttcatttagaaaatcaatcgttattttttctg

SEQ ID NO: 6809 - DNA, 4103 bp, Zea Mays
gtccgctcggcccgtcgccgcgctcgctcctctggtcggtggacggcaccgtgccgagtgccgagtgccgaccggtcggaacggaagaaaccatccgctcatccccgttttctcttgtcccgttcaccacgcctgctctctcccttgtcatcttctggcgacgactgggcgactgccgacggccgctgctgccgccggccgctgctgccgccctagaccaggtggccagctcttgtccgagaccgttgctggcgacgagaatccaatagcttaacccctatgcaccaagggaagtcggatcctcattgctggtacaatgagcaggccgaatacccgcaacaagaacaagaggcctcgcgctgatgaatccaatagcccatctgtggctgttttcaagaagatacattccactggtgatatctcaaaaagcgatatctgtcagctttacatggtgtggaaaccgctttgccacggttgccatggtaactccaaggactcaccaaattgtttctgcgggttgattcccattggcaatggggttcgtaaatctggcctctggcagaaaactcaggaaattatccgtggtcttggtcctaatccatctagtgatcttcgtgattctagcgagacacctgctgggttgactaacctgggagcaacttgttatgcgaatagtattctacagtgcctttacatgaacacatccttccgatctggtattttctcattggatctggatgttttgaagaagcatccagttttagatcagctggttcggttgtttgcacaactacagtctagcaaaatggctttcattgattcaacgccttttattaaggcattggaattagacaatggtgtccagcaggatagccatgaatttctcaccttgtttctgtctctccttgagcaatcactaagtcactccaaggtccctggaactagagaaatagtgcaacatctgtttcgtggcagtgtatctcatgtaacaaggtgctcatcatgtggaaaggattcagcagcatcttcaaaatctgaagacttctatgaactcgagctgaatattaaaggtttcaataatttggaagaaagtctagacgactactttagtgaagaaggactagttggggagaatcaatacttttgtgaatcatgtcagaaaagggtagacgccactcgctgcataaaacttagatcacttcctccagttgttaattttcagctgaagcgttatgtattcctcccgaagacaacaaccaagaaaaagatttcttcgtctttcagtttcccagggcagcttgatatgggaaaacggttgtcaaaccctacatctagttatacatatgaactagctgctattttaattcacaagggtaccgctgctaatagtgggcactatgtggcacatataaaagatgaaagcaatgggcagtggtgggagtttgatgatgaaaccgtatccaaacttggtttgcacccttttggtgaaaacttaggaaaaacatcaaataaagatgataggaaacctcaaggcatttctatagaaggttctgttacgaacaataacaatggacaccaggaggctgcatcatcttctagccccggggagatgttttcatctacagatgcttatatgctgatgtacaaatgtaccaataaggatggcaatgctactgaaagcaacaaaattatggaattcaataatagtttgcttccacaccattttcttgatgaaattaatgaacaaaatgcatcgtgtatgaaatcctgtgaagaataccaaagcaagaaaggcagccatttggcatatataacagagaggcgccaagaagtaaaatctattctgatagaagcacccgcaaatccagaggacaattcatacttttggatttcaacagactggcttcgccaatgggcagataacatcactcctcccttatccattgacaatggaccaattcaatgtgagcatggaaaagttccagtgtctaaactcacatcaatgaagcgtctatcagctgcagcttggcagaaattattttcaaaatatggaggggggccaacattgagtggtgatgatttttgcatggtgtgtcttaaagatggggcgaaaaatgcagtatctgctgatgtctaccgtgaccgcaaagaatcatttaaaaaccttgcagaagcagctcttgctggtagttgttcagatagtccttcttacttcatctcaaaggcatgaaaaaatgctggtatcctttctgatgctgataatggaccaacgagtgctttaagatgtcgccatgggtatctcctgccggagcatgctccaggagcaaagcgggtatccgtaccagagagcctgtggttatttctctatcaaaccatcagcgagaaggttgatgatgttgttacttttccatcagactgtcaaccatgcaaaatctgtagtcaggaattgtctgatgttgcttctgttgagggtaatcttagagcagtgaaacttgagcaacgatacaaacatgaaaagttaatatctgggaagagctttgcacttcgtcctggtgaaaaatattatttggttccttcatcttggttgtcagagtggagagcttatattacaacgacgggaaaaaatatttcttcactaccagaacctcaaagtcttgaagctgttgtcagttcacttatatgtgaaaagcattcgagattgctgcaaaagcctttggatcttgtttgtaagcgcggaagcatcactcagaaaacatcaaataacgatggtttaacaatcatcccagagtatgattggaagttattctctgaggagtggagtgcgacgcctggaaaaggtatatctgctgaaatcgcttttagcaaggacgctcaagataaagtgcacggttcctctgaagcaatgccgattacggatggaaatttggaccagtctctttatggtgcaaatgacgattttggggccagagagccctatgtcagaactgatcctgaggtttgtgaagaatgtgttggagaaagagagagctgtgcattggtgcagaagctcaactaccagaatgaagatatccacgtttattttgtccgtggaaaagcaccaccaaagtctatcaaagaagcatctaaagatgttcctgtatcagatcgtcggatttcaaagcgttccaggaggacaagctctgggaattcaatcagtttgaaagtctctggttccacatccgtctatcagttgaaactcatgatatgggaatctttagggatcgttaaggagaatcagaagcttcacaaaggaaatgttgagattgaaggtgacttggctactcttgccgacaagagtatctttcctggggatgttctttgggtcagagactctgaaatctttgagaaccgtgacatagcagatgagatttcagagcagaagggtgatatactgcaggttgaggaaggctttagagggactcttttgacatcaagtgtttcagcacagctttgtcagggcataacatttagtgaatgagtttcttccgtgagatatatggctgcacatacctgttggcataagctagttaaggtctctagaaggtacctgattgcttcagagggtagtcaatcatgtcagttctagcagtcctggcgaaaagttatgtctatgcttctctccatgctgtcacactaaggatgtcaaatgtatcctcgcttgaggaaaacggaagaaggctcttccttcttccctaatgtaatggtgacttaggtataccactgggctacggggctgtgatgcctgcatgcttagtgtttttttttcctgttgttggccatgcgggaccgtgagggctacgagcgacttgcattgtacttggtggttgtgcacacatcggcttattgacaggtagattactatgaaagtctcaaggcgatgcagagcattgtgcagttttttcatgccttttattttaccttagatcctaagggtgtgcaatgccatttgatatatatatacctttatgatcactctggtttgctcacctctcgttgctcatagaacagagttacgaagtcgaaaccttttccttcatttagaaaatcaatcgttattttttctg

SEQ ID NO: 6810 - DNA, 3430 bp, Zea Mays
gtccgctcggcccgtcgccgcgctcgctcctctggtcggtggacggcaccgtgccgagtgccgagtgccgaccggtcggaacggaagaaaccatccgctcatccccgttttctcttgtcccgttcaccacgcctgctctctcccttgtcatcttctggcgacgactgggcgactgccgacggccgctgctgccgccggccgctgctgccgccctagaccaggtggccagctcttgtccgagaccgttgctggcgacgagaatccaataggtgctcatcatgtggaaaggattcagcagcatcttcaaaatctgaagacttctatgaactcgagctgaatattaaaggtttcaataatttggaagaaagtctagacgactactttagtgaagaaggactagttggggagaatcaatacttttgtgaatcatgtcagaaaagggtagacgccactcgctgcataaaacttagatcacttcctccagttgttaattttcagctgaagcgttatgtattcctcccgaagacaacaaccaagaaaaagatttcttcgtctttcagtttcccagggcagcttgatatgggaaaacggttgtcaaaccctacatctagttatacatatgaactagctgctattttaattcacaagggtaccgctgctaatagtgggcactatgtggcacatataaaagatgaaagcaatgggcagtggtgggagtttgatgatgaaaccgtatccaaacttggtttgcacccttttggtgaaaacttaggaaaaacatcaaataaagatgataggaaacctcaaggcatttctatagaaggttctgttacgaacaataacaatggacaccaggaggctgcatcatcttctagccccggggagatgttttcatctacagatgcttatatgctgatgtacaaatgtaccaataaggatggcaatgctactgaaagcaacaaaattatggaattcaataatagtttgcttccacaccattttcttgatgaaattaatgaacaaaatgcatcgtgtatgaaatcctgtgaagaataccaaagcaagaaaggcagccatttggcatatataacagagaggcgccaagaagtaaaatctattctgatagaagcacccgcaaatccagaggacaattcatacttttggatttcaacagactggcttcgccaatgggcagataacatcactcctcccttgtaagttcacaacagatgctccctccatacatccattgacaatggaccaattcaatgtgagcatggaaaagttccagtgtctaaactcacatcaatgaagcgtctatcagctgcagcttggcagaaattattttcaaaatatggaggggggccaacattgagtggtgatgatttttgcatggtgtgtcttaaagatggggcgaaaaatgcagtatctgctgatgtctaccgtgaccgcaaagaatcatttaaaaaccttgcagaagcagctcttgctggtagttgttcagatagtccttcttacttcatctcaaaggcatggttgactcattggctccgcagaaaaaatgctggtatcctttctgatgctgataatggaccaacgagtgctttaagatgtcgccatgggtatctcctgccggagcatgctccaggagcaaagcgggtatccgtaccagagagcctgtggttatttctctatcaaaccatcagcgagaaggttgatgatgttgttacttttccatcagactgtcaaccatgcaaaatctgtagtcaggaattgtctgatgttgcttctgttgagggtaatcttagagcagtgaaacttgagcaacgatacaaacatgaaaagttaatatctgggaagagctttgcacttcgtcctggtgaaaaatattatttggttccttcatcttggttgtcagagtggagagcttatattacaacgacgggaaaaaatatttcttcactaccagaacctcaaagtcttgaagctgttgtcagttcacttatatgtgaaaagcattcgagattgctgcaaaagcctttggatcttgtttgtaagcgcggaagcatcactcagaaaacatcaaataacgatggtttaacaatcatcccagagtatgattggaagttattctctgaggagtggagtgcgacgcctggaaaaggtatatctgctgaaatcgcttttagcaaggacgctcaagataaagtgcacggttcctctgaagcaatgccgattacggatggaaatttggaccagtctctttatggtgcaaatgacgattttggggccagagagccctatgtcagaactgatcctgaggtttgtgaagaatgtgttggagaaagagagagctgtgcattggtgcagaagctcaactaccagaatgaagatatccacgtttattttgtccgtggaaaagcaccaccaaagtctatcaaagaagcatctaaagatgttcctgtatcagatcgtcggatttcaaagcgttccaggaggacaagctctgggaattcaatcagtttgaaagtctctggttccacatccgtctatcagttgaaactcatgatatgggaatctttagggatcgttaaggagaatcagaagcttcacaaaggaaatgttgagattgaaggtgacttggctactcttgccgacaagagtatctttcctggggatgttctttgggtcagagactctgaaatctttgagaaccgtgacatagcagatgagatttcagagcagaagggtgatatactgcaggttgaggaaggctttagagggactcttttgacatcaagtgtttcagcacagctttgtcagggcataacatttagtgaatgagtttcttccgtgagatatatggctgcacatacctgttggcataagctagttaaggtctctagaaggtacctgattgcttcagagggtagtcaatcatgtcagttctagcagtcctggcgaaaagttatgtctatgcttctctccatgctgtcacactaaggatgtcaaatgtatcctcgcttgaggaaaacggaagaaggctcttccttcttccctaatgtaatggtgacttaggtataccactgggctacggggctgtgatgcctgcatgcttagtgtttttttttcctgttgttggccatgcgggaccgtgagggctacgagcgacttgcattgtacttggtggttgtgcacacatcggcttattgacaggtagattactatgaaagtctcaaggcgatgcagagcattgtgcagttttttcatgccttttattttaccttagatcctaagggtgtgcaatgccatttgatatatatatacctttatgatcactctggtttgctcacctctcgttgctcatagaacagagttacgaagtcgaaaccttttccttcatttagaaaatcaatcgttattttttctg

SEQ ID NO: 6811 - DNA, 1994 bp, Zea Mays
caaatatcctttctgtcagagataagatcaaactgctttgcaatgtgaaatgctattaaggtattgtggttactaatgatggtaatgccattttgagggaaatagacattgcacaccctgctgccaagtctatgatcgaactaagtcgtacacaggatgaagaagttggtgatggcactacatctgtcattgttctagctggagagatgctacatgttgcacaggcattcatcgacaagaactaccatccaactgttatttgccgagcatataccaaagcgcttgatgatgctattgctgtacttgacaaaattgcaatggctgttgatgtgaatgatcgtggggcaatgctaggccttgtgaagagctccattggtacgaaattcactggccagtttggtgaccttattgctgaccttgctattgatgctactacaacagcaggtgttgaccttggtcagggtatgcgtgaagttgatatcaagaaatacattaaagttgaaaaggttcctggtggtcagttggaggattctagagtccttaaaggagttatgatcaataaggatgtcgtggctcctgggaaaatgaggagaaagatagtaaacccccgtatcatcctgttggactgccctgttgagtataagaaaggagaaaatcagaccaacgctgagttgatgaaggaagaagattggcaggttctgttagagatggaggaagaatacataaagaacctgtgcggtcaaattctaaaattcaagcctgatttagtcataactgagaaagggctcagtgatctcgctatccattatttgagcaaggctggggttagtgcaatccgtagacttaggaaaactgacaacaacaggattgctaaagcttgtggagcagttatagtgaacaggcctgaggagctccaagaatctgatgttggaacaagagctggcctgttcgaggttaagaagataggtgatgagttcttttcctttattgttgactgtaaagatcccaaggcatgtactgttctgttgaggggagcaagcaaggatgtattgaatgaagttgagagaaacctgcaggatgccatgtccgttgcaaggaacattttgaaaaatccaaaactccttcctggaggtggcgctacagagctgactgtatcagcaacactgaagcaaaagagttcttcagttgaaggtgtggaaaagtggccctatgaagctgctgctctagcatttgaggcaattccaaggactttggcccaaaattgcggtttgaatgttattaggataatgacacaacttcaaggaaagcatgctaatggtgaaaatgcgtgggttggcattgatggaaggactggtgatattgtcgatatgaaagagcgaaagatctgggattcctacagtgttaaagcacaaacgttcaagacagcaattgaggctgcttgcatgcttttgagaatcgatgacattgtcagcggtatcaagaagaagcaggctcctggagcctcagctccaaagcaaccccaaattgaaactgagggcgatgctgacaatgagcagatgattccagagtagaggctgtggcgaacctgcactggcaaagttatttactagtgtcaaggtagcacttcgagcagagttcattttggtggttagccttagcttaaagatgcaccttgttttatatagtttgatgagtggtacgagggttttgggatccaggttttgagtgtggttgctgctcgttttgatttggactgatgaaaaagcagtgaaactagcctttatttatggctaactttgcctgttgtatgccgcaaatctactttttttcttggcaacgtctcgtttcgcacgatccaaactgagtcttaatgctgtctttttttcatgacccgagcttggtcttaccattacaactttacaacttcgggtcattggatcgacggcacttgatgagtcattattgttaaaagctttctttgatcctaccaatac

SEQ ID NO: 6812 - DNA, 2313 bp, Zea Mays
cccaactctggaccacacacaaaccgccgccgccgctaccttcaccactgcggactgcaccagctgcccgccgactactccgtttctcttcctagtacattgccgcgtcgaaggcgaggtcctcagcagcgccggcggactccgctcgcacgccatactcagcctactccgtcttcccctgtctagcagacaccctcttcccctctccactcccaatcttatcgtcgcctccctcgacgtcgctgctgcctccacttcaccatggcgcttcacgccccggtcctcgttctgaaggactcgctgaagcgggagtctggcgcgaaggttcaccaagccaacatccaggcggccaaggctgtcgctgacatcatacgcactacattgggtcccagatccatgctgaaaatgcttctggatgctagtggaggtattgtggttactaatgatggtaatgccattttgagggaaatagacattgcacaccctgctgccaagtctatgatcgaactaagtcgtacacaggatgaagaagttggtgatggcactacatctgtcattgttctagctggagagatgctacatgttgcacaggcattcatcgacaagaactaccatccaactgttatttgccgagcatataccaaagcgcttgatgatgctattgctgtacttgacaaaattgcaatggctgttgatgtgaatgatcgtggggcaatgctaggccttgtgaagagctccattggtacgaaattcactggccagtttggtgaccttattgctggtatgcgtgaagttgatatcaagaaatacattaaagttgaaaaggttcctggtggtcagttggaggattctagagtccttaaaggagttatgatcaataaggatgtcgtggctcctgggaaaatgaggagaaagatagtaaacccccgtatcatcctgttggactgccctgttgagtataagaaaggagaaaatcagaccaacgctgagttgatgaaggaagaagattggcaggttctgttagagatggaggaagaatacataaagaacctgtgcggtcaaattctaaaattcaagcctgatttagtcataactgagaaagggctcagtgatctcgctatccattatttgagcaaggctggggttagtgcaatccgtagacttaggaaaactgacaacaacaggattgctaaagcttgtggagcagttatagtgaacaggcctgaggagctccaagaatctgatgttggaacaagagctggcctgttcgaggttaagaagataggtgatgagttcttttcctttattgttgactgtaaagatcccaaggcatgtactgttctgttgaggggagcaagcaaggatgtattgaatgaagttgagagaaacctgcaggatgccatgtccgttgcaaggaacattttgaaaaatccaaaactccttcctggaggtggcgctacagagctgactgtatcagcaacactgaagcaaaagagttcttcagttgaaggtgtggaaaagtggccctatgaagctgctgctctagcatttgaggcaattccaaggactttggcccaaaattgcggtttgaatgttattaggataatgacacaacttcaaggaaagcatgctaatggtgaaaatgcgtgggttggcattgatggaaggactggtgatattgtcgatatgaaagagcgaaagatctgggattcctacagtgttaaagcacaaacgttcaagacagcaattgaggctgcttgcatgcttttgagaatcgatgacattgtcagcggtatcaagaagaagcaggctcctggagcctcagctccaaagcaaccccaaattgaaactgagggcgatgctgacaatgagcagatgattccagagtagaggctgtggcgaacctgcactggcaaagttatttactagtgtcaaggtagcacttcgagcagagttcattttggtggttagccttagcttaaagatgcaccttgttttatatagtttgatgagtggtacgagggttttgggatccaggttttgagtgtggttgctgctcgttttgatttggactgatgaaaaagcagtgaaactagcctttatttatggctaactttgcctgttgtatgccgcaaatctactttttttcttggcaacgtctcgtttcgcacgatccaaactgagtcttaatgctgtctttttttcatgacccgagcttggtcttaccattacaactttacaacttcgggtcattggatcgacggcacttgatgagtcattattgttaaaagctttctttgatcctaccaatac

SEQ ID NO: 6813 - DNA, 988 bp, Zea Mays
atagctctcgcacaaaccaaagagggcacaaatattccgtacaggtcatgtcccttgtataatgtattgccatgccaatcagagaccaagacagctccaacgacagatttcaggtcggtcatccatcttatgctactttaggagtcacccaaaaatatgaactttttgcccatataatattctagtgatttatagtatcccttcccttaaccaaagttgaatagcaggaattacacgtggaccaattacttggcatcacatcaaatgagcagcgtggaggtgagatcggcgcccagatcgtgtgaagaatcagactattccggatgagatcagccagggtacctcacctttcgattcagaggtggatgcaggagcaacgcgaagaggaggctgatggcagaggatgtgaggatgcggaggcaaagctcctcagccgcatgccagacgcggcccgtgtattcccgccagcctcggctgacccccgtggcggccatgcgaggcgaggggggtgcacggtgccgaacgcggagggagggagcgattccgagaggagaatgaggagccatgcatcgggggcacagcaggggcgagatccgcgatgactgctcaggagtggtcgagatccgtggttgcctgcttgggcgtggggaaggatccggcgggagctgcggctacctgctcgagcgtggggcaggggcacagtgtgcgttgggcgagatacgcgggcgtgggggcgagatacgcggacgcaggggcatggcggtggtggagcctaggtgtggacgctgatgtgggcggggggcatggagtgtggacgctgacgttactaacttaatatagtagtatatagataaggaagctgagagaatggagccttagcttgatggaccatagtccatagcttttcctgcttccggagtgatggaacccacagagaacagccaagcgagacccgtccatggcttgttgatcgggatgcacgtttgag

SEQ ID NO: 6814 - DNA, 1419 bp, Zea Mays
tgataatatggccttgttctggaaataacgaacatgcacgtcagcttgaagttcagtaactgatactgaggaatagaaattgaaaaatcttcagttgctttccacaccaatgttttcaagtcggacgatttgctagtcgttctggctgaccgactagggcgattaatcgcgattaatcacgattagtcggacgacttgggcgattaatcgcgattggtccaaaccgacttggacgattaatcgcgactaatcgcgattagtcggacgacttgaaaacagtgttccacacatacaaaaagaaaagtagaaaactgattgtagaaagtgaaggtattgatatttatttttatctaatatatattattatcatattaaccaatacattgtttcgtttttcttatccaaatctaggtagcactgatccattccatagaaaatggtgcattactttgtgaggaaaaacattgaactaatttaaggcaatgcttggtgacaaaatgcaccatataaaagtttgagtgtactgatagtcagaaaagaccataaattgcaagaaaagtatcttttgatttgttattagcaccgatgttccattaaattgcaataaactttgtgtaaaagactaaaattacctcctaactgaacaatgcattagttgacgtctctagaaagtgatactaacttccttgttattttttcggttacacatcattgttttcccaatagaaaataatgaattcatgtcgattgctgccatgttttaagaaccttttggacgttgcttgcatgcatacacaacacattcgacaaagcaacttaagtttcctgctttttcaaattttcagtaatcttacctttaaaaatccattgctatttcaataccatagaagtctgtaacattttctactcaatcagtgttaccaggctaccttttttagtccatttcaataccctaacttcatatttcgacccggttttattttactaatcataggagtactaacggctgagtgatgcagataactgattgcttcagagggtatactgaatcatgtcagttgtagcagctcgggcatgcagggaaaggcaaagctgggaggatagctaagcagcctagggaacctcatttgaataactgaaatgtaagggcatggtctttacaaatttttttaccaatggtaatgtttgtaccaattctattgaactgtttaaacatgtgaagataggacactctattttactgtgtgtgtcacattttagcatgcatgatgtgatgtatacttgatttagcaaagcagtgagcttttggtaaacaatacaatatgaacaaaacaatactacgtactaaaaggaaaaaatgaaagcgtgaaggcactaaccaaatttttgaggacttaggtggagaagacttagcaaaac

SEQ ID NO: 6815 - DNA, 1834 bp, Zea Mays
acaaagggattaggcgcactccacccatcatctagctgtcttgagagagctgagccaggagcggagggaagaataccacgcgctgggtccgaaccggagctggactggattcttcaaggcttccattccattccatggggcttcgggttgtcttctttttttctccgtaaaagctgagggttcggttttctggagtaggaaagggaggtagaggtggacgccagggttcagcgataccacctcaagaaagcaggcctattggaatagcggaaatgaacagcagcggggagtacgatgctgcgttcgcagccacaattgcagcagcagcatttgcaatcgctgcccgtgaggataagctcgcggctcaaaagaactccgtccccatcgaggaggtgaccccttccctatcgccagtcaatagagctgaaggcaccaaaaagcctgcaggaggcaacaaaatcgcgagatggtttagcggcaaggagcctatagaacacgacgacgacgacgaggggccagttaatgtatcggtaaggaggccactgaaaccagcacctggaaagcctgaggacgtgcctgcagatcatcacaaggtggcacccaggatgcttgagacttctctgggtgtgaggaagggttcgggatcttccagcaggtcggcagagaggaaatggagcaaggagtttgagcaagaacaggctgttcagaaagcgccctcggccgtgaggccagccacgtcataccgctctggacggaatggagaaggcgcggcaggagtagctgctactggcggcacgggatctaaggctgatgaatgggagaaggcaaagcttggaagagttagagaggagtatgagaagatgatggagaccatagccgaatgggaaactgagaagaagaccgagctggacagaaagagagaaaaggcactagaagaatacaacctggagatgacaaggatcagcaaaatctctggaggagcaagggcgatggcggaggagcgaaaatacaacgataggaaaaagatcagagagaaggcgcgcaagatgcgatccacaggaaagcctccccgcacgtgtgcttgcttttgagaacagctgcatacgctgaaatttggaaccaaaaccaaatgaaggacgtcattttggacggttgtaaaaggcacgcaatagtgacgttctgtattgtaatatgtatttggctttgacaagttatgagtgcacattccactgaaggcaacatcaacatatttttgaagggtgtggagttaaggaataaaaaaaaagatccaccatgcatcaacattcaagatgaagcatggagtaggaactgccccaagaacaacgagaacgaaaacatatattcatcataaaggtcaagatttaggattcccattcaaggtataaggtgtgagactagtatcatccaattcaagtgctgaggttcttcttgagctttggccaccagacttctcagattcattcctatttttgttgattgttgtctcctcatcctgtgtaccagattcatctgattccacttaattcaaaatcatactcttcataaatttggttatccgatagttcttctggtgactgatgaggaataaatatccttgatttcagtccaccctgttctgaagtattttcatcaccaacaaaaacacttggtccagtcagcatggacttcagcttctcatgaagtccaccatctgatgaagtttctgaaactgattggcagtgagaagcaccgttgttcatcctactgtcaaaaactttaccagacgtatcattgtctgctgcatttctagaagcaaaatcaagacaagactcag

SEQ ID NO: 6816 - DNA, 1858 bp, Zea Mays
tcgtgccgacgaaagttatcctctgaatttcacaaagggattccctttcaaaaaaaaaaattcacaaagggattaggcgcactccacccatcatctagctgtcttgagagagctgagccaggagcggagggaagaataccacgcgctgggtccgaaccggagctggactggattcttcaaggcttccattccattccatgggggttcggttttctggagtaggaaagggaggtagaggtggacgccagggttcagcgataccacctcaagaaagcaggcctattggaatagcggaaatgaacagcagcggggagtacgatgctgcgttcgcagccacaattgcagcagcagcatttgcaatcgctgcccgtgaggataagctcgcggctcaaaagaactccgtccccatcgaggaggtgaccccttccctatcgccagtcaatagagctgaaggcaccaaaaagcctgcaggaggcaacaaaatcgcgagatggtttagcggcaaggagcctatagaacacgacgacgacgacgaggggccagttaatgtatcggtaaggaggccactgaaaccagcacctggaaagcctgaggacgtgcctgcagatcatcacaaggtggcacccaggatgcttgagacttctctgggtgtgaggaagggttcgggatcttccagcaggtcggcagagaggaaatggagcaaggagtttgagcaagaacaggctgttcagaaagcgccctcggccgtgaggccagccacgtcataccgctctggacggaatggagaaggcgcggcaggagtagctgctactggcggcacgggatctaaggctgatgaatgggagaaggcaaagcttggaagagttagagaggagtatgagaagatgatggagaccatagccgaatgggaaactgagaagaagaccgagctggacagaaagagagaaaaggcactagaagaatacaacctggagatgacaaggatcagcaaaatctctggaggagcaagggcgatggcggaggagcgaaaatacaacgataggaaaaagatcagagagaaggcgcgcaagatgcgatccacaggaaagcctccccgcacgtgtgcttgcttttgagaacagctgcatacgctgaaatttggaaccaaaaccaaatgaaggacgtcattttggacggttgtaaaaggcacgcaatagtgacgttctgtattgtaatatgtatttggctttgacaagttatgagtgcacattccactgaaggcaacatcaacatatttttgaagggtgtggagttaaggaataaaaaaaaagatccaccatgcatcaacattcaagatgaagcatggagtaggaactgccccaagaacaacgagaacgaaaacatatattcatcataaaggtcaagatttaggattcccattcaaggtataaggtgtgagactagtatcatccaattcaagtgctgaggttcttcttgagctttggccaccagacttctcagattcattcctatttttgttgattgttgtctcctcatcctgtgtaccagattcatctgattccacttaattcaaaatcatactcttcataaatttggttatccgatagttcttctggtgactgatgaggaataaatatccttgatttcagtccaccctgttctgaagtattttcatcaccaacaaaaacacttggtccagtcagcatggacttcagcttctcatgaagtccaccatctgatgaagtttctgaaactgattggcagtgagaagcaccgttgttcatcctactgtcaaaaactttaccagacgtatcattgtctgctgcatttctagaagcaaaatcaagacaagactcag

SEQ ID NO: 6817 - DNA, 2576 bp, Zea Mays
cgcagctgtctctctcgtttctcctgcgggacggaagagagaggaggaaggggagaagaagcaagcgaagcgagacgagagcagagcattgccgcgtagccgccccccgctcccggaagacaaatcaatccccaatcccccccgtcccccaaaatcccctggggattcaccgacaggcccccccgcgccgccggcccccgtatctgcactcctcgcacgcggcgacgcgcattgctatttcattccctctcttttcttcttcccctattggcatcacccgtgcgattagcatgtctctgcccaatgccaccgcctcgccgccgccgtcgccggaaccctaggccgcaggactccgagctcccgtcggcgggggagggggaggatgcagctgcggatctcgccgagcatgcgcagcatcaccatctccagcagcaatggcgtcgtcgactccatgaaggtgcgcgtcgcgccgcagccgcccccgccgccgccgccgctgcacggggccgcccggcgcggcgggggaggtggaggggggtggtactggcgcgcagtcgcgttcccgctcgtcgtcgcgctcggctgcctcctgcccttcgccttcatcctcgccgccgttcccgcgctcgaggcaggcggaagcaagtgctcctccgtcgaggctggtgcaagatctgtatagaacttttgatcaagttaacaacgaggaatccccatccgatgaaaagttaccagaatcattcagggattttcttttggagatgaaggataaccattatgatgctagaacatttgctgttagattgaaagctacgatggaaaacatggataaggaggtaaagaggtcaaggttggcagaacagctgtataaacattatgctgcaactgctattcccaaaggaatccattgcttgtctctgcgccttactgatgaatactcctcaaatgctcatgcacggaaacagttaccaccaccagagttgctacctttgctttctgataattccttccaacattacattctagccagtgataacattcttgctgcttcagttgttgtgagctcaactgtacgatcttcctcagtgcctgagaaagtagtcttccatgttattactgataagaaaacatatcctgggatgcattcatggtttgctcttaattccgtatctcctgcaatagttgaagtaaaaggtgttcaccaatttgactggctgacaagagaaaatgttccagtactagaggctatagaaagccatcgtggagtcagaaatcactatcatggagatcatggaacagtttccagtgcaagtgacaatcctaggatgcttgcttcaaagttgcaggctcgaagccccaaatacatatccctgctgaaccatctccgcatttatttgcctgagctctttcccaacctcaacaaggtggttttcctcgatgatgacattgttgttcagcgtgacttgtctcccctttgggctatcaatcttgaagggaaggtaaatggagctgtggaaacatgcagaggggaagacagctgggtgatgtctaagcgtttcaggacatatttcaacttctcgcatcctgtgatagctcggagccttgacccagatgaatgtgcttgggcatatggtatgaatatatttgatctggcagtttggaggaagacaaacatcagggatacataccatttctggttgaaggagaatctaaaatctggtcttacactctggaaatttggtaccttaccaccagcccttatagcatttaggggtcatgtgcatggtatagacccatcatggcacctgcttggcttaggataccaagacaagacagatattgagagtgtcaggagggctgcagtgatacattacaatggccagtgcaagccatggctagacattgcttttaagaacctacaaccattttggacaaatcatgtaaactactccaatgacttcgttagaaactgccatattttggagcctgagcgtgtcaaggagtgatttgcagcaaatgctggacatagcgagggagtatagtttatggttcgcttgttggctggagaggctgattgctgctgtataagtataataggtaatcaagaaagcaaccggcattcaatacaactgaccatcccctgcgaaaactggcattcaaatatctcaggagtcttcatctgtatcataggggaacacaattcttaccatctgtatcatactgttgcatcattcttttctatactgtaactgcggaaaaggagatctgggactgggctgacctttggtcgcagaataattcagaaggctagaagattgagtgattggttgatcaagacgaagaaaggaggcggatattgtgtggtggcaagtttatatgctttccatccatccatccatttaattctttttacactcgagtcattgaaattttgttctggtagttttgtgattgatttggtaggttggagatgattgtagtagagatgccattgtttgtggagtaacctacaggatattgttacaattgttgacatactatagatgtgcagataattcttacaagagtatttgcgc

SEQ ID NO: 6818 - DNA, 2313 bp, Zea Mays
acaagatgcaccgcagctgtctctctcgtttctcctgcgggacggaagagagaggaggaaggggagaagaagcaagcgaagcgagacgagagcagagcattgccgcgtagccgccccccgctcccggaagacaaatcaatccccaatcccccccgtcccccaaaatcccctggggattcaccgacaggcccccccgcgccgccggcccccgtatctgcactcctcgcacgcggcgacgcgcattgctatttcattccctctcttttcttcttcccctattggcatcacccgtgcgattagcatgtctctgcccaatgccaccgcctcgccgccgccgtcgccggaaccctaggccgcaggactccgagctcccgtcggcgggggagggggaggatgcagctgcggatctcgccgagcatgcgcagcatcaccatctccagcagcaatggcgtcgtcgactccatgaaggtgcgcgtcgcgccgcagccgcccccgccgccgccgccgctgcacggggccgcccggcgcggcgggggaggtggaggggggtggtactggcgcgcagtcgcgttcccgctcgtcgtcgcgctcggctgcctcctgcccttcgccttcatcctcgccgccgttcccgcgctcgaggcaggcggaagcaagtgctcctccgtcgattgcttggggaggcgaatagggcctagtttccttggtaggcaggggggtgattctacaaggctggtgcaagatctgtatagaacttttgatcaagttaacaacgaggaatccccatccgatgaaaagttaccagaatcattcagggattttcttttggagatgaaggataaccattatgatgctagaacatttgctgttagattgaaagctacgatggaaaacatggataaggaggtaaagaggtcaaggttggcagaacagctgtataaacattatgctgcaactgctattcccaaaggaatccattgcttgtctctgcgccttactgatgaatactcctcaaatgctcatgcacggaaacagttaccaccaccagagttgctacctttgctttctgataattccttccaacattacattctagccagtgataacattcttgctgcttcagttgttgtgagctcaactctctttcccaacctcaacaaggtggttttcctcgatgatgacattgttgttcagcgtgacttgtctcccctttgggctatcaatcttgaagggaaggtaaatggagctgtggaaacatgcagaggggaagacagctgggtgatgtctaagcgtttcaggacatatttcaacttctcgcatcctgtgatagctcggagccttgacccagatgaatgtgcttgggcatatggtatgaatatatttgatctggcagtttggaggaagacaaacatcagggatacataccatttctggttgaaggagaatctaaaatctggtcttacactctggaaatttggtaccttaccaccagcccttatagcatttaggggtcatgtgcatggtatagacccatcatggcacctgcttggcttaggataccaagacaagacagatattgagagtgtcaggagggctgcagtgatacattacaatggccagtgcaagccatggctagacattgcttttaagaacctacaaccattttggacaaatcatgtaaactactccaatgacttcgttagaaactgccatattttggagcctgagcgtgtcaaggagtgatttgcagcaaatgctggacatagcgagggagtatagtttatggttcgcttgttggctggagaggctgattgctgctgtataagtataataggtaatcaagaaagcaaccggcattcaatacaactgaccatcccctgcgaaaactggcattcaaatatctcaggagtcttcatctgtatcataggggaacacaattcttaccatctgtatcatactgttgcatcattcttttctatactgtaactgcggaaaaggagatctgggactgggctgacctttggtcgcagaataattcagaaggctagaagattgagtgattggttgatcaagacgaagaaaggaggcggatattgtgtggtggcaagtttatatgctttccatccatccatccatttaattctttttacactcgagtcattgaaattttgttctggtagttttgtgattgatttggtaggttggagatgattgtagtagagatgccattgtttgtggagtaacctacaggatattgttacaattgttgacatactatagatgtgcagataattcttacaagagtatttgcgc

SEQ ID NO: 6819 - DNA, 3170 bp, Zea Mays
aaagtaatgagttatcatttttgtgatttgttttatcacttaagataatttatgcttgacttaaattttatattttgaataaatattttaaataaaacgagtgatcaaagttttcggaaaagtaacagtgttatatatttgtgaaggaagatagtattatctagaattgtattactttaaattatagaaacaaaaggaaaaataaataaggaaggaaggaagaaataaagaaaaaaaaaagtaggaggaaccaaacaagatgcaccgcagctgtctctctcgtttctcctgcgggacggaagagagaggaggaaggggagaagaagcaagcgaagcgagacgagagcagagcattgccgcgtagccgccccccgctcccggaagacaaatcaatccccaatcccccccgtcccccaaaatcccctggggattcaccgacaggcccccccgcgccgccggcccccgtatctgcactcctcgcacgcggcgacgcgcattgctatttcattccctctcttttcttcttcccctattggcatcacccgtgcgattagcatgtctctgcccaatgccaccgcctcgccgccgccgtcgccggaaccctaggccgcaggactccgagctcccgtcggcgggggagggggaggatgcagctgcggatctcgccgagcatgcgcagcatcaccatctccagcagcaatggcgtcgtcgactccatgaaggtgcgcgtcgcgccgcagccgcccccgccgccgccgccgctgcacggggccgcccggcgcggcgggggaggtggaggggggtggtactggcgcgcagtcgcgttcccgctcgtcgtcgcgctcggctgcctcctgcccttcgccttcatcctcgccgccgttcccgcgctcgaggcaggcggaagcaagtgctcctccgtcgattgcttggggaggcgaatagggcctagtttccttggtaggcaggggggtgattctacaaggctggtgcaagatctgtatagaacttttgatcaagttaacaacgaggaatccccatccgatgaaaagttaccagaatcattcagggattttcttttggagatgaaggataaccattatgatgctagaacatttgctgttagattgaaagctacgatggaaaacatggataaggaggtaaagaggtcaaggttggcagaacagctgtataaacattatgctgcaactgctattcccaaaggaatccattgcttgtctctgcgccttactgatgaatactcctcaaatgctcatgcacggaaacagttaccaccaccagagttgctacctttgctttctgataattccttccaacattacattctagccagtgataacattcttgctgcttcagttgttgtgagctcaactgtacgatcttcctcagtgcctgagaaagtagtcttccatgttattactgataagaaaacatatcctgggatgcattcatggtttgctcttaattccgtatctcctgcaatagttgaagtaaaaggtgttcaccaatttgactggctgacaagagaaaatgttccagtactagaggctatagaaagccatcgtggagtcagaaatcactatcatggagatcatggaacagtttccagtgcaagtgacaatcctaggatgcttgcttcaaagttgcaggctcgaagccccaaatacatatccctgctgaaccatctccgcatttatttgcctgagctctttcccaacctcaacaaggtggttttcctcgatgatgacattgttgttcagcgtgacttgtctcccctttgggctatcaatcttgaagggaaggtaaatggagctgtggaaacatgcagaggggaagacagctgggtgatgtctaagcgtttcaggacatatttcaacttctcgcatcctgtgatagctcggagccttgacccagatgaatgtgcttgggcatatggtatgaatatatttgatctggcagtttggaggaagacaaacatcagggatacataccatttctggttgaaggaggtaatgcattttacacccacatatccatttcccagtcttactcgatgttccattgttcgttgactatgtttgtgaactgaaatcgttctggtatttttgcatgcagaatttgtactgtacggtattccaaaatcttaaaaggaaaccttgattcaatactcttgtgcaaatgtgaaaaatgaatttccttttctgctatccggcttttgtcaccatgtgcttatatattataacagacacagaaaattataaataaataaaaaaacatagaatctaaaatctggtcttacactctggaaatttggtaccttaccaccagcccttatagcatttaggggtcatgtgcatggtatagacccatcatggcacctgcttggcttaggataccaagacaagacagatattgagagtgtcaggagggctgcagtgatacattacaatggccagtgcaagccatggctagacattgcttttaagaacctacaaccattttggacaaatcatgtaaactactccaatgacttcgttagaaactgccatattttggagcctgagcgtgtcaaggagtgatttgcagcaaatgctggacatagcgagggagtatagtttatggttcgcttgttggctggagaggctgattgctgctgtataagtataataggtaatcaagaaagcaaccggcattcaatacaactgaccatcccctgcgaaaactggcattcaaatatctcaggagtcttcatctgtatcataggggaacacaattcttaccatctgtatcatactgttgcatcattcttttctatactgtaactgcggaaaaggagatctgggactgggctgacctttggtcgcagaataattcagaaggctagaagattgagtgattggttgatcaagacgaagaaaggaggcggatattgtgtggtggcaagtttatatgctttccatccatccatccatttaattctttttacactcgagtcattgaaattttgttctggtagttttgtgattgatttggtaggttggagatgattgtagtagagatgccattgtttgtggagtaacctacaggatattgttacaattgttgacatactatagatgtgcagataattcttacaagagtatttgcgc

SEQ ID NO: 6820 - DNA, 3634 bp, Zea Mays
aaagtaatgagttatcatttttgtgatttgttttatcacttaagataatttatgcttgacttaaattttatattttgaataaatattttaaataaaacgagtgatcaaagttttcggaaaagtaacagtgttatatatttgtgaaggaagatagtattatctagaattgtattactttaaattatagaaacaaaaggaaaaataaataaggaaggaaggaagaaataaagaaaaaaaaaagtaggaggaaccaaacaagatgcaccgcagctgtctctctcgtttctcctgcgggacggaagagagaggaggaaggggagaagaagcaagcgaagcgagacgagagcagagcattgccgcgtagccgccccccgctcccggaagacaaatcaatccccaatcccccccgtcccccaaaatcccctggggattcaccgacaggcccccccgcgccgccggcccccgtatctgcactcctcgcacgcggcgacgcgcattgctatttcattccctctcttttcttcttcccctattggcatcacccgtgcgattagcatgtctctgcccaatgccaccgcctcgccgccgccgtcgccggaaccctaggccgcaggactccgagctcccgtcggcgggggagggggaggatgcagctgcggatctcgccgagcatgcgcagcatcaccatctccagcagcaatggcgtcgtcgactccatgaaggtgcgcgtcgcgccgcagccgcccccgccgccgccgccgctgcacggggccgcccggcgcggcgggggaggtggaggggggtggtactggcgcgcagtcgcgttcccgctcgtcgtcgcgctcggctgcctcctgcccttcgccttcatcctcgccgccgttcccgcgctcgaggcaggcggaagcaagtgctcctccgtcgattgcttggggaggcgaatagggcctagtttccttggtaggcaggggggtgattctacaaggctggtgcaagatctgtatagaacttttgatcaagttaacaacgaggaatccccatccgatgaaaagttaccagaatcattcagggattttcttttggagatgaaggataaccattatgatgctagaacatttgctgttagattgaaagctacgatggaaaacatggataaggaggtaaagaggtcaaggttggcagaacagctgtataaacattatgctgcaactgctattcccaaaggaatccattgcttgtctctgcgccttactgatgaatactcctcaaatgctcatgcacggaaacagttaccaccaccagagttgctacctttgctttctgataattccttccaacattacattctagccagtgataacattcttgctgcttcagttgttgtgagctcaactgtacgatcttcctcagtgcctgagaaagtagtcttccatgttattactgataagaaaacatatcctgggatgcattcatggtttgctcttaattccgtatctcctgcaatagttgaagtaaaaggtgttcaccaatttgactggctgacaagagaaaatgttccagtactagaggctatagaaagccatcgtggagtcagaaatcactatcatggagatcatggaacagtttccagtgcaagtgacaatcctaggatgcttgcttcaaagttgcaggctcgaagccccaaatacatatccctgctgaaccatctccgcatttatttgcctgaggtgccttgccattggcttcctatctgcagcacttccgtttttaccggtttatttaagcatttcatattgatgtgtcaaccagattccattgtcatgcttctagcatatctttacgatgggcactatgttatttaggcaattgcctgattaagtgagcttggaaaacgtcatgccacgtgctttctttcatagaacagagggggatgtgatagactactgttaaatgtagtagcacatattcaaaccaactccaatgtagtgaatatgtgatctatcttattgacttgtgcatttaatttgactgaatacttctacgaggacaccatttggatgggctaaagcttgctgaataagttagtatgacctttacagctacctagtagatcattatcacatgatgcatactgaaaccgttataattaacagataccccactaaccattccagtattaagatgcatctttagttctctttatctgattcaaatgaagatattaaaatgtgtttctgtcttgtctggatcattatcacgtgttgattgtgcacttttgcgtgctgataatgtgctgagctgttatattccaccacctccttttagtttccattaccctttttccaattctagtaataattgagctgcacttaccatacagtacagctttaaagctagattgtgaaatttgtagatttttgtgcatctttttaatctgatccattcacttttctttaaccagctctttcccaacctcaacaaggtggttttcctcgatgatgacattgttgttcagcgtgacttgtctcccctttgggctatcaatcttgaagggaaggtaaatggagctgtggaaacatgcagaggggaagacagctgggtgatgtctaagcgtttcaggacatatttcaacttctcgcatcctgtgatagctcggagccttgacccagatgaatgtgcttgggcatatggtatgaatatatttgatctggcagtttggaggaagacaaacatcagggatacataccatttctggttgaaggagaatctaaaatctggtcttacactctggaaatttggtaccttaccaccagcccttatagcatttaggggtcatgtgcatggtatagacccatcatggcacctgcttggcttaggataccaagacaagacagatattgagagtgtcaggagggctgcagtgatacattacaatggccagtgcaagccatggctagacattgcttttaagaacctacaaccattttggacaaatcatgtaaactactccaatgacttcgttagaaactgccatattttggagcctgagcgtgtcaaggagtgatttgcagcaaatgctggacatagcgagggagtatagtttatggttcgcttgttggctggagaggctgattgctgctgtataagtataataggtaatcaagaaagcaaccggcattcaatacaactgaccatcccctgcgaaaactggcattcaaatatctcaggagtcttcatctgtatcataggggaacacaattcttaccatctgtatcatactgttgcatcattcttttctatactgtaactgcggaaaaggagatctgggactgggctgacctttggtcgcagaataattcagaaggctagaagattgagtgattggttgatcaagacgaagaaaggaggcggatattgtgtggtggcaagtttatatgctttccatccatccatccatttaattctttttacactcgagtcattgaaattttgttctggtagttttgtgattgatttggtaggttggagatgattgtagtagagatgccattgtttgtggagtaacctacaggatattgttacaattgttgacatactatagatgtgcagataattcttacaagagtatttgcgc

SEQ ID NO: 6821 - DNA, 1225 bp, Zea Mays
gacagggtgactccgtgaccgtgagtgcctacccgccgaccgcacgaaccccactcggtcactcccagtctccatctcccactacggcactaccccatccccggtgcggcgccaccttcccggcttccccttccgacctcccccctctcgtcacttatggtgcccagccgctcgctgcgcaactactagcgcaccgtcccctcctcagccatggccgcggcgtcgttcgcccgcgccttatgtctccacatgctcctcctcttcctcgtggttggctcggcgcgctgcaagacggtgaagagagacgtgaaagcattgaatgagatcaaatcttcactaggctggagagttgtatactcatgggtcggtgatgatccttgtgggcatggtgatctacccccctggtctggtgtgacatgttctcagcaaggggattacagagttgtgacggaactggaagtctatgctgtatcaatagttggccctttcccaacagcagtaactaacctgttggatctaagaagattggatctccacaataacaagttgacaggaccaattcccccacagattggacggttgaaacatctcaggatattgaacctgaggtggaataagcttcaagatgtgcttccacctgaaattggtgaactgaagaaactgacacacttgtatttgagcttcaacaacttcaaaggcgagattccagtggagcttgcaaacctgccagaactccgttacctttatcttcacgagaaccgcttcaccgggcgaatcccccctgaacttggaacgctaaagaacctacgtcacctcgacgtgggcaacaaccacctgacaggcactctcagggattttatcggcaacgggaacggcttcccgtccctgagaaatctataccttaacaacaatgagctgactggtgtgctgccagaccagattgcaaacctgacaaaccttgagattctgcacttgtccaataacaagatgatcgggtcgatatcgcctaagctagttcacattccaaggctgatctacttgtacttggacaataacaacttcattgggaggataccggaagggttgtacaggcatccatttctgaaggagctgtacatcgaaggaaaccacttcagaccaggaaccagatcgaagggaacgcacaaggaactggatgcgtctctcaagacccatgtgcggatgtgccgaatagatgatgtcgcca

SEQ ID NO: 6822 - DNA, 2060 bp, Zea Mays
tctcaaaacaatagtagaatggcgtagcctttctctatgacacgtgccccttcccccctcttaagctaagggacccttgggcagcccggcatcttctccaccctctgcccctctcgatttcttcttcccatctcccaatccatcgcaacccaaaccctactccaggcagatctccgtctccgccgccgctgccggcgtgagcacagcatcagatccgctgtgatggcgttccgccgcatcctatccaccgcggtgcgccgccgctcggccgtggccgccgcggcggccgggaacgcgcgcgaggcctccacggccgtcgctgcggcgccaggtgtgctcgcccccgatgcgaccgcggtgcgcgctcccgtgatgccgtatgaccgcatcgccgacgccgtcaacgccaggctccggcggctcgagcacccagacccgcgcttcctccgctacgccagccccgtgccgtcccacgcggaccacatggccatccttgcggcgccagagacccgggtcaccacactgcccaacggcctgcgcatcgccacggagtcttccctcgccgcgcgcacggctacggtcggcgtgtggatcgatgcgggcagcaggtacgagaacgaggaggcggtcggcgtcgcgcattttgtcgagcacatgctgttcaagggcacggggaagcgcagcgccgcgcagctggagctggagatcgaggacatgggtggccaccttaatgcgtacacgtcgcgggagcagacgacctactacgccaaggtgcttgacaaggacgtgccccgtgcgatggaggtcctctcggacatcctccagaactctaatctcgaccaggcccgcattgaacgtgagcgcgaagtgatcctacgagagatgggggaggttgagggacagtctgaggaagttatatttgatcatctccatgcaactgcattccaatatacatctcttggcagaccaatcttgggttctgcagagaatgtcaagtcaatcaccaaagaggaccttgagaactacattgcaactcattatacagctcctagaatggttatcacagctgcaggcaatgtgaaacatgaagacattgttgagcaggcaaagaagttgttcaataagctatcaactgaccctacaacaacaaacatgttggtcgctaagcaaccagcctctttcacgggttctgaggttcgaatcattgacgatgacatgccccttgctcaatttgctgttgctttcaatggagcatcatgggtagatcctgattctgttgcactgatggttatgcaatcaatgcttggttcatggaacaagagtgctggtggaggaaagcacatgggttcggagcttgtacagaaagcagcaatcaatgacattgctgagagtgtaatgtcattcaacatgaattacaaggacactggtctttttggtgtctatgctgttgctaaggctgattgcttggatgatttggcttttgcaattatgcatgagatgagcaaattgtcataccgggttacagaggaagatgttatccgtgcacgtaatcagctgaagtcctcaatccaactccaccttgatggttcaactgctgttgtcgaggacattggccgccagctgctgacctatggacgaagaattcctaccccagagctttttgcaagaatagatgctgttgatgcaagcactgtgaagcgtgttgcaaaccgcttcatctttgatcaggatgttgctattgctgcgatgggaccgatccaaggacttccagactacaactggttcagacgccggacctacatgctccgttactaagatcaatctgccggtgtaccatgtttacggtgtgcaaggacaaagataaaatttgcctctttcggcgtctgtatatcaaggcctcagcactgcacatcgcttgctgcgatagaggtttgtagcagatattttctctcacaaaaggttggaaccatgatcgacctcatggttagattggtcgtttttcagtatttttagcaaatacttgctctgacagaaggttgaagccactagtgaaatgtgat

SEQ ID NO: 6823 - DNA, 2374 bp, Zea Mays
gtagcctttctctatgacacgtgccccttcccccctcttaagctaagggacccttgggcagcccggcatcttctccaccctctgcccctctcgatttcttcttcccatctcccaatccatcgcaacccaaaccctactccaggcagatctccgtctccgccgccgctgccggcgtgagcacagcatcagatccgctgtgatggcgttccgccgcatcctatccaccgcggtgcgccgccgctcggccgtggccgccgcggcggccgggaacgcgcgcgaggcctccacggccgtcgctgcggcgccaggtgtgctcgcccccgatgcgaccgcggtgcgcgctcccgtgatgccgtatgaccgcatcgccgacgccgtcaacgccaggctccggcggctcgagcacccagacccgcgcttcctccgctacgccagccccgtgccgtcccacgcggaccacatggccatccttgcggcgccagagacccgggtcaccacactgcccaacggcctgcgcatcgccacggagtcttccctcgccgcgcgcacggctacggtcggcgtgtggatcgatgcgggcagcaggtacgagaacgaggaggcggtcggcgtcgcgcattttgtcgagcacatgctgttcaagggcacggggaagcgcagcgccgcgcagctggagctggagatcgaggacatgggtggccaccttaatgcgtacacgtcgcgggagcagacgacctactacgccaaggtgcttgacaaggacgtgccccgtgcgatggaggtcctctcggacatcctccagaactctaatctcgaccaggcccgcattgaacgtgagcgcgaagtgatcctacgagagatgggggaggttgagggacagtctgaggaagttatatttgatcatctccatgcaactgcattccaatatacatctcttggcagaccaatcttgggttctgcagagaatgtcaagtcaatcaccaaagaggaccttgagaactacattgcaactcattatacagctcctagaatgctgcaggcaatgtgaaacatgaagacattgttgagcaggcaaagaagttgttcaataagctatcaactgaccctacaacaacaaacatgttggtcgctaagcaaccagcctctttcacgggttctgaggttcgaatcattgacgatgacatgccccttgctcaatttgctgttgctttcaatggagcatcatgggtagatcctgattctgttgcactgatggttatgcaatcaatgcttggttcatggaacaagagtgctggtggaggaaagcacatgggttcggagcttgtacagaaagcagcaatcaatgacattgctgagagtgtaatgtcattcaacatgaattacaaggacactggtctttttggtgtctatgctgttgctaaggctgattgcttggatgatttggcttttgcaattatgcatgagatgagcaaattgtcataccgggttacagaggaagatgttatccgtgcacgtaatcagctgaagtcctcaatccaactccaccttgatggttcaactgctgttgtcgaggacattggccgccagctgctgacctatggacgaagaattcctaccccagagctttttgcaagaatagatgctgttgatgcaagcactgtgaagcgtgttgcaaaccgcttcatctttgatcaggatgttgctattgctgcgatgggaccgatccaaggacttccagactacaactggttcagacgccggacctacatgctccgttactaagatcaatctgccggtgtaccatgtttacggtgtgcaaggacaaagataaaatttgcctctttcggcgtctgtatatcaaggcctcagcactgcacatcgcttgctgcgatagaggtttttttcttcttcagaatttgttttatttcttttcttgctcagaatccacaaatctgccaataatgataggcaggttcgactgacgtggcttacttgggtggtcagcctatgttatttttcttacaatgagtcatgacccttaccgttccatcttttgttggaaggtttttactttggcaaataatttgatgtggctcgttatatgtaaagatggtacagttttagcttgtgcaattttttttataccttgttggaaggttattacaaagagcagataactgttgcgagaactaagcagtttgtactgctcccaacccttgtaaaccaagtgacgtgcacgttccccacttgcaactggccgacggacgtggtgtacatgcgggatccaatggcctcctcgccatgactcgactcttcacttgtatatatatatgatgggaatgcaataaagaaacagtgccctcgcgttcattta

SEQ ID NO: 6824 - DNA, 2258 bp, Zea Mays
gtagcctttctctatgacacgtgccccttcccccctcttaagctaagggacccttgggcagcccggcatcttctccaccctctgcccctctcgatttcttcttcccatctcccaatccatcgcaacccaaaccctactccaggcagatctccgtctccgccgccgctgccggcgtgagcacagcatcagatccgctgtgatggcgttccgccgcatcctatccaccgcggtgcgccgccgctcggccgtggccgccgcggcggccgggaacgcgcgcgaggcctccacggccgtcgctgcggcgccaggtgtgctcgcccccgatgcgaccgcggtgcgcgctcccgtgatgccgtatgaccgcatcgccgacgccgtcaacgccaggctccggcggctcgagcacccagacccgcgcttcctccgctacgccagccccgtgccgtcccacgcggaccacatggccatccttgcggcgccagagacccgggtcaccacactgcccaacggcctgcgcatcgccacggagtcttccctcgccgcgcgcacggctacggtcggcgtgtggatcgatgcgggcagcaggtacgagaacgaggaggcggtcggcgtcgcgcattttgtcgagcacatgctgttcaagggcacggggaagcgcagcgccgcgcagctggagctggagatcgaggacatgggtggccaccttaatgcgtacacgtcgcgggagcagacgacctactacgccaaggtgcttgacaaggacgtgccccgtgcgatggaggtcctctcggacatcctccagaactctaatctcgaccaggcccgcattgaacgtgagcgcgaagtgatcctacgagagatgggggaggttgagggacagtctgaggaagttatatttgatcatctccatgcaactgcattccaatatacatctcttggcagaccaatcttgggttctgcagagaatgtcaagtcaatcaccaaagaggaccttgagaactacattgcaactcattatacagctcctagaatggttatcacagctgcaggcaatgtgaaacatgaagacattgttgagcaggcaaagaagttgttcaataagctatcaactgaccctacaacaacaaacatgttggtcgctaagcaaccagcctctttcacgggttctgagagtgctggtggaggaaagcacatgggttcggagcttgtacagaaagcagcaatcaatgacattgctgagagtgtaatgtcattcaacatgaattacaaggacactggtctttttggtgtctatgctgttgctaaggctgattgcttggatgatttggcttttgcaattatgcatgagatgagcaaattgtcataccgggttacagaggaagatgttatccgtgcacgtaatcagctgaagtcctcaatccaactccaccttgatggttcaactgctgttgtcgaggacattggccgccagctgctgacctatggacgaagaattcctaccccagagctttttgcaagaatagatgctgttgatgcaagcactgtgaagcgtgttgcaaaccgcttcatctttgatcaggatgttgctattgctgcgatgggaccgatccaaggacttccagactacaactggttcagacgccggacctacatgctccgttactaagatcaatctgccggtgtaccatgtttacggtgtgcaaggacaaagataaaatttgcctctttcggcgtctgtatatcaaggcctcagcactgcacatcgcttgctgcgatagaggtttttttcttcttcagaatttgttttatttcttttcttgctcagaatccacaaatctgccaataatgataggcaggttcgactgacgtggcttacttgggtggtcagcctatgttatttttcttacaatgagtcatgacccttaccgttccatcttttgttggaaggtttttactttggcaaataatttgatgtggctcgttatatgtaaagatggtacagttttagcttgtgcaattttttttataccttgttggaaggttattacaaagagcagataactgttgcgagaactaagcagtttgtactgctcccaacccttgtaaaccaagtgacgtgcacgttccccacttgcaactggccgacggacgtggtgtacatgcgggatccaatggcctcctcgccatgactcgactcttcacttgtatatatatatgatgggaatgcaataaagaaacagtgccctcgcgttcattta

SEQ ID NO: 6825 - DNA, 2107 bp, Zea Mays
cccgacgctcccttttctcatcgtcgccttcacggaaacatctcgtcgacccaaatccatccatccacccacaaccacaaggcgaaatccacgatccagtcaaacccccgccgcgcaccgagctccaaaccctatcgatgtcgacggcggcggccacgaagactccgaccaagcccctggccgcggctgccaggactccgaccaagccccagccccccgcggtggccaagacgccatgcctgtctcgcgcgcggccctcccacgcgtccgagaactccaaccccaacatcccgggcacgccgcctcccccgcagtcgacgccgtccaagcccgtcctcaagtccccgccgcccgcgggcgccagatccgccaccgcgaggaagaagccctccacgcccgcgccgccgccggagcgggagcggcgattcctcgtggcgaagaagggcgcgcggcggaggcgcaacgtcgcgaccgtgggaggcggcgggggagagatcgacttcgacaagtgccgcgaggctgcccgcgaggcgctgcgcgcgtcgcagggtgacttcttccgcaaggagctcgccgcgtctaccgccaccggagaggagcaactgggacaggaggcggaggaggtgaagcaggtggctgaagagggtgtggaaggtggagcactcgaggagcggccagaggaggggaccgacgcggagttggaggggagcagcaaggttagggcgatgaggtctaaggcgatggcgaagacggtgaccagcgttccagaacctggctctggccgcgtaaaaaatatggtgcaggccttcgagagcctgctcaacatctcagaaaggtccggtgatggctcacgggcgctgcccgggttgcagctgtggaaggaggagtctgagagtaatctggggttcccaccattgtcggtattctcttcggctgatttccagaatgcagggtctgatagactctgctcttcgctagatggaaacaccgtcaggttgacctgggacagcaggacatcggctggcgagggtaggagcaggcgaaactcatctgagtcaataaggagcagaacatcggctggcgagcgcaggagcaggagaaattcatcggaatcactaaggagcagctggaacaaaaagctcaaggtcaccagccagcatccattcaagctgagaactgagcaaagaggaaagtttaaggaacagcagttcgttcagaaggtgcaagagatgcttgtagaggaagagaataaacgtattcatattgcacaaggattgccatggactaccgatgaacccgagcctgcagtcaaagaaagaactgagccggtagaccttgttttgcatagcgatgtgcgtgcgcttgaacgtgcagaatttgatcagcatgttttggaaaggaacaagttcgctgagcaacaaagactagaatgggagaggcaacaggaattagaggaagaagaaaggataaggcaactgaggaggaccgagctggttcctaaagctcaacccatgccatactttgaccgccccttcatccccaaaaggtcgactaaaccggctacagttcccatggaaccgaaattccacctcaggccagaaaagatatcctgcaatgtatggagcttggaaagctgaatccacaacagcagtgccaacatccactatggcaatcgagaagtacagagcatcaacacacatgatccaaaaaatgtttccatccctgtcttcgtcattcttgattcgtcgtcttccatatgtgaagaaattgctatcaggcgtgtttttcagctttgctcggatcgcctggcctctaatttctgttatgtacatgcatatgcaaatcgttggctctgtgcttcagatgcaatcccaccaaggttggaattttgctgcccaagaaactgatcaagaaattcaaagatgaatttcggtggtacattattgacttcagatgaatagtcgagtaatctgttgctgttgctgacttggttgtgtatgggcataagtgtaggtgtagcaaactgaaactttgcacaattaaatttctgcactccaacatgttcattacatgtgcactcgttcctcgcgcgaaaaacccatggtca

SEQ ID NO: 6826 - DNA, 1482 bp, Zea Mays
ttctattccatccctagttttttatctttcgtaacggttccatctattttctctccctatatcccgctacaaccataaaatattatttcatatactattttttatctactattaatttttctttgttaataattagagccggaccaataacatagtagaaagggtaccgtagtaggcagcgcctgcttgttgcctctacgggggggagggggagcggccgcgcgagccgctgcagacagccacggcaagcgggttgcggtgcggacagtctcacctcgcttatacaatccagtcgaccgttttctcagtctttagcctagcatgagagcagccttcaagtgaacacgcccgcgtccgtcttcgtcggacccttctccggcgacgagcaccccccacgccagatatctggtcatcagtacagaacttgaagtgtagattgtgatgtcggtgccgatgtataacaaacagaactcattgggcaccccccctccccacaagacaaatcccttttctgattctgaagggccatcaagggcacagtctgtcccagtacgacgcaccaatcaatctgtgcaagagttggaagattatgctataaccaaagcaagagaaaccacacacaaagtaaatgattgtgtcagggctgctgaagccatcagggaagatgctacacaaaccatgctaactttacaccgtcaaggtgagcagatcatgcggtctcatcaagtagcagctgacattgagcaggaccttacagtgagtgagaagcttctgggaagtctgggtgggctattttccaagtcatggagaccaaagagaaatcatcagataaaaggaccagtctcaggaaataactattctgcgacaacagctaacgacacggaacagagggggaagctaggaattgccccagcacgtcaagaatatcccagtcatgtacaaaccacacctgtatctgcaatggaaaaagttcaggctgagagaacaaagcaggatgatgcactttccgacctgtgtagcacattgggacaactcaaggaaatggcagtggatatgggcacagaaattgacaggcaaaacaaagctctggttcctttaagcgacgacgtcgatgaactgaatttcagactgaaaggtgcgaatcagcgcggacgccggttgctaggcaagtgatatggaacctgaattcgggcagtttggagaccgtcgcctcgactgcaggattttaagaaccttgttgtttacatgttttagagcaaactagaaacataggcgctgccgcgcccttcagggtgaatcagcccgtgttctttggagtgaatcaggccacacttgttgtattagtgagagaatgatgatctattttgtgtcattatggatttcatagattattttccctgaactgcatttgtttcaataacataggagggaactttctttgaatggcattaaggcgaatttttaaggtgtgtccattattcc

SEQ ID NO: 6827 - DNA, 1434 bp, Zea Mays
ttctattccatccctagttttttatctttcgtaacggttccatctattttctctccctatatcccgctacaaccataaaatattatttcatatactattttttatctactattaatttttctttgttaataattagagccggaccaataacatagtagaaagggtaccgtagtaggcagcgcctgcttgttgcctctacgggggggagggggagcggccgcgcgagccgctgcagacagccacggcaagcgggttgcggtgcggacagtctcacctcgcttatacaatccagtcgaccgttttctcagtctttagcctagcatgagagcagccttcaagtgaacacgcccgcgtccgtcttcgtcggacccttctccggcgacgagcaccccccacgccagttgcagatatctggtcatcagtacagaacttgaagtgtagattgtgatgtcggtgccgatgtataacaaacagaactcattgggcaccccccctccccacaagacaaatcccttttctgattctgaagggccatcaagggcacagtctgtcccagtacgacgcaccaatcaatctgtgcaagagttggaagattatgctataaccaaagcaagagaaaccacacacaaagtaaatgattgtgtcagggctgctgaagccatcagggaagatgctacacaaaccatgctaactttacaccgtcaaggtgagcagatcatgcggtctcatcaagtagcagctgacattgagcaggaccttacagtgagtgagaagcttctgggaagtctgggtgggctattttccaagtcatggagaccaaagagaaatcatcagataaaaggaccagtctcaggaaataactattctgcgacaacagctaacgacacggaacagagggggaagctaggaattgccccagcacgtcaagaatatcccagtcatgtacaaaccacacctgtatctgcaatggaaaaagttcaggctgagagaacaaagcaggatgatgcactttccgacctgtgtagcacattgggacaactcaaggaaatggcagtggatatgggcacagaaattgacagactgaaaggtgcgaatcagcgcggacgccggttgctaggcaagtgatatggaacctgaattcgggcagtttggagaccgtcgcctcgactgcaggattttaagaaccttgttgtttacatgttttagagcaaactagaaacataggcgctgccgcgcccttcagggtgaatcagcccgtgttctttggagtgaatcaggccacacttgttgtattagtgagagaatgatgatctattttgtgtcattatggatttcatagattattttccctgaactgcatttgtttcaataacataggagggaactttctttgaatggcattaaggcgaatttttaaggtgtgtccattattcc

SEQ ID NO: 6828 - DNA, 1820 bp, Zea Mays
ctgccttaccgcgggagaggaccgcgccgcgcgatggaagggcgacgaagacaaaaggaatacgagggagccgtgaagacggatggcagagggcaaacgatctgggacacgtttgcacacacttttggcaagatttcagacttcagcaacgcggatgttgcagttgaccagtaccaccgtttcgaggaggacgtgcagctcatggcggacatgggaatggatgcgtatcgcttctctattgcctggtcaagaattttgccaaatggtacgggccaagtcaatcaggccggcatcgaccactacaacaaagtgatcaatgcactactatcaaaaggaattcagccatatgtaaccctgtaccactgggacctcccccaggccctggaagacaggtacaacggatggctggacaggcagatagttaatgactttgcggcttatgctgagacatgcttcaaggcgttcggagaccgtgttaagcactggatcacgctcaacgagccgcacacggttgcagtccaaggctacgatgctgggcttcatgcgccagggcgttgctcggtgctgctccatctatactgcaggacagggaactctggcactgagccctacatcgttgctcacaacttcatcctagctcatgccaccgtttcagacatgtacaggaggaaatacaaggcagctcagaatggtgagcttgggatcgcatttgacgtcatctggtacgaaccaatgacaaacagcacgatcgacattgaagctaccaagagggcgcaggagtttcagctaggatggttcgcggacccgttcttcttcggagactacccggcgacgatgcgggctcgggttggagagaggctgcccaagttcaccgcagacgaggctgcccttgtcaagggggccctggacttcatgggcataaaccactacaccactttctacacgaggcataacgacaccaacatcatcggacggctgctgaacgacaccttggcggacaccggaaccatcagcctgcccttcgacaagaacgggaagcccattggagatcgggctaattcgatatggctgtacatcgtacccagcgggatcaggaagctgatgaactatgtcaaggagcggtacaatagcccaacggtttacatcactgaaaatgggatggacgacggcaacagccctttcacctccctccagaacgccctcaaggacagcaagaggatcaagtaccacaacggctacctcaacaacgttgctgcctccataaaggaggacgggtgtgacgtgcgtgggtacttcgcgtggtcgttgctggacaactgggaatgggccgccgggtacacctccagattcgggctctacttcgtggactacaaggataacctcaagaggcaccccaagaactcggtccagtggttcaagaccctgctgagctccagctgaaggcgtcacacgggctgtgattggactgaccatttacccgacaccatacccttatcctgttgtgtcaagcactcaagctccaatcaatgtaaaataatgttacccctctctctctctctctggtagaaaaacatgtcgtgtagggctacatttagttacacattaaaagggcatatcagtaacttcaaacttagttcgtttgaaagcataagttacacgtgtggatttgtattgaaatacactttgtaaaaaaaagtcatgtttgtaaataaattaaataatatagcctagaataaatcagcagtcaagatatacatcgaatgccatgaaaagacatatgctaatctacttaattatttggtttggaatttaagattcat

SEQ ID NO: 6829 - DNA, 2028 bp, Zea Mays
acacaaaaacctacgcgcacccggccgctctccagtgggcaggcagttggcctcctttcctcgccgcgctttggagcccacctcggtctcggtgcagtgtctcgctcgcgcgtgccggcgtgcgtgccctggtggcccatggggaggaggataatgaagagtgggcgacgcacgacgatgcagccgcggccggcgcttcttctcctcgtcctcgtcctcggcgtgtcgctgcgtggatgcattgcgcagggcgggggcggaggaggagggctcacgcgggggagcttccccaagggcttcgtcttcggcaccgccgccgccgcttaccaggcaagatttcagacttcagcaacgcggatgttgcagttgaccagtaccaccgtttcgaggaggacgtgcagctcatggcggacatgggaatggatgcgtatcgcttctctattgcctggtcaagaattttgccaaatggtacgggccaagtcaatcaggccggcatcgaccactacaacaaagtgatcaatgcactactatcaaaaggaattcagccatatgtaaccctgtaccactgggacctcccccaggccctggaagacaggtacaacggatggctggacaggcagatagttaatgactttgcggcttatgctgagacatgcttcaaggcgttcggagaccgtgttaagcactggatcacgctcaacgagccgcacacggttgcagtccaaggctacgatgctgggcttcatgcgccagggcgttgctcggtgctgctccatctatactgcaggacagggaactctggcactgagccctacatcgttgctcacaacttcatcctagctcatgccaccgtttcagacatgtacaggaggaaatacaaggtgaggcagctcagaatggtgagcttgggatcgcatttgacgtcatctggtacgaaccaatgacaaacagcacgatcgacattgaagctaccaagagggcgcaggagtttcagctaggatggttcgcggacccgttcttcttcggagactacccggcgacgatgcgggctcgggttggagagaggctgcccaagttcaccgcagacgaggctgcccttgtcaagggggccctggacttcatgggcataaaccactacaccactttctacacgaggcataacgacaccaacatcatcggacggctgctgaacgacaccttggcggacaccggaaccatcagcctgcccttcgacaagaacgggaagcccattggagatcgggctaattcgatatggctgtacatcgtacccagcgggatcaggaagctgatgaactatgtcaaggagcggtacaatagcccaacggtttacatcactgaaaatgggatggacgacggcaacagccctttcacctccctccagaacgccctcaaggacagcaagaggatcaagtaccacaacggctacctcaacaacgttgctgcctccataaaggaggacgggtgtgacgtgcgtgggtacttcgcgtggtcgttgctggacaactgggaatgggccgccgggtacacctccagattcgggctctacttcgtggactacaaggataacctcaagaggcaccccaagaactcggtccagtggttcaagaccctgctgagctccagctgaaggcgtcacacgggctgtgattggactgaccatttacccgacaccatacccttatcctgttgtgtcaagcactcaagctccaatcaatgtaaaataatgttacccctctctctctctctctggtagaaaaacatgtcgtgtagggctacatttagttacacattaaaagggcatatcagtaacttcaaacttagttcgtttgaaagcataagttacacgtgtggatttgtattgaaatacactttgtaaaaaaaagtcatgtttgtaaataaattaaataatatagcctagaataaatcagcagtcaagatatacatcgaatgccatgaaaagacatatgctaatctacttaattatttggtttggaatttaagattcat

SEQ ID NO: 6830 - DNA, 2205 bp, Zea Mays
ctccactcttaatagttgtagagaaatttaaagcagaggtggagtactagctagagctagtggttgctttttttttctataaataccacaatcccacgcagcggctgtttggcgcacacaaaaacctacgcgcacccggccgctctccagtgggcaggcagttggcctcctttcctcgccgcgctttggagcccacctcggtctcggtgcagtgtctcgctcgcgcgtgccggcgtgcgtgccctggtggcccatggggaggaggataatgaagagtgggcgacgcacgacgatgcagccgcggccggcgcttcttctcctcgtcctcgtcctcggcgtgtcgctgcgtggatgcattgcgcagggcgggggcggaggaggagggctcacgcgggggagcttccccaagggcttcgtcttcggcaccgccgccgccgcttaccagtacgagggagccgtgaagacggatggcagagggcaaacgatctgggacacgtttgcacacacttttggcaagatttcagacttcagcaacgcggatgttgcagttgaccagtaccaccgtttcgaggaggacgtgcagctcatggcggacatgggaatggatgcgtatcgcttctctattgcctggtcaagaattttgccaaatggtacgggccaagtcaatcaggccggcatcgaccactacaacaaagtgatcaatgcactactatcaaaaggaattcagccatatgtaaccctgtaccactgggacctcccccaggccctggaagacaggtacaacggatggctggacaggcagatagttaatgactttgcggcttatgctgagacatgcttcaaggcgttcggagaccgtgttaagcactggatcacgctcaacgagccgcacacggttgcagtccaaggctacgatgctgggcttcatgcgccagggcgttgctcggtgctgctccatctatactgcaggacagggaactctggcactgagccctacatcgttgctcacaacttcatcctagctcatgccaccgtttcagacatgtacaggaggaaatacaaggcagctcagaatggtgagcttgggatcgcatttgacgtcatctggtacgaaccaatgacaaacagcacgatcgacattgaagctaccaagagggcgcaggagtttcagctaggatggttcgcggacccgttcttcttcggagactacccggcgacgatgcgggctcgggttggagagaggctgcccaagttcaccgcagacgaggctgcccttgtcaagggggccctggacttcatgggcataaaccactacaccactttctacacgaggcataacgacaccaacatcatcggacggctgctgaacgacaccttggcggacaccggaaccatcagcctgcccttcgacaagaacgggaagcccattggagatcgggctaattcgatatggctgtacatcgtacccagcgggatcaggaagctgatgaactatgtcaaggagcggtacaatagcccaacggtttacatcactgaaaatgggatggacgacggcaacagccctttcacctccctccagaacgccctcaaggacagcaagaggatcaagtaccacaacggctacctcaacaacgttgctgcctccataaaggaggacgggtgtgacgtgcgtgggtacttcgcgtggtcgttgctggacaactgggaatgggccgccgggtacacctccagattcgggctctacttcgtggactacaaggataacctcaagaggcaccccaagaactcggtccagtggttcaagaccctgctgagctccagctgaaggcgtcacacgggctgtgattggactgaccatttacccgacaccatacccttatcctgttgtgtcaagcactcaagctccaatcaatgtaaaataatgttacccctctctctctctctctggtagaaaaacatgtcgtgtagggctacatttagttacacattaaaagggcatatcagtaacttcaaacttagttcgtttgaaagcataagttacacgtgtggatttgtattgaaatacactttgtaaaaaaaagtcatgtttgtaaataaattaaataatatagcctagaataaatcagcagtcaagatatacatcgaatgccatgaaaagacatatgctaatctacttaattatttggtttggaatttaagattcat

SEQ ID NO: 6831 - DNA, 1651 bp, Zea Mays
tgagacttaggatctcgatctggttgatgttaaattgtgattagctgattatacttgttgggaaatggtgtggagagaatttgtctggggaggaatggcaggtgcatttggggaaggcatgatgcatccagttgacactctgaaaacaaggcttcagagtcaagctataatgacaggggctaaggctcagaagaatatattccagatggtcaggacagtttgggcttctgatggtctaagaggtttttacagaggaatcagcccaggtgttactggatctcttgcgactggcgctacatatttcggtattattgaatcaaccaaagcatggttggagattgctaatcctaatctaagtggacactggtcacattttatcgctggagcgattggtgatacacttggatcctttgtctatgtgccttgcgaagtcatgaaacaaagaatgcaaatccaaggcacccaaaaatcttgggcatcagctgtagccaaaggaaatatttctcaaactcatgggatagagatgtatgggtactacaatggaatgttccatgctggctgttctatctggagagaccatggcttgaaggggctttatgcaggatactggtctacgcttgccagagatgtcccttttgctggtctaatggtcactttctatgaagcaatgaaaaagatgtctgagtatgggaaaacaaagtatttgccacacagtgatttgcatgttagcaactcctttgaaggacttgttctaggaggattggcaggcggctgtagtgcatacttgacaacccctttggatgtgatcaagacaagactgcaagtacaaggatcaacgtctaggtacaatggatggctggatgctataacaaagacgtggacttccgagggggtgcgcggcttgttcaagggaagtgttccgagaataatatggtatgttccggcatcagcattcacattcatggcagtggaattcctaagggaccatttcaacgacaaggttgatgcggatgcccatgaagtaacctccctgtcaatggacacaaaatcagaagttgagaaatcagcttagggtttcttttcttatgatctatgaagtgtattggtatccctccccggtggaaattatccggcgggatctttctgtcttgggcaacaaactatgtttcggtcatgtaaatgcggaggacattcattggcagctgggcggagacattgttgtgtaccagaaagaaagtaattgacaacaacatgatcatattgtggcgggaaatttggatccatatcattaaaagatcaccactttggatccataccattactatctcacttacatgtgggtcgacatgagtcaatgacatgtggggtccatggtatatatttaaagtttggatcttttaatggtatagatccaattgttcctattgtggcagcaattttcttagatagatagatattggtgagtggatggaatgagagaagtgaacatgtaacgtttctggaacgaaagaccaatgccaccggtgtattagagcttctgaatctctgttgctgatgttattgccattcttgcgtattgaaatattggatcgatttgccataaatcgtatcctgcgcagcgcagtcgaattggttacaaaatcaagaaaaa

SEQ ID NO: 6832 - DNA, 1728 bp, Zea Mays
ggcagaaacgtgaccaaagccgtgtccatggcgcgccgttctaaaccctaaacctttcgacctgctttatactagacctcatcgagaatctcacgcgtcggcgaccatggcggcgtctccgtcttctccccatgccgcccccggagttagcggccagagcctgtccccctcagcgccgtctccccacctccccaactatttcatgtggagagaatttgtctggggaggaatggcaggtgcatttggggaaggcatgatgcatccagttgacactctgaaaacaaggcttcagagtcaagctataatgacaggggctaaggtttttacagaggaatcagcccaggtgttactggatctcttgcgactggcgctacatatttcggtattattgaatcaaccaaagcatggttggagattgctaatcctaatctaagtggacactggtcacattttatcgctggagcgattggtgatacacttggatcctttgtctatgtgccttgcgaagtcatgaaacaaagaatgcaaatccaaggcacccaaaaatcttgggcatcagctgtagccaaaggaaatatttctcaaactcatgggatagagatgtatgggtactacaatggaatgttccatgctggctgttctatctggagagaccatggcttgaaggggctttatgcaggatactggtctacgcttgccagagatgtcccttttgctggtctaatggtcactttctatgaagcaatgaaaaagatgtctgagtatgggaaaacaaagtatttgccacacagtgatttgcatgttagcaactcctttgaaggacttgttctaggaggattggcaggcggctgtagtgcatacttgacaacccctttggatgtgatcaagacaagactgcaagtacaaggatcaacgtctaggtacaatggatggctggatgctataacaaagacgtggacttccgagggggtgcgcggcttgttcaagggaagtgttccgagaataatatggtatgttccggcatcagcattcacattcatggcagtggaattcctaagggaccatttcaacgacaaggttgatgcggatgcccatgaagtaacctccctgtcaatggacacaaaatcagaagttgagaaatcagcttagggtttcttttcttatgatctatgaagtgtattggtatccctccccggtggaaattatccggcgggatctttctgtcttgggcaacaaactatgtttcggtcatgtaaatgcggaggacattcattggcagctgggcggagacattgttgtgtaccagaaagaaagtaattgacaacaacatgatcatattgtggcgggaaatttggatccatatcattaaaagatcaccactttggatccataccattactatctcacttacatgtgggtcgacatgagtcaatgacatgtggggtccatggtatatatttaaagtttggatcttttaatggtatagatccaattgttcctattgtggcagcaattttcttagatagatagatattggtgagtggatggaatgagagaagtgaacatgtaacgtttctggaacgaaagaccaatgccaccggtgtattagagcttctgaatctctgttgctgatgttattgccattcttgcgtattgaaatattggatcgatttgccataaatcgtatcctgcgcagcgcagtcgaattggttacaaaatcaagaaaaa

SEQ ID NO: 6833 - DNA, 2018 bp, Zea Mays
tcccctctcacccttgccgccaccgtcctctatctgccgttccaccggcggcgtcgcctcccacagtcccactgaagcctctcgcggacccttccagaacttgtcctcgaccgccccgtggtccggcctcttaccgctccgcttcctcctacaccggatttaggcttattgacgataatgtgctaggagaacgaatttgggtggcacgtgagtggtgatccgttgccctccctgacaaagacgttatgtctatgaagaggcattttgcgatattcaccaccgcaagcctcccatggatgacaggaacatccatcaaccctttgttccgggctgcttatctggcaaaggatggtgataaggatgtcacactggtgatcccttggctttgtctaagggaccaagagttggtttaccctaacaatattgtatttgactcgccttccgagcaagagagctatgttcgccactggatcgaggagaggattgactttaggccatccttcagcatcaaattctacccaggaaagttttctaaagaaatgagaagcatcctccctgttggggatattacagaatgcattccagatgaagttgctgacgttgctgtattggaagagcccgagcatctaaattggtaccaccatgggcgaagatggaaaaataagttccgtcgagttataggaattgtccatacaaattatctagcatatgtaaggagagaaaagaatggtcaagttattgcttgtttcctaaagtatgctaacacttgggtaactcgaatctattgccacaagattatcagattgtcaggtgccacccaaaatctgcccagaatggggagaaagccttcacaaagggggcatactacatcgggaagatggtatggagtaagggatacagggagcttcttgatctgctgtccaaatatcagagcaagttggttggtcttgaagtggatttatatggcagcggagaagattctgatgaggtctgtgaatctgccaaacgtttaagtttgtctgtcaatgttcatcctggtcgtgatcatgcagatcccttgttccacgagtataaagtattcatcaatcccagcaccacagatgtggtctgtacgaccaccgctgaagccctggcaatgggaaagatagttatatgtgccaatcacccgtcaaatgagttcttcaagcagttccccaactgccgtgtctatgacaatgaagacgagtttgtacaactaaccctgaatgctctatcagagcagcctgctccattgacagacacgcagaggtacgagttgtcatgggacgctgcgactgaaagattcatcgaggcctctgatataaatcctcatgtgccggagtccagggcccatcaaaactctagggctttgttgcctgcttttctaagaactcgtaaactgaaacagaacttagaggatgcgtcagtttacctgcaccaagccctgtcaggtctggaagtcactcgctgtgcgtttggtgctgttcctaagacgctgcagcctgacgaacacctctgtaaagaccttggtttggctcctccggcaaagaagagaaggctgaaaattaagaagacgtaacgttggtgctgttccaaagatgacgtaacgtttaagatgagcaatgcttcgcctcatgtacagcacaatgtggtagacatttttactatttttcttctcaaaagagacattatcatacagtccggactccggtgggatttctaatggaggtttaatgcttcttttgactatttattactgggacgtgtgaactggggattagcacattgtaaattggtgtgctagcagctagcttagagagctaaggattctttgaatagtgctgtaattgtgtgagccgattaatggatcgtaatgaactgtgatgtctggtgtactcgagctcatcgtttaggccctcttttgaatgtgagaatttctgtttgctgtttatttcctttgaaaatcaactgattcttataaaatttctaggaaatttgtg

SEQ ID NO: 6834 - DNA, 2014 bp, Zea Mays
tcccctctcacccttgccgccaccgtcctctatctgccgttccaccggcggcgtcgcctcccacagtcccactgaagcctctcgcggacccttccagaacttgtcctcgaccgccccgtggtccggcctcttaccgctccgcttcctcctacaccggatttaggcttattgacgataatgtgctaggagaacgaatttgggtggcacgtgagtggtgatccgttgccctccctgacaaagacgttatgtctatgaagaggcattttgcgatattcaccaccgcaagcctcccatggatgacaggaacatccatcaaccctttgttccgggctgcttatctggcaaaggatggtgataaggatgtcacactggtgatcccttggctttgtctaagggaccaagagttggtttaccctaacaatattgtatttgactcgccttccgagcaagagagctatgttcgccactggatcgaggagaggattgactttaggccatccttcagcatcaaattctacccaggaaagttttctaaagaaatgagaagcatcctccctgttggggatattacagaatgcattccagatgaagttgctgacgttgctgtattggaagagcccgagcatctaaattggtaccaccatgggcgaagatggaaaaataagttccgtcgagttataggaattgtccatacaaattatctagcatatgtaaggagagaaaagaatggtcaagttattgcttgtttcctaaagtatgctaacacttgggtaactcgaatctattgccacaagattatcagattgtcaggtgccacccaaaatctgcccaggtctgttatatgcaatgtccatggtgttaatccaaaatttcttgaggtaggcaagctaaagttgaggcagctgcagaatggggagaaagccttcacaaagggggcatactacatcgggaagatggtatggagtaagggatacagggagcttcttgatctgctgtccaaatatcagagcaagttggttggtcttgaagtggatttatatggcagcggagaagattctgatgaggtataaagtattcatcaatcccagcaccacagatgtggtctgtacgaccaccgctgaagccctggcaatgggaaagatagttatatgtgccaatcacccgtcaaatgagttcttcaagcagttccccaactgccgtgtctatgacaatgaagacgagtttgtacaactaaccctgaatgctctatcagagcagcctgctccattgacagacacgcagaggtacgagttgtcatgggacgctgcgactgaaagattcatcgaggcctctgatataaatcctcatgtgccggagtccagggcccatcaaaactctagggctttgttgcctgcttttctaagaactcgtaaactgaaacagaacttagaggatgcgtcagtttacctgcaccaagccctgtcaggtctggaagtcactcgctgtgcgtttggtgctgttcctaagacgctgcagcctgacgaacacctctgtaaagaccttggtttggctcctccggcaaagaagagaaggctgaaaattaagaagacgtaacgttggtgctgttccaaagatgacgtaacgtttaagatgagcaatgcttcgcctcatgtacagcacaatgtggtagacatttttactatttttcttctcaaaagagacattatcatacagtccggactccggtgggatttctaatggaggtttaatgcttcttttgactatttattactgggacgtgtgaactggggattagcacattgtaaattggtgtgctagcagctagcttagagagctaaggattctttgaatagtgctgtaattgtgtgagccgattaatggatcgtaatgaactgtgatgtctggtgtactcgagctcatcgtttaggccctcttttgaatgtgagaatttctgtttgctgtttatttcctttgaaaatcaactgattcttataaaatttctaggaaatttgtg

SEQ ID NO: 6835 - DNA, 3674 bp, Zea Mays
cccaacttccgtccgatccatttgcggccgagattctcccaagatgtggtttctattctatcgccgtcattgcgctctcctcccgttgtaaacccaaagaccttcgtcgcacggacccgtccttgctaattgctcactccatcggcgccgggtcatcctcgtggccccgtgccgcaccgcgaaaccaaaatctcgcaatcctaacctaccccagcgacctagcgccgtcgtcgctcgacctcccctcgccgcgccgggccccccagagggtctcaggccatagcgaggagccggggttccgctccgacccgaatccgagcctcccccaggacgcagcgggtctcgtttccgtactcgtagcaggaagtttcgcgcgagggattgattgtcgagctagagatgtacgggcagggagggagcttcaatccacactatcgccatggcccgcctccgccccagcagcaagctggggtaactgggtccttcccccagcaacctgtgccaccgcctcggccaccttacccacagcaccctggagtgcggcctccggctgggccgtaccagcatggcgtgctgccacatcagaaccagccatacccctttgcgcagcatggtcggatgcaccagatgccaatgcttccgccacagcagagaggttatgggtcgatgccaatgccagggtcgctgcctccgcaacaagctatgcatcaggcccctccacagtatccgcccctccctccacctccacctcggccgcctggctttgttcatgataattcatgcggcgcagaggcagaagcaaaagaaggtgcatctgaaggtggtcgttttgccaaaactctggaagcagctactcagctaattgtttctgatgactcagatatggacatggatggggatgaggactctccatcaaagcagccccttaccccagaaacttctttgcctgtgactgttgaatgtactggaaatgttaatgtgtcaaagttcagtgatgtttcaactgaggacaatgctaaaactgcggatgcaactgaggacaatgctaaaactgcgcatgcaactgaggacggtgggagcacattccaactgatacaaggttatggctccgatgacagtgcaaatgaggctgatgctggtcctggcagtgctaatacccttgtgacattgcctgaagataacctgcatggtcatttaagtgatagtaatactgagtttgattatcagaaacatgttaatgcaaaaggaaatgtgaatacccctcatggcactgagcaaaatggtaaggctgaaaattatcatctcaaggttgagagcaacccagtgaagcatggcacagatgtacttgggcatctggccaaagaagatacaagtggcagtgaaattgagggaggtcaaagtagtaaaaggcatgggaggatacaaaagaaacgaacccggagcatctcacctcagggtagaagtggtagtccagtgggggcaaacaagagcagtccatcccaaagttcttcacctggaaagcagagcaggccaccatttgctaagcgtctccattctgctgatgatggtaatgattcagaaggtagagttgttcagcaagagggcctgtcattgacatcaaaattggatagttcttctaatgatttaattggtaaagtgggagatgctgctgcggttggtgttgcccttgggcagcattgtcacagtgacaatttaatttctgagcattcacaactaatggctgctggtgctactcataagatgcaaatgccatgccccccatctgagtctctatcagacttaaatgtgtcttcatcagcaggtggcccaattcttacgaaccaacctgctgcaggtgtcccatatgtgtctgtagaaactaccaagagctccatgacatctaaacatctccagtctcatcctcagagtttgagtcctcctgaacacatgccatcctcaaatatgattcagctaccaggacagccatcatttgcaacatcagaattccctcaaatgcagttccaccataaagttgttgcaccagcaaatgaattcttgcagaaccagatgagaagctaccctccacaagatgtgtctcatcctagaccattcgatttccatcatcatactctcccaccagcagttccttctaaccagcagccttctaccattcctgttgagaatgctccagtacctcatcataacagatggccagagtattctggtggtgttggtctatcctattcatctcatcggcctccatatggtcagcatcaacctcctgggaatcttgattcaggaagtaacttggtttatccctctttccagagatatccatcaaatctaccagtcagtaacaatattggtcccttatctgatgccgatttgactaaatcgtctatcaaaccccactacaatccatttgcatctacctttgataaaacagatccaagtctagatattgggcctcctgtaagccctaatgcagttggttctgtttccacaacagcagaacacatgaatacactgtctccttttggtcgatccagagcacatgcccatggaaattctgcagaacctgtgcccaatagacaaaagttactccatcaggagtttgcttctggtgctccgtatgatccattagttgacagtattgaaccatcaagcagttcaatcaacaaggtagatcttcgtaaagagaagaactggagtgctgctgataggcgtgatgcatcgaaatttatgaacctagaagtggacagtgaaaatatgcatggactgggggttgttgctgagtcagaagttgagggacttggagaggtggcagcagatactgagacaggtgtggtggagaatgcaagtcctgagttcttgggtggtaaagattggaactcagatatccctgttgattttgacaatgaccaaacattggacaaaaataagaagggtaaagattccagatcaatgaagctttttaagagtgctattgcagattttgttaaggaagttcttaaaccatcatggaggcagggtaacatgagcaaagaggctttcaaaactattgtcaggaaaacagttgataaggtttccggttcagttcctagcagtcatattccaaaaacacctgccaagattaaacattatgtacaatcctcccaaaggaaggtgaccaaattagtaatggggtatgtcgacaagtatgtgaagccatagagtaatgtggcattgtgctgaatcagaactgtcatggttccagagtctgtgctgcattctactaaatgaggctgcaaatttggtaatctttctgatgaaacggttgttccacagtaaggtagtttgctctagttctgcaggaaatgctgtattttattggagtgacatgtctagatgtgcttccagtattgataatttgctgcctgatttcttgtaccctgtaagggtgcgatatttgtgcgaacatgctgctgaaagaactttgtttcttaatggtgattatgcatactgagagctgtaaggcttactgctgaatgaactttgtttctgaatggtgaatatgcatactgagagctgtgttaacttggctatcttagctctacagaaattgaaaaaggcacacttgatgcctttgcacattttcgaaagggcttttgaaagtcttggcaactatggttctt

SEQ ID NO: 6836 - DNA, 3540 bp, Zea Mays
cccaagatgtggtttctattctatcgccgtcattgcgctctcctcccgttgtaaacccaaagaccttcgtcgcacggacccgtccttgctaattgctcactccatcggcgccgggtcatcctcgtggccccgtgccgcaccgcgaaaccaaaatctcgcaatcctaacctaccccagcgacctagcgccgtcgtcgctcgacctcccctcgccgcgccgggccccccagagggtctcaggccatagcgaggagccggggttccgctccgacccgaatccgagcctcccccaggacgcagcgggtctcgtttccgtactcgtagcaggaagtttcgcgcgagggattgattgtcgagctagagatgtacgggcagggagggagcttcaatccacactatcgccatggcccgcctccgccccagcagcaagctggggtaactgggtccttcccccagcaacctgtgccaccgcctcggccaccttacccacagcaccctggagtgcggcctccggctgggccgtaccagcatggcgtgctgccacatcagaaccagccatacccctttgcgcagcatggtcggatgcaccagatgccaatgcttccgccacagcagagaggttatgggtcgatgccaatgccagggtcgctgcctccgcaacaagctatgcatcaggcccctccacatcatgcggcgcagaggcagaagcaaaagaaggtgcatctgaaggtggtcgttttgccaaaactctggaagcagctactcagctaattgtttctgatgactcagatatggacatggatggggatgaggactctccatcaaagcagccccttaccccagaaacttctttgcctgtgactgttgaatgtactggaaatgttaatgtgtcaaagttcagtgatgtttcaactgaggacaatgctaaaactgcggatgcaactgaggacaatgctaaaactgcgcatgcaactgaggacggtgggagcacattccaactgatacaaggttatggctccgatgacagtgcaaatgaggctgatgctggtcctggcagtgctaatacccttgtgacattgcctgaagataacctgcatggtcatttaagtgatagtaatactgagtttgattatcagaaacatgttaatgcaaaaggaaatgtgaatacccctcatggcactgagcaaaatggtaaggctgaaaattatcatctcaaggttgagagcaacccagtgaagcatggcacagatgtacttgggcatctggccaaagaagatacaagtggcagtgaaattgagggaggtcaaagtagtaaaaggcatgggaggatacaaaagaaacgaacccggagcatctcacctcagggtagaagtggtagtccagtgggggcaaacaagagcagtccatcccaaagttcttcacctggaaagcagagcaggccaccatttgctaagcgtctccattctgctgatgatggtaatgattcagaaggtagagttgttcagcaagagggcctgtcattgacatcaaaattggatagttcttctaatgatttaattggtaaagtgggagatgctgctgcggttggtgttgcccttgggcagcattgtcacagtgacaatttaatttctgagcattcacaactaatggctgctggtgctactcataagatgcaaatgccatgccccccatctgagtctctatcagacttaaatgtgtcttcatcagcaggtggcccaattcttacgaaccaacctgctgcaggtgtcccatatgtgtctgtagaaactaccaagagctccatgacatctaaacatctccagtctcatcctcagagtttgagtcctcctgaacacatgccatcctcaaatatgattcagctaccaggacagccatcatttgcaacatcagaattccctcaaatgcagttccaccataaagttgttgcaccagcaaatgaattcttgcagaaccagatgagaagctaccctccacaagatgtgtctcatcctagaccattcgatttccatcatcatactctcccaccagcagttccttctaaccagcagccttctaccattcctgttgagaatgctccagtacctcatcataacagatggccagagtattctggtggtgttggtctatcctattcatctcatcggcctccatatggtcagcatcaacctcctgggaatcttgattcaggaagtaacttggtttatccctctttccagagatatccatcaaatctaccagtcagtaacaatattggtcccttatctgatgccgatttgactaaatcgtctatcaaaccccactacaatccatttgcatctacctttgataaaacagatccaagtctagatattgggcctcctgtaagccctaatgcagttggttctgtttccacaacagcagaacacatgaatacactgtctccttttggtcgatccagagcacatgcccatggaaattctgcagaacctgtgcccaatagacaaaagttactccatcaggagtttgcttctggtgctccgtatgatccattagttgacagtattgaaccatcaagcagttcaatcaacaaggtagatcttcgtaaagagaagaactggagtgctgctgataggcgtgatgcatcgaaatttatgaacctagaagtggacagtgaaaatatgcatggactgggggttgttgctgagtcagaagttgagggacttggagaggtggcagcagatactgagacaggtgtggtggagaatgcaagtcctgagttcttgggtggtaaagattggaactcagatatccctgttgattttgacaatgaccaaacattggacaaaaataagaagggtaaagattccagatcaatgaagctttttaagagtgctattgcagattttgttaaggaagttcttaaaccatcatggaggcagggtaacatgagcaaagaggctttcaaaactattgtcaggaaaacagttgataaggtttccggttcagttcctagcagtcatattccaaaaacacctgccaagattaaacattatgtacaatcctcccaaaggaaggtgaccaaattagtaatggggtatgtcgacaagtatgtgaagccatagagtaatgtggcattgtgctgaatcagaactgtcatggttccagagtctgtgctgcattctactaaatgaggctgcaaatttggtaatctttctgatgaaacggttgttccacagtaaggtagtttgctctagttctgcaggaaatgctgtattttattggagtgacatgtctagatgtgcttccagtattgataatttgctgcctgatttcttgtaccctgtaagggtgcgatatttgtgcgaacatgctgctgaaagaactttgtttcttaatggtgattatgcatactgagagctgtaaggcttactgctgaatgaactttgtttctgaatggtgaatatgcatactgagagctgtgttgctttgtccaatcctctccataccctttgctcccaaacatgctggggcaccaccatcg

SEQ ID NO: 6837 - DNA, 4323 bp, Zea Mays
cccaacttccgtccgatccatttgcggccgagattctcccaagatgtggtttctattctatcgccgtcattgcgctctcctcccgttgtaaacccaaagaccttcgtcgcacggacccgtccttgctaattgctcactccatcggcgccgggtcatcctcgtggccccgtgccgcaccgcgaaaccaaaatctcgcaatcctaacctaccccagcgacctagcgccgtcgtcgctcgacctcccctcgccgcgccgggccccccagagggtctcaggccatagcgaggagccggggttccgctccgacccgaatccgagcctcccccaggacgcagcgggtctcgtttccgtactcgtagcaggaagtttcgcgcgagggattgattgtcgagctagagatgtacgggcagggagggagcttcaatccacactatcgccatggcccgcctccgccccagcagcaagctggggtaactgggtccttcccccagcaacctgtgccaccgcctcggccaccttacccacagcaccctggagtgcggcctccggctgggccgtaccagcatggcgtgctgccacatcagaaccagccatacccctttgcgcagcatggtcggatgcaccagatgccaatgcttccgccacagcagagaggttatgggtcgatgccaatgccagggtcgctgcctccgcaacaagctatgcatcaggcccctccacagtatccgcccctccctccacctccacctcggccgcctggctttgttcatgataattcatgcggcgcagaggcagaagcaaaagaaggtgcatctgaaggtggtcgttttgccaaaactctggaagcagctactcagctaattgtttctgatgactcagatatggacatggatggggatgaggactctccatcaaagcagccccttaccccagaaacttctttgcctgtgactgttgaatgtactggaaatgttaatgtgtcaaagttcagtgatgtttcaactgaggacaatgctaaaactgcggatgcaactgaggacaatgctaaaactgcgcatgcaactgaggacggtgggagcacattccaactgatacaaggttatggctccgatgacagtgcaaatgaggctgatgctggtcctggcagtgctaatacccttgtgacattgcctgaagataacctgcatggtcatttaagtgatagtaatactgagtttgattatcagaaacatgttaatgcaaaaggaaatgtgaatacccctcatggcactgagcaaaatggtaaggctgaaaattatcatctcaaggttgagagcaacccagtgaagcatggcacagatgtacttgggcatctggccaaagaagatacaagtggcagtgaaattgagggaggtcaaagtagtaaaaggcatgggaggatacaaaagaaacgaacccggagcatctcacctcagggtagaagtggtagtccagtgggggcaaacaagagcagtccatcccaaagttcttcacctggaaagcagagcaggccaccatttgctaagcgtctccattctgctgatgatggtaatgattcagaaggtagagttgttcagcaagagggcctgtcattgacatcaaaattggatagttcttctaatgatttaattggtaaagtgggagatgctgctgcggttggtgttgcccttgggcagcattgtcacagtgacaatttaatttctgagcattcacaactaatggctgctggtgctactcataagatgcaaatgccatgccccccatctgagtctctatcagacttaaatgtgtcttcatcagcaggtggcccaattcttacgaaccaacctgctgcaggtgtcccatatgtgtctgtagaaactaccaagagctccatgacatctaaacatctccagtctcatcctcagagtttgagtcctcctgaacacatgccatcctcaaatatgattcagctaccaggacagccatcatttgcaacatcagaattccctcaaatgcagttccaccataaagttgttgcaccagcaaatgaattcttgcagaaccagatgagaagctaccctccacaagatgtgtctcatcctagaccattcgatttccatcatcatactctcccaccagcagttccttctaaccagcagccttctaccattcctgttgagaatgctccagtacctcatcataacagatggccagagtattctggtggtgttggtctatcctattcatctcatcggcctccatatggtcagcatcaacctcctgggaatcttgattcaggaagtaacttggtttatccctctttccagagatatccatcaaatctaccagtcagtaacaatattggtcccttatctgatgccgatttgactaaatcgtctatcaaaccccactacaatccatttgcatctacctttgataaaacagatccaagtctagatattgggcctcctgtaagccctaatgcagttggttctgtttccacaacagcagaacacatgaatacactgtctccttttggtcgatccagagcacatgcccatggaaattctgcagaacctgtgcccaatagacaaaagttactccatcaggagtttgcttctggtgctccgtatgatccattagttgacagtattgaaccatcaagcagttcaatcaacaaggtagatcttcgtaaagagaagaactggagtgctgctgataggcgtgatgcatcgaaatttatgaacctagaagtggacagtgaaaatatgcatggactgggggttgttgctgagtcagaagttgagggacttggagaggtggcagcagatactgagacaggtgtggtggagaatgcaagtcctgagttcttgggtggtaaagattggaactcagatatccctgttgattttgacaatgaccaaacattggacaaaaataagaagggtaaagattccagatcaatgaagctttttaagagtgctattgcagattttgttaaggaagttcttaaaccatcatggaggcagggtaacatgagcaaagaggctttcaaaactattgtcaggaaaacagttgataaggtttccggttcagttcctagcagtcatattccaaaaacacctgccaagattaaacattatgtacaatcctcccaaaggaaggtgaccaaattagtaatggggtatgtcgacaagtatgtgaagccatagagtaatgtggcattgtgctgaatcagaactgtcatggttccagagtctgtgctgcattctactaaatgaggctgcaaatttggtaatctttctgatgaaacggttgttccacagtaaggtagtttgctctagttctgcaggaaatgctgtattttattggagtgacatgtctagatgtgcttccagtattgataatttgctgcctgatttcttgtaccctgtaagggtgcgatatttgtgcgaacatgctgctgaaagaactttgtttcttaatggtgattatgcatactgagagctgtaaggcttactgctgaatgaactttgtttctgaatggtgaatatgcatactgagagctaataatatcctgctctgctatcgttgaacgttgcctatgctaggagcttgtcgaaagctagtagacgcaacaagaaaaaggacagtattaccatcaaattgcctatggagtaatgaagactaccatcctttcgacgctggggcttagtatagacacttgtatccctgaaagaatatgttgtgccccagctcaaatttactagtatggtttcgaatctagtagtcagtatggtgtttttcagtagtttagccgttatatttagagtctgattccacaaattgacatagattttagcaaaactcacaaagtgcacgtacattgctgtcgtttctatttatgcttaagtatagaatataaaacataaagacatgtgtgttatgttggctaggtgagtgaatttgagtttggagctaagaactatggttctaatttctatttgcgcataatgttagcttttttatcatttaaaatgtgggagggcgcgacgatggggaaaccatggaaacggacggagaagtccaagttactccctccgcgtaaccctcttttttgtgtggtggtttcacaaaccagcagtccagcacaccatccacctttaatagctaattaaaaccggattatctaaatcgtggccgatttttgccattggatgccacacaaacatacgatgtggcaagggattctgtatttctgtagcgcacataaccccctccctctttcctatgggtcatggcccaacccatctctcttgttt

SEQ ID NO: 6838 - DNA, 1788 bp, Zea Mays
atgacttcttacgctagcataggacgcgtgctccggcgagcaccgagttcagggagcaccgacttgttcgttcgtcttgaggctctggagctctgtcacgttgtggtagttgagagggatctgtccaatttgcatagctgcgaaggaagattcctgagatgtctaatctctcacacacctcaaaggaagatacttcacctgagggttcaggtactaccgagagaactggagcctggagtaacatgttgaacactcttatgcagcaagcctcaatctatggtgtggctgctgggtattgtttatcagcgtcgctgctctcgatcatcaacaaatgggcaatcatgaaatttccatatcctggagccctgacagctctgcagtatttcactagtgttgctggagttctcctatgcggacagctcaagctcattgagcatgacggccttaatttgaggacaatgtggaagttcttacctgctgctgtgatgttctatatctccatcttcacaaacagtgaactcctgcttcacgccaacgtggatactttcattgtgttccgctctgctgtgcctatatttgtcgcgataggagagacgttgtatctccatcagccatggccatcactcaagacatggctttcactctccacaatacttggtggaagtgtgatctatgttttcacagacaaccaattcactgtgactgcttacacctgggcagtggcctacctagcaagcatgtccattgatttcgtgtacatcaagcatgttgtaatgaccattgggctgaacacatggggccttgtgctatacaacaaccttgaggctttgatgctattcccactcgagcttctagtaatgggagaatttgatcagatgaaggtcgacagctccaaagtgtcaaactggctttcatttgatgtggtcctccctgttgctctctcatgcctgtttggactatcaatatccttcttcggattctcctgcagacgagctatttctgctactgggttcacagtgcttggcatagtgaacaagctcctaactgttgtgattaatttgcttatctgggacaagcatgcctcttttgtgggtaccattgggctcttgatatgcatgtcaggtggtgtgctctatcagcaatccaccacgaaaccgaaggcacccaaggttgagccgaaggaagagaacgacgaggagcagcagaaattgctgcagatgcagggagttcaagagagttcataaaccttacaaagaaagtacaactacaaagaagcatatggctagtactcggaaagaggacagcctcacctgagcgtttttgtattgactagtacttgggaagaagcatatggatgaatgtagtcatgaactaggagctacaaaatcccatgttttagatattagaagtcatggaggggacctaattatcactgtgcaattctttattactatactaccacttccatttgtaacgcaaaattgttatgataggatggcaaatatacctgcattgaatacttcctatacgaaagcatctatctcatacagttcggtgacggtgatactatgatctatgtttagtcatttctctgctggagtttccctatttgttctgtaccttattgttggtgatgaagccattggttcttttgctgaaaagaaagttttgtaatcatcgatgttggtgcataagggcagctccattgtgctttctaagccggtgcaaagagcacagtttttttatttgtttgggctgcaaggagtttacacattggagaccttttat

SEQ ID NO: 6839 - DNA, 2654 bp, Zea Mays
attagatcaggggcgggaagaacatgacaaatcggaaggttcacgcgtgaccgcgagcgtgccacgcaagggcgagggagcccgcgaggcggaatgcgcctcgagatctcctctgcgcggctcgcgggtcagaccatcagaagcagaaagtcgcattagtaaattcaatcatcgtccccgcctgcaaaagatctgccgtggcctcctcgtttacctattgctggttctcaaatcgcacgccctcactgctagtgctaggctccccttcgcgcgcgcgcgcagttattacccgtccacggccgcgtgttcgcaagtatccagatccggctccccacctccggcgaccaccgcgcagagaacaattccgtccaacgggaaaccccgcgataaatcgccgcgcccatcgtttggcgtcccccacagcaccgaattcaccagggctggaggaagtgtctgaaagactcagcaacgcttcatgtgactgattggttggctgcgccggctctctagcaccgagttcagggagcaccgacttgttcgttcgtcttgaggctctggagctctgtcacgttgtggtagttgagagggatctgtccaatttgcatagctgcgaaggaagattcctgaggtacgctgtacttgttttcttatcagaaactagcacacgccattattgtgacctcgtctaacttgtcctccttgacttggacaagtgcttatgtggtacaatacctcccgttgatatttctaacacgtcctgtcatcctagcaacctaacatggttgcgacgtgccccaagcttgtttgacttccctgcctgtcatggacaaaacgcattatgccccacgagattagttcatagggctagctgctaggtggttattgcatactggtctccactctttctcttgccacctcgggcatcctcagccgccctaaaaaggatacatgcttcatacctagatcatttggtgttcagttttgtttttaagccatggcgaattcccggactggacgttacaagatgtctaatctctcacacacctcaaaggaagatacttcacctgagggttcaggtactaccgagagaactggagcctggagtaacatgttgaacactcttatgcagcaagcctcaatctatggtgtggctgctgggtattgtttatcagcgtcgctgctctcgatcatcaacaaatgggcaatcatgaaatttccatatcctggagccctgacagctctgcagtatttcactagtgttgctggagttctcctatgcggacagctcaagctcattgagcatgacggccttaatttgaggacaatgtggaagttcttacctgctgctgtgatgttctatatctccatcttcacaaacagtgaactcctgcttcacgccaacgtggatactttcattgtgttccgctctgctgtgcctatatttgtcgcgataggagagacgttgtatctccatcagccatggccatcactcaagacatggctttcactctccacaatacttggtggaagtgtgatctatgttttcacagacaaccaattcactgtgactgcttacacctgggcagtggcctacctagcaagcatgtccattgatttcgtgtacatcaagcatgttgtaatgaccattgggctgaacacatggggccttgtgctatacaacaaccttgaggctttgatgctattcccactcgagcttctagtaatgggagaatttgatcagatgaaggtcgacagctccaaagtgtcaaactggctttcatttgatgtggtcctccctgttgctctctcatgcctgtttggactatcaatatccttcttcggattctcctgcagacgagctatttctgctactgggttcacagtgcttggcatagtgaacaagctcctaactgttgtgattaatttgcttatctgggacaagcatgcctcttttgtgggtaccattgggctcttgatatgcatgtcaggtggtgtgctctatcagcaatccaccacgaaaccgaaggcacccaaggttgagccgaaggaagagaacgacgaggagcagcagaaattgctgcagatgcagggagttcaagagagttcataaaccttacaaagaaagtacaactacaaagaagcatatggctagtactcggaaagaggacagcctcacctgagcgtttttgtattgactagtacttgggaagaagcatatggatgaatgtagtcatgaactaggagctacaaaatcccatgttttagatattagaagtcatggaggggacctaattatcactgtgcaattctttattactatactaccacttccatttgtaacgcaaaattgttatgataggatggcaaatatacctgcattgaatacttcctatacgaaagcatctatctcatacagttcggtgacggtgatactatgatctatgtttagtcatttctctgctggagtttccctatttgttctgtaccttattgttggtgatgaagccattggttcttttgctgaaaagaaagttttgtaatcatcgatgttggtgcataagggcagctccattgtgctttctaagccggtgcaaagagcacagtttttttatttgtttgggctgcaaggagtttacacattggagaccttttat

SEQ ID NO: 6840 - DNA, 1145 bp, Zea Mays
aaggttgaaaagtctccaaaagcgccgagtaaaaagatctcgccccaacaaagggtacgaatacgatcacgcaatataagcatctctctctgctgcttaaagcaacccaggactctgctgcttagagctagagaggacacggaggtagagagagacgaagctagagggacgcaaaacaagctagctaagctaggaggaagatgggtcgcggcaaggtggagctgaagcggatcgagaacaagatcagccgccaggtgacgttcgccaagcgccgcaacggactgctcaagaaggcgtacgagctgtcgctgttgtgcgacgcggaggtcgcgctcatcatcttctccggccgcggccgcctctttgagttctccagctcctcatgcatgtacaaaacactcgagagataccgcagctccaactactcacaagaagtaaaaactccactggacactgaaattaaataccaggattatctcaagttgaggacaagggttgaattcctccaaactacacaaagaaatattcttggggaggatctgggtccacttagcatgaaggagctcgagcagctggaggaccaaatagagatatctctgaagcatatcagctcaagaaagaatcaaatgctacttgatcagctctttgacctcaaaagcaaggaacaagaattgctggatctcaataaagacctaaggaagcaggtaatgcaatggcctccaaacatctctgtgtatacatacctgcaagaaacaaggccagagaacgcgctccgtgtctcctgggaggaaggtgggcacagtggcgcaagtgggaatgttcttgatccttatcaggggctccttcagcacctggacaacgatccttccctgcagttcgggtaccatcatcaagcctacatggatcagctgaacaacgaggacctggtggacccgaatgagcatggtcgatctggatggatatgaaatgctctgatgacccaaaataaagttgatgcacagcagggattcaccctgcaggacgcgagactatgtattgaagctaagacctcgtgtgtgttgtgttgtgtgcgaagcttggaactttataaatcgttgtcatgcccatggctttctatttctttctcggagctgcgcaaaaccgtc

SEQ ID NO: 6841 - DNA, 1035 bp, Zea Mays
aaggttgaaaagtctccaaaagcgccgagtaaaaagatctcgccccaacaaaggagctagagaggacacggaggtagagagagacgaagctagagggacgcaaaacaagctagctaagctaggaggaagatgggtcgcggcaaggtggagctgaagcggatcgagaacaagatcagccgccaggtgacgttcgccaagcgccgcaacggactgctcaagaaggcgtacgagctgtcgctgttgtgcgacgcggaggtcgcgctcatcatcttctccggccgcggccgcctctttgagttctccagctcctcatgcatgtacaaaacactcgagagataccgcagctccaactactcacaagaagtaaaaactccactggacactgaaattaaataccaggattatctcaagttgaggacaagggttgaattcctccaaactacacaaagaaatattcttggggaggatctgggtccacttagcatgaaggagctcgagcagctggaggaccaaatagagatatctctgaagcatatcagctcaagaaagaatcaaatgctacttgatcagctctttgacctcaaaagcaaggaacaagaattgctggatctcaataaagacctaaggaagcagctgcaagaaacaaggccagagaacgcgctccgtgtctcctgggaggaaggtgggcacagtggcgcaagtgggaatgttcttgatccttatcaggggctccttcagcacctggacaacgatccttccctgcagttcgggtaccatcatcaagcctacatggatcagctgaacaacgaggacctggtggacccgaatgagcatggtcgatctggatggatatgaaatgctctgatgacccaaaataaagttgatgcacagcagggattcaccctgcaggacgcgagactatgtattgaagctaagacctcgtgtgtgttgtgttgtgtgcgaagcttggaactttataaatcgttgtcatgcccatggctttctatttctttctcggagctgcgcaaaaccgtc

SEQ ID NO: 6842 - DNA, 529 bp, Zea Mays
aaggttgaaaagtctccaaaagcgccgagtaaaaagatctcgccccaacaaagggtacgaatacgatcacgcaatataagcatctctctctgctgcttaaagcaacccaggactctgctgcttagagctagagaggacacggaggtagagagagacgaagctagagggacgcaaaacaagctagctaagctaggaggaagatgggtcgcggcaaggtggagctgaagcggatcgagaacaagatcagccgccaggtgacgttcgccaagcgccgcaacggactgctcaagaaggcgtacgagctgtcgctgttgtgcgacgcggaggtcgcgctcatcatcttctccggccgcggccgcctctttgagttctccagctcctcatgcatgtacaaaacactcgagagataccgcagctccaactactcacaagaagtaaaaactccactggacactgaagtagatttatttttcgcatcataaacactccaacaagtgtgaagacatccttgctcagtattgtctatacc

SEQ ID NO: 6843 - DNA, 2354 bp, Zea Mays
ccacccagcaggtaccatgctatccacaatgaagtttacaagtggtttaacataaaatttgacaagtttgggcggacatcttctccagagcagacagaaatctgccatgcaattttccataaattgatggaaaacaattggctcacagaaaatactatgcagcagctttactgcgatatgtgccaaaaatttctagccgataggcttgttgaaggaacatgcccaaacaaagtctgcaacgcatcagcacgaggagatcagtgtgaaacatgcagcaccttgttgaatccaacagaacttattgacccaaagtgcaaggtttgtaagaatactccacgtattcgtgacacggatcacttatttttggagcttcctctattgagagacaagctggtaaactacatcaatgaaacttcagttgctggtttgtggagtcaaaatgctattcaagcaacaaatgcatggttgaaggaagggctaaagccacgctgcatcaccagagatcttaaatggggtgttcctgttcctcatgagaagtataaagacaaggtcttctatgtttggtttgatgcacctatcggatatgtgtctattacggcatcctatacacctgaatgggagaagtggtggaagaatcctgataatgtagagttgtttcagtttatgggcaaagataatgtgccgtttcacacgatcatgttcccttcaacgctacttggaactggggaaaagtggacaatgatgaagacaataagtgttactgaatatttaaattatgaagcaggaaaattttccaagagtaaaggtattggagtctttggtaatgatgcaaaggatacaaatattcctcctgaagtatggcgatactacttgcttatgaaccgtcctgaggtatcagatacactttttacttgggctgatttgcaagccaaattgaacagcgagttgctgaacaacttggggaacttcattaatcgtgtgctaagttttattgcaaaagaagctggagctggatatgattctgttgtacctgatgctcctaatgcgggtgaacacacattgacaaagatacttgcagaaaaaacaagtaaatgggttgaacaatatctcgacgcaatggaaaaggttaaactgaaacaaggactgaagagtgcaatgggcatttctagtgatggaaatgcgtatctgcaggagagccagttttggaaactttacaaggaagatcctgcagcatgtgcgatcgtgatgaaaacttcagttggccttgtctacctgcttgcctgtctgctatcacctttcatgccctccttttctgatgaagtattacgtcaattaaatttatctccagaagaaaatttgtcattaagtgaagaaaagggagaaattgcaaaggcaaaatctccttgggattttgtaccagcagggcacagaatagggaagcctgcacctctgttcaaggaattgaaagatgaagacgtagctctccatagagaaaaatatgcagggagtcaagctgagagaagctcaaaagcagcagctgatgctgaagccaacaaagttgctaatcagctcaagggcacaaaattatccgatggaggaacaaaaaagggaccaaagaaacaatctggtggttcgaaatcgaagacagctgatgctgatattacggttgcaaaattggatattagagtgggccttatcaggaaagcagagaagcatccagatgctgattccctttacgtggaggagattgatgttggagaggacacaccaagaacagtggtcagtggcctcgtcaaattcatacctctcgaagaaatgcagaaccggaaagtttgcgtactctgcaatctgaaacctgtggcaatgcgtggtataaaatcacatgcaatggttttggctgcatcgaatgaggaccacacgaaggttgagttggtggagccacccgaatctgctgccgtgggcgagcgtgttacctttgctgggtactcgggggagcctgaggcttccctcagtggcaagagcaagacgtgggagaagctggccgccgagctgcacagtaacggtgagctcgtggcgtgctacaaagatgtgcccttcacaacctcggctggaatctgcaaggtcaagacaatagcaaacggagagattcgctaggcacatctccgaactgcagccagctgacccaatctgggaagtgctaaactttagcatcatgaacctaaacaagcctaaagccttttatgtttgaaaagtcgtgtacaagacaaactctccgtgaagagatgctttttttttacttactctactagagactcctaaaaaataccgatattaattggggttatacatgtcct

SEQ ID NO: 6844 - DNA, 2420 bp, Zea Mays
gtcggctgggagggttcccagggtcactggagttggactaggagtcagccacgatgaccagaggagccacccagcaggtaccatgctatccacaatgaagtttacaagtggtttaacataaaatttgacaagtttgggcggacatcttctccagagcagacagaaatctgccatgcaattttccataaattgatggaaaacaattggctcacagaaaatactatgcagcagctttactgcgatatgtgccaaaaatttctagccgataggcttgttgaaggaacatgcccaaacaaagtctgcaacgcatcagcacgaggagatcagtgtgaaacatgcagcaccttgttgaatccaacagaacttattgacccaaagtgcaaggtttgtaagaatactccacgtattcgtgacacggatcacttatttttggagcttcctctattgagagacaagctggtaaactacatcaatgaaacttcagttgctggtttgtggagtcaaaatgctattcaagcaacaaatgcatggttgaaggaagggctaaagccacgctgcatcaccagagatcttaaatggggtgttcctgttcctcatgagaagtataaagacaaggtcttctatgtttggtttgatgcacctatcggatatgtgtctattacggcatcctatacacctgaatgggagaagtggtggaagaatcctgataatgtagagttgtttcagtttatgggcaaagataatgtgccgtttcacacgatcatgttcccttcaacgctacttggaactggggaaaagtggacaatgatgaagacaataagtgttactgaatatttaaattatgaagcaggaaaattttccaagagtaaaggtattggagtctttggtaatgatgcaaaggatacaaatattcctcctgaagtatggcgatactacttgcttatgaaccgtcctgaggtatcagatacactttttacttgggctgatttgcaagccaaattgaacagcgagttgctgaacaacttggggaacttcattaatcgtgtgctaagttttattgcaaaagaagctggagctggatatgattctgttgtacctgatgctcctaatgcgggtgaacacacattgacaaagatacttgcagaaaaaacaagtaaatgggttgaacaatatctcgacgcaatggaaaaggttaaactgaaacaaggactgaagagtgcaatgggcatttctagtgatggaaatgcgtatctgcaggagagccagttttggaaactttacaaggaagatcctgcagcatgtgcgatcgtgatgaaaacttcagttggccttgtctacctgcttgcctgtctgctatcacctttcatgccctccttttctgatgaagtattacgtcaattaaatttatctccagaagaaaatttgtcattaagtgaagaaaagggagaaattgcaaaggcaaaatctccttgggattttgtaccagcagggcacagaatagggaagcctgcacctctgttcaaggaattgaaagatgaagacgtagctctccatagagaaaaatatgcagggagtcaagctgagagaagctcaaaagcagcagctgatgctgaagccaacaaagttgctaatcagctcaagggcacaaaattatccgatggaggaacaaaaaagggaccaaagaaacaatctggtggttcgaaatcgaagacagctgatgctgatattacggttgcaaaattggatattagagtgggccttatcaggaaagcagagaagcatccagatgctgattccctttacgtggaggagattgatgttggagaggacacaccaagaacagtggtcagtggcctcgtcaaattcatacctctcgaagaaatgcagaaccggaaagtttgcgtactctgcaatctgaaacctgtggcaatgcgtggtataaaatcacatgcaatggttttggctgcatcgaatgaggaccacacgaaggttgagttggtggagccacccgaatctgctgccgtgggcgagcgtgttacctttgctgggtactcgggggagcctgaggcttccctcagtggcaagagcaagacgtgggagaagctggccgccgagctgcacagtaacggtgagctcgtggcgtgctacaaagatgtgcccttcacaacctcggctggaatctgcaaggtcaagacaatagcaaacggagagattcgctaggcacatctccgaactgcagccagctgacccaatctgggaagtgctaaactttagcatcatgaacctaaacaagcctaaagccttttatgtttgaaaagtcgtgtacaagacaaactctccgtgaagagatgctttttttttacttactctactagagactcctaaaaaataccgatattaattggggttatacatgtcct

SEQ ID NO: 6845 - DNA, 871 bp, Zea Mays
gattacacaagatcctgttagcatatcagagcttcacaatgttgttgatgcaatatcgaaagttctagctgcccaggtaaacaaagaggaaagcattgctaatgaaactacactaattgatccaaatcaggtggcagtcctgttttctgagtggtgtcagatatgtagtcatgtaaatgctagtgatgcaatatacagtcgttttgtcacacagttggagcaggatagtctgttgaatggagatgatatctctgaacgcttcttccatattctcacggaacttgctgttacacactctctagtctccgagcaaattgttgctcctggtggatcatctcagcaatcaccacagcaaccccatatttcatatttttccattgattcatatgcaaagctcgtggttatggttctcaagattatttctgttactgtgaggaccattcagaaagatgctgaggaaaagaaagcttcatttaatccccgaccatacttccgattgtttataaattggctctatgaccttactactactgatggccatcatgatggttctaattttcaggttttgactgcatttgccaatgcattccacttgctacaacccttgagagttcctgcctggaggtctgtccatcattttggtctacttatgaatttacctttctatgttggtgtgttcaattattgtgtcatctttacgtgaatttgaaaaacatgtgctatgtatgcaattcctggtgattatgcttaactataagctttacattgctacacacttggttgtcatccataacatgtgctacattgaagcaataatgtcttggtggcccaataaatgtttggtgtacaaactgacctgacatcgtttaat

SEQ ID NO: 6846 - DNA, 850 bp, Zea Mays
gattacacaagatcctgttagcatatcagagcttcacaatgttgttgatgcaatatcgaaagtggcagtcctgttttctgagtggtgtcagatatgtagtcatgtaaatgctagtgatgcaatatacagtcgttttgtcacacagttggagcaggatagtctgttgaatggagatgatatctctgaacgcttcttccatattctcacggaacttgctgttacacactctctagtctccgagcaaattgttgctcctggtggatcatctcagcaatcaccacagcaaccccatatttcatatttttccattgattcatatgcaaagctcgtggttatggttctcaagtactcttcagtggagataacaccaaataaaggcagtatactttccaagattatttctgttactgtgaggaccattcagaaagatgctgaggaaaagaaagcttcatttaatccccgaccatacttccgattgtttataaattggctctatgaccttactactactgatggccatcatgatggttctaattttcaggttttgactgcatttgccaatgcattccacttgctacaacccttgagagttcctgcctggaggtctgtccatcattttggtctacttatgaatttacctttctatgttggtgtgttcaattattgtgtcatctttacgtgaatttgaaaaacatgtgctatgtatgcaattcctggtgattatgcttaactataagctttacattgctacacacttggttgtcatccataacatgtgctacattgaagcaataatgtcttggtggcccaataaatgtttggtgtacaaactgacctgacatcgtttaat

SEQ ID NO: 6847 - DNA, 927 bp, Zea Mays
ccaacattgattacacaagatcctgttagcatatcagagcttcacaatgttgttgatgcaatatcgaaagttctagctgcccaggtaaacaaagaggaaagcattgctaatgaaactacactaattgatccaaatcaggtggcagtcctgttttctgagtggtgtcagatatgtagtcatgtaaatgctagtgatgcaatatacagtcgttttgtcacacagttggagcaggatagtctgttgaatggagatgatatctctgaacgcttcttccatattctcacggaacttgctgttacacactctctagtctccgagcaaattgttgctcctggtggatcatctcagcaatcaccacagcaaccccatatttcatatttttccattgattcatatgcaaagctcgtggttatggttctcaagtactcttcagtggagataacaccaaataaaggcagtatactttccaagattatttctgttactgtgaggaccattcagaaagatgctgaggaaaagaaagcttcatttaatccccgaccatacttccgattgtttataaattggctctatgaccttactactactgatggccatcatgatggttctaattttcaggttttgactgcatttgccaatgcattccacttgctacaacccttgagagttcctgcctggaggtctgtccatcattttggtctacttatgaatttacctttctatgttggtgtgttcaattattgtgtcatctttacgtgaatttgaaaaacatgtgctatgtatgcaattcctggtgattatgcttaactataagctttacattgctacacacttggttgtcatccataacatgtgctacattgaagcaataatgtcttggtggcccaataaatgtttggtgtacaaactgacctgacatcgtttaat

SEQ ID NO: 6848 - DNA, 990 bp, Zea Mays
ccaacattgattacacaagatcctgttagcatatcagagcttcacaatgttgttgatgcaatatcgaaacttgcatggggaccaggttcacctgaatcgttgcaacaattgattgggatcgcaaggaataatgttctagctgcccaggtaaacaaagaggaaagcattgctaatgaaactacactaattgatccaaatcaggtggcagtcctgttttctgagtggtgtcagatatgtagtcatgtaaatgctagtgatgcaatatacagtcgttttgtcacacagttggagcaggatagtctgttgaatggagatgatatctctgaacgcttcttccatattctcacggaacttgctgttacacactctctagtctccgagcaaattgttgctcctggtggatcatctcagcaatcaccacagcaaccccatatttcatatttttccattgattcatatgcaaagctcgtggttatggttctcaagtactcttcagtggagataacaccaaataaaggcagtatactttccaagattatttctgttactgtgaggaccattcagaaagatgctgaggaaaagaaagcttcatttaatccccgaccatacttccgattgtttataaattggctctatgaccttactactactgatggccatcatgatggttctaattttcaggttttgactgcatttgccaatgcattccacttgctacaacccttgagagttcctgcctggaggtctgtccatcattttggtctacttatgaatttacctttctatgttggtgtgttcaattattgtgtcatctttacgtgaatttgaaaaacatgtgctatgtatgcaattcctggtgattatgcttaactataagctttacattgctacacacttggttgtcatccataacatgtgctacattgaagcaataatgtcttggtggcccaataaatgtttggtgtacaaactgacctgacatcgtttaat

SEQ ID NO: 6849 - DNA, 1668 bp, Zea Mays
gtcacaactgatgggttgcaccagacaggacctattcacagcgttcggtggagatcgccgccgttggcgtttcgatcgccatatttaaccaagtctccaaggtctgcatctaccctctcgttagcgtcacaacgtcgttcgtcgcggaggaagacgcgatcatcagtaaggccgtccgaggaaacagcagccaggaggaggacgtggagaaagcctcccacgtgggctttgatccggagaccagcaatctgcatgcatctggccctgcaggtatggcagaatgcgtgaactcgtgtatccctacggagtgcgcagcagatccctctggcaggcaagggcggtgcgagaagaggtacgtgccgtcggtcacgtcggcgctaatagtcggttccattctcggcctgcttcaggccgtcttcctggtcctttcggccagattcgtgctcaacatcatgggtgttaagtccggatccccgatgcaagggcctgcggtgcgctacctaacgataaggtcccttggtgcccccgctgtgctgctgtctctggccatgcaaggggttttccgggggttcaaggacaccaagacaccgttatacgctactgtggttggcgacgcggcgaacatcatactggacccgattttgatgtttgtttgccatatgggcgtcactggtgcggctattgctcatgttgtttctcagtacatgataacgttgatactgctgtgccggctcgtccagcgagttcacgttatcccacccagcattaaatctctgaaatttgggaggtttcttggatgtggattcctgctgctcgcaagggttgtcgcggtgacgttctgcgtcacgctggcggcgtccctggccgctcgccatggacccaccgtcatggcaggcttccagatctgctgccagctctggctggccacgtctcttctcgccgatggattggccgtggcaggacaggcggtgcttgcaagcgcgttcgccaagaacgacagtaagaaggtcgctgccgcgacatcccgtgtgttgcagctgagcattgtcctgggcatgggtctcaccgtcgtgctgggacttgctatgaggttcggggctggcattttcacaagcgacgtgcccgtgatccaagtcattcacagaggcatcccgtttgtcgccgggacgcagaccatcaattccctggccttcgtgtttgatggcatcaactttggagcgtcagactacagatactctgcttactccatggaagaggaagcctaggaagaataccactaaaaattggatcccgaaagagttgcggacttcaacatcacaacctagtggtcctaatgaagatgtagaagctgttggtgatgcagaggcgactcaagatgcagaaacagttgtaacagaccatggtgcagtagtagtccgtgtgccggctgaagatgcagcagtagtccgtgtgccggctgaagatgcagcagtagtctgtttgcaaactcctcctagttctccaccaacaagtgtcaagtggctcgtcaagaaaattactccgaggaaaaacttgaagcgtgctgcgcaaagtccgtagatgtgtgtctgtttgtgagagactactgatgtattattctctgtttgtgaaagactactgttgtatgaactcatctgtgcttgctgtttg

SEQ ID NO: 6850 - DNA, 2076 bp, Zea Mays
cgcggcctgccgtttcctcgtcacaactgatgggttgcaccagacaggacctattcacagcgttcggtggagatcgccgccgttggcgtttcgatcgccatatttaaccaagtctccaaggtctgcatctaccctctcgttagcgtcacaacgtcgttcgtcgcggaggaagacgcgatcatcagtaaggccgtccgaggaaacagcagccaggaggaggacgtggagaaagcctcccacgtgggctttgatccggagaccagcaatctgcatgcatctggtatggcagaatgcgtgaactcgtgtatccctacggagtgcgcagcagatccctctggcaggcaagggcggtgcgagaagaggtacgtgccgtcggtcacgtcggcgctaatagtcggttccattctcggcctgcttcaggccgtcttcctggtcctttcggccagattcgtgctcaacatcatgggtgttaagtccggatccccgatgcaagggcctgcggtgcgctacctaacgataaggtcccttggtgcccccgctgtgctgctgtctctggccatgcaaggggttttccgggggttcaaggacaccaagacaccgttatacgctactgtggttggcgacgcggcgaacatcatactggacccgattttgatgtttgtttgccatatgggcgtcactggtgcggctattgctcatgttgtttctcagtacatgataacgttgatactgctgtgccggctcgtccagcgagttcacgttatcccacccagcattaaatctctgaaatttgggaggtttcttggatgtggattcctgctgctcgcaagggttgtcgcggtgacgttctgcgtcacgctggcggcgtccctggccgctcgccatggacccaccgtcatggcaggcttccagatctgctgccagctctggctggccacgtctcttctcgccgatggattggccgtggcaggacaggcggtgcttgcaagcgcgttcgccaagaacgacagtaagaaggtcgctgccgcgacatcccgtgtgttgcagctgagcattgtcctgggcatgggtctcaccgtcgtgctgggacttgctatgaggttcggggctggcattttcacaagcgacgtgcccgtgatccaagtcattcacagaggcatcccgtttgtcgccgggacgcagaccatcaattccctggccttcgtgtttgatggcatcaactttggagcgtcagactacagatactctgcttactccatggttgctgttgcgtctgtgtcgataccatgcctgctgtacctttctgcgcataacggattcatcggtatatggatcgcattgacgatctacatgagtctgaggaccatagctagcacctggaggatgggggcagcgaggggaccatggacgtttctccggaactgatgatggattggcttggaactgatgatctgcggcacactgctgacagataaggctgcgccgcgctgcgcatgcgcctctcatgtagcatcagcgaagtatagtacgtgttctgctggtgtttaaagcttcggatatcggaggtagatgtagctatgggactatcccctcctgatcgtctgacttgtggccttgcgtggagagtttacgttgctccgttgatttatgttgtatcatgccaggatgtcagtttaataccatacatcggtaaagtgtctctctagtaactccattcttttctccttttccccccctttgtgcaagctatttttttagctgtttgatgagaccttgcaagaactgttttactgcgtggaagcagcaaaataacagcgataaaagagacgtgtagtaccagagtccctctgagtgccagtccaggatgctttgataacgttaaccagacaatttgataacaatccatactccactaagcatatagtagtgtatacccgaaaactcccatcagttatttgtccctcactccctctctatcggctttcaaccaataatcaggaacacataatgctgaaagaacacgaaatccttctagtctttgacagcatatagccgatacatcttgcaaaaataaat

SEQ ID NO: 6851 - DNA, 2547 bp, Zea Mays
aaagaaagaaagaaagaaagaagcggcgtctggccaccgtaccccgccggccggagatcagataacaagcaagcgccgcaacgcacgcgacgggccggccggggaggcgtataagtacgggcgcgtcttcttccgccgctgccccgacatctccctctctcgctggtgcgagagcgcgcgcgcaagcaagcaaggagcgtcgtgtctagctagctgagcacctggttttggagcatggaggacaacggtgccgccgccgccgccgccgctcccgcgacgagcatgcctgccgagaagcgtgtggcggtcatccagggggacgcgccgccggagccggcggcggggctactgccctgcgggccgaggaagacggggctccacctcttcgtcatgaacatcaggagcgtcttcaagctggacgggcttgggtcggaggtgctgcgcatcgcggtgcccgcgtcgcttgcgttggcggcggatccgctcgcctctttggtggacacggcgttcatcggccgtttaggttcggtggagatcgccgccgttggcgtttcgatcgccatatttaaccaagtctccaaggtctgcatctaccctctcgttagcgtcacaacgtcgttcgtcgcggaggaagacgcgatcatcagtaaggccgtccgaggaaacagcagccaggaggaggacgtggagaaagcctcccacgtgggctttgatccggagaccagcaatctgcatgcatctggccctgcaggtatggcagaatgcgtgaactcgtgtatccctacggagtgcgcagcagatccctctggcaggcaagggcggtgcgagaagaggtacgtgccgtcggtcacgtcggcgctaatagtcggttccattctcggcctgcttcaggccgtcttcctggtcctttcggccagattcgtgctcaacatcatgggtgttaagtccggatccccgatgcaagggcctgcggtgcgctacctaacgataaggtcccttggtgcccccgctgtgctgctgtctctggccatgcaaggggttttccgggggttcaaggacaccaagacaccgttatacgctactgtggttggcgacgcggcgaacatcatactggacccgattttgatgtttgtttgccatatgggcgtcactggtgcggctattgctcatgttgtttctcagtacatgataacgttgatactgctgtgccggctcgtccagcgagttcacgttatcccacccagcattaaatctctgaaatttgggaggtttcttggatgtggattcctgctgctcgcaagggttgtcgcggtgacgttctgcgtcacgctggcggcgtccctggccgctcgccatggacccaccgtcatggcaggcttccagatctgctgccagctctggctggccacgtctcttctcgccgatggattggccgtggcaggacaggcggtgcttgcaagcgcgttcgccaagaacgacagtaagaaggtcgctgccgcgacatcccgtgtgttgcagctgagcattgtcctgggcatgggtctcaccgtcgtgctgggacttgctatgaggttcggggctggcattttcacaagcgacgtgcccgtgatccaagtcattcacagaggcatcccgtttgtcgccgggacgcagaccatcaattccctggccttcgtgtttgatggcatcaactttggagcgtcagactacagatactctgcttactccatggttgctgttgcgtctgtgtcgataccatgcctgctgtacctttctgcgcataacggattcatcggtatatggatcgcattgacgatctacatgagtctgaggaccatagctagcacctggaggatgggggcagcgaggggaccatggacgtttctccggaactgatgatggattggcttggaactgatgatctgcggcacactgctgacagataaggctgcgccgcgctgcgcatgcgcctctcatgtagcatcagcgaagtatagtacgtgttctgctggtgtttaaagcttcggatatcggaggtagatgtagctatgggactatcccctcctgatcgtctgacttgtggccttgcgtggagagtttacgttgctccgttgatttatgttgtatcatgccaggatgtcagtttaataccatacatcggtaaagtgtctctctagtaactccattcttttctccttttccccccctttgtgcaagctatttttttagctgtttgatgagaccttgcaagaactgttttactgcgtggaagcagcaaaataacagcgataaaagagacgtgtagtaccagagtccctctgagtgccagtccaggatgctttgataacgttaaccagacaatttgataacaatccatactccactaagcatatagtagtgtatacccgaaaactcccatcagttatttgtccctcactccctctctatcggctttcaaccaataatcaggaacacataatgctgaaagaacacgaaatccttctagtctttgacagcatatagccgatacatcttgcaaaaataaat

SEQ ID NO: 6852 - DNA, 2555 bp, Zea Mays
gcagcgagaaaagaaagaaagaaagaaagaaagaagcggcgtctggccaccgtaccccgccggccggagataacaagcaagcgccgcaacgcacgcgacgggccggccggggaggcgtataagtacgggcgcgtcttcttccgccgctgccccgacatctccctctctcgctggtgcgagagcgcgcgcgcaagcaagcaaggagcgtcgtgtctagctagctgagcacctggttttggagcatggaggacaacggtgccgccgccgccgccgccgctcccgcgacgagcatgcctgccgagaagcgtgtggcggtcatccagggggacgcgccgccggagccggcggcggggctactgccctgcgggccgaggaagacggggctccacctcttcgtcatgaacatcaggagcgtcttcaagctggacgggcttgggtcggaggtgctgcgcatcgcggtgcccgcgtcgcttgcgttggcggcggatccgctcgcctctttggtggacacggcgttcatcggccgtttaggttcggtggagatcgccgccgttggcgtttcgatcgccatatttaaccaagtctccaaggtctgcatctaccctctcgttagcgtcacaacgtcgttcgtcgcggaggaagacgcgatcatcagtaaggccgtccgaggaaacagcagccaggaggaggacgtggagaaagcctcccacgtgggctttgatccggagaccagcaatctgcatgcatctggccctgcaggtatggcagaatgcgtgaactcgtgtatccctacggagtgcgcagcagatccctctggcaggcaagggcggtgcgagaagaggtacgtgccgtcggtcacgtcggcgctaatagtcggttccattctcggcctgcttcaggccgtcttcctggtcctttcggccagattcgtgctcaacatcatgggtgttaagtccggatccccgatgcaagggcctgcggtgcgctacctaacgataaggtcccttggtgcccccgctgtgctgctgtctctggccatgcaaggggttttccgggggttcaaggacaccaagacaccgttatacgctactgtggttggcgacgcggcgaacatcatactggacccgattttgatgtttgtttgccatatgggcgtcactggtgcggctattgctcatgttgtttctcagtacatgataacgttgatactgctgtgccggctcgtccagcgagttcacgttatcccacccagcattaaatctctgaaatttgggaggtttcttggatgtggattcctgctgctcgcaagggttgtcgcggtgacgttctgcgtcacgctggcggcgtccctggccgctcgccatggacccaccgtcatggcaggcttccagatctgctgccagctctggctggccacgtctcttctcgccgatggattggccgtggcaggacaggcggtgcttgcaagcgcgttcgccaagaacgacagtaagaaggtcgctgccgcgacatcccgtgtgttgcagctgagcattgtcctgggcatgggtctcaccgtcgtgctgggacttgctatgaggttcggggctggcattttcacaagcgacgtgcccgtgatccaagtcattcacagaggcatcccgtttgtcgccgggacgcagaccatcaattccctggccttcgtgtttgatggcatcaactttggagcgtcagactacagatactctgcttactccatggttgctgttgcgtctgtgtcgataccatgcctgctgtacctttctgcgcataacggattcatcggtatatggatcgcattgacgatctacatgagtctgaggaccatagctagcacctggaggatgggggcagcgaggggaccatggacgtttctccggaactgatgatggattggcttggaactgatgatctgcggcacactgctgacagataaggctgcgccgcgctgcgcatgcgcctctcatgtagcatcagcgaagtatagtacgtgttctgctggtgtttaaagcttcggatatcggaggtagatgtagctatgggactatcccctcctgatcgtctgacttgtggccttgcgtggagagtttacgttgctccgttgatttatgttgtatcatgccaggatgtcagtttaataccatacatcggtaaagtgtctctctagtaactccattcttttctccttttccccccctttgtgcaagctatttttttagctgtttgatgagaccttgcaagaactgttttactgcgtggaagcagcaaaataacagcgataaaagagacgtgtagtaccagagtccctctgagtgccagtccaggatgctttgataacgttaaccagacaatttgataacaatccatactccactaagcatatagtagtgtatacccgaaaactcccatcagttatttgtccctcactccctctctatcggctttcaaccaataatcaggaacacataatgctgaaagaacacgaaatccttctagtctttgacagcatatagccgatacatcttgcaaaaataaat

SEQ ID NO: 6853 - DNA, 2945 bp, Zea Mays
catctccctctgctccgggcgcaccgtcaccggggtgaggctgtattgcgtcgacagcaacacctgctttcgctacgacgggagcaccagaggctaggatatattgcttcatcagtgacagggagccaagatgccggccggagggttctcggtctcggcgccgtccggcgtcgagttcgaggctaagatcacgccgatcgtcatcatctcctgcatcatggctgccacaggcggtttgatgttcggctacgacgtcggcatctcaggtggtgtgacgtcgatggacgacttcctgggcaagttcttcccggcggtgctgcggaagaaactggaggacaaggagagtaactactgcaagtacgataaccagccgctgcagctgttcacgtcgtcgctgtacctcgcggggctgacggccaccttcttcgcctcgtacacgacgcggcgcctcggccggcgcctcaccatgctggtcgccggcgtcttcttcatcgtgggggtgatcttcaacggcgccgcccagaacctcgccatgctcatcgtcggcaggatcttgctcggctgcggcgtcggcttcgccaaccagtccaagccaacgtatacgacatgcaccgcgcaattatgtcagagcaggcgagactgggacagtgttcatgtggtaagtgtttattcattcagcagaagcttttaattagggaaaataaacgagcttgatggaggcctacatgctgttacatagtattagtatatctgcatatggggcgttgtttagctagctataggtttcaacgcttcaactgctacgccggaaaatatttccaggatgtgtatgcacgggtgcaccaaccgctctcacactagttttgtttaatggccactacacatcaggagatgggtactggccattaatattttgagacttgtagagtagctttttgccttacatttcagactgttctttgagacttcagactataactttgaagtccaaaaaaaaaaccaattttctcgtttggctggacccaggttgatggttctctttccttggtagccagcccaaagccgaacaaaacacctagttcgttatgggcccaataagttttccctttgaaaaattgtcggcccactcaatgggtatcgatgaggctgcgtcccttcttgctgtttccttttgaaaaaaactagcgcgacattctggttctgcctcgcaaacaatctgatgacattcgtttgctgcaggccgttcccctgttcctgtctgagatcgcgccgacgaggatccgcggcgggctcaacatcctgttccagctcaacgtcaccatcggcatcctgttcgccaacctcgtcaactacggcacgtccaagatccacccgtgggggtggaggctgtcgctgtcgctggcaggcatcccggcggcgctgctcaccctgggcgcgctcttcgtgacggacacgcccaacagcctcatcgagcgcggccgcctggacgagggcaaggccgtgctcaagaggatccggggcaccgacaacgtggagccggagttcaacgagatcgtggaggcgagccgcgtggcgcaggaggtcaagcacccgttccgcaacctcctgcagcgccgcaaccgcccgcagctcgtcatcgccgtcctcctccagatcttccagcagttcacggggatcaacgccatcatgttctacgcgccggtgctgttcaacacgctggggttcaagagcgacgcgtcgctctactcggccgtcatcacgggcgccgtcaacgtcctctccacgctcgtctccgtctactccgtcgaccgcgtcggccgccggatgctgctgctggaggccggcgtgcagatgttcctgtcgcaggtggccatcgccatcgtgctgggcatcaaggtcaccgaccactccgacaacctgggccacggctgggccatcatggtcgtcgtcatggtctgcaccttcgtctcctccttcgcctggtcctgggggcccctgggctggctcatccccagcgagaccttcccgctggagaccaggtcggcggggcagagcgtcaccgtctgcgtcaacctgctcttcaccttcgtcatcgcgcaggccttcctctccatgctctgccacctcaagtacgccatcttcgtcttcttctccgcctgggtcctcgtcatgtcgctcttcgtcctcttcttcctgccggagaccaagaacgtgcccatcgaggagatgaccgagagggtgtggaagcagcactggttctggaagcgctacatggacgacgacaaccaccacatcgtcaacggcaagctcaccggcgcctccgtttaactactccgtctgctctgttcatgcatcagactcacttgatagtactacagcactactactgcaacaccgcaaccgcaatcccgatggcaattgctagtactgcaactgcgatggcaatgccgccttgttgttgtacaatagcccagtgtttcggccagagtccgtgctcatctttgatttgtagtatctttcaattttcaagcagagtttacacggattgtaatcacatccttgcctggtcatctaaaactacatgtgtactatttccggcgctataacgtgtggttgattcatcacagacagtcagtcgtactcgtaggctcgtaccatgttctgagcttcaggcaagcatatatatatagtttttagtgcccattgtgcgtccagtaaacatgtgatacttacttcaggaccaagagtgtcttaattaaccattcacggagtagctgcacagtcacctttttttgttcaggttttttctcgtgatccttttgagaatctagctgcggagagaatttagttatggagaccggagagaatcctagtattgtgcagagtaagtgcggcagggtttaggatgtataaaatgacggttttctattatcacaacgactcga

SEQ ID NO: 6854 - DNA, 2381 bp, Zea Mays
gccgggcgtcttctacccatctccctctgctccgggcgcaccgtcaccggggtgaggctgtattgcgtcgacagcaacacctgctttcgctacgacgggagcaccagaggctaggatatattgcttcatcagtgacagggagccaagatgccggccggagggttctcggtctcggcgccgtccggcgtcgagttcgaggctaagatcacgccgatcgtcatcatctcctgcatcatggctgccacaggcggtttgatgttcggctacgacgtcggcatctcaggtggtgtgacgtcgatggacgacttcctgggcaagttcttcccggcggtgctgcggaagaaactggaggacaaggagagtaactactgcaagtacgataaccagccgctgcagctgttcacgtcgtcgctgtacctcgcggggctgacggccaccttcttcgcctcgtacacgacgcggcgcctcggccggcgcctcaccatgctggtcgccggcgtcttcttcatcgtgggggtgatcttcaacggcgccgcccagaacctcgccatgctcatcgtcggcaggatcttgctcggctgcggcgtcggcttcgccaaccagtccaagccaacgtatacgacatgcaccgcgcaattatgtcagagcaggcgagactgggacagtgttcatgtggccgttcccctgttcctgtctgagatcgcgccgacgaggatccgcggcgggctcaacatcctgttccagctcaacgtcaccatcggcatcctgttcgccaacctcgtcaactacggcacgtccaagatccacccgtgggggtggaggctgtcgctgtcgctggcaggcatcccggcggcgctgctcaccctgggcgcgctcttcgtgacggacacgcccaacagcctcatcgagcgcggccgcctggacgagggcaaggccgtgctcaagaggatccggggcaccgacaacgtggagccggagttcaacgagatcgtggaggcgagccgcgtggcgcaggaggtcaagcacccgttccgcaacctcctgcagcgccgcaaccgcccgcagctcgtcatcgccgtcctcctccagatcttccagcagttcacggggatcaacgccatcatgttctacgcgccggtgctgttcaacacgctggggttcaagagcgacgcgtcgctctactcggccgtcatcacgggcgccgtcaacgtcctctccacgctcgtctccgtctactccgtcgaccgcgtcggccgccggatgctgctgctggaggccggcgtgcagatgttcctgtcgcaggtggccatcgccatcgtgctgggcatcaaggtcaccgaccactccgacaacctgggccacggctgggccatcatggtcgtcgtcatggtctgcaccttcgtctcctccttcgcctggtcctgggggcccctgggctggctcatccccagcgagaccttcccgctggagaccaggtcggcggggcagagcgtcaccgtctgcgtcaacctgctcttcaccttcgtcatcgcgcaggccttcctctccatgctctgccacctcaagtacgccatcttcgtcttcttctccgcctgggtcctcgtcatgtcgctcttcgtcctcttcttcctgccggagaccaagaacgtgcccatcgaggagatgaccgagagggtgtggaagcagcactggttctggaagcgctacatggacgacgacaaccaccacatcgtcaacggcaagctcaccggcgcctccgtttaactactccgtctgctctgttcatgcatcagactcacttgatagtactacagcactactactgcaacaccgcaaccgcaatcccgatggcaattgctagtactgcaactgcgatggcaatgccgccttgttgttgtacaatagcccagtgtttcggccagagtccgtgctcatctttgatttgtagtatctttcaattttcaagcagagtttacacggattgtaatcacatccttgcctggtcatctaaaactacatgtgtactatttccggcgctataacgtgtggttgattcatcacagacagtcagtcgtactcgtaggctcgtaccatgttctgagcttcaggcaagcatatatatatagtttttagtgcccattgtgcgtccagtaaacatgtgatacttacttcaggaccaagagtgtcttaattaaccattcacggagtagctgcacagtcacctttttttgttcaggttttttctcgtgatccttttgagaatctagctgcggagagaatttagttatggagaccggagagaatcctagtattgtgcagagtaagtgcggcagggtttaggatgtataaaatgacggttttctattatcacaacgactcga

SEQ ID NO: 6855 - DNA, 573 bp, Zea Mays
tcggtaccaacctactcctccacttgtcaaacatcatattcgaccagaagatatgttaggagaacttggttatccatacgatagatatgtccccaaggtggccatgaactgagtaagtcaacaggaaacgcaggagctagaattggatgtggtatcattggaattcagtcatcagtttgacaaataacggcttagtagcaccagaaaaagagggggacatgattccacagtccgtgcagtgtcgtggtttagggatatggaaatggtgttcgttgttctggaccgtttgaagactaaatatctccagtcatgtatacaataatcttacagtcggtgaggaaattgcttgtaaaatcttgcattgacttatatcactggttaccagcagcaataagtctatatgtaaaacttctcgatttgtatatgctatgcttcctgtggagcagggaagcgaacacaagtcagccttttgtgagtgcattctgtccagtttttacttggtcatctcgtattctcgtgtgtgtcatgaccaagtggcaagctcaatcctggtattgttgtcttgtctcaaat

SEQ ID NO: 6856 - DNA, 553 bp, Zea Mays
atcaagtgttatctcattcaatcatggctgttgtggcttcaagctgcccattgccctgctgcacttcaaacatcgaagtggccatgaactgagtaagtcaacaggaaacgcaggagctagaattggatgtggtatcattggaattcagtcatcagtttgacaaataacggcttagtagcaccagaaaaagagggggacatgattccacagtccgtgcagtgtcgtggtttagggatatggaaatggtgttcgttgttctggaccgtttgaagactaaatatctccagtcatgtatacaataatcttacagtcggtgaggaaattgcttgtaaaatcttgcattgacttatatcactggttaccagcagcaataagtctatatgtaaaacttctcgatttgtatatgctatgcttcctgtggagcagggaagcgaacacaagtcagccttttgtgagtgcattctgtccagtttttacttggtcatctcgtattctcgtgtgtgtcatgaccaagtggcaagctcaatcctggtattgttgtcttgtctcaaat

SEQ ID NO: 6857 - DNA, 1092 bp, Zea Mays
cgaagcagagcacgacggacaaaaatatggcagggaaagccggcggactcaaaggggttgccctcatcggcggcagcgccaacagcacggtcgctggggtcattcacttcttcgaggacccctccaccaggtacaccgaggtgaggggcaaggtcacgggcttgactccgggaaggcatggattccacatccacgtcttcggcgacactaccaatggctgcaactcaaccggtccccattttaaccctcataataaaccccatggagctccatttgacgacgaacgacatttgggcgacctgggaaatatagtagccaatgaagatggagatgcagaagtgttcataagagacttacagatttcattgagtgggcctcattccattctgggaagggcagttgttgtacatgctgatcctgatgacctagggaggggtcaaaactagagcggctttctttttgggacagaggtagtattgaatgctggatgtagacactagacagaataactcatattgccacttgctcaatggagattttgttgccaattaataccaatgtcttttggtgctcatcaagtgttatctcattcaatcatggctgttgtggcttcaaggtggccatgaactgagtaagtcaacaggaaacgcaggagctagaattggatgtggtatcattggaattcagtcatcagtttgacaaataacggcttagtagcaccagaaaaagagggggacatgattccacagtccgtgcagtgtcgtggtttagggatatggaaatggtgttcgttgttctggaccgtttgaagactaaatatctccagtcatgtatacaataatcttacagtcggtgaggaaattgcttgtaaaatcttgcattgacttatatcactggttaccagcagcaataagtctatatgtaaaacttctcgatttgtatatgctatgcttcctgtggagcagggaagcgaacacaagtcagccttttgtgagtgcattctgtccagtttttacttggtcatctcgtattctcgtgtgtgtcatgaccaagtggcaagctcaatcctggtattgttgtcttgtctcaaat

SEQ ID NO: 6858 - DNA, 1030 bp, Zea Mays
atgaagcagagaagaagagccgtcgaagccgaagcagagcacgacggacaaaaatatggcagggaaagccggcggactcaaaggggttgccctcatcggcggcagcgccaacagcacggtcgctggggtcattcacttcttcgaggacccctccaccaggtacaccgaggtgaggggcaaggtcacgggcttgactccgggaaggcatggattccacatccacgtcttcggcgacactaccaatggctgcaactcaaccggtccccattttaaccctcataataaaccccatggagctccatttgacgacgaacgacatttgggcgacctgggaaatatagtagccaatgaagatggagatgcagaagtgttcataagagacttacagatttcattgagtgggcctcattccattctgggaagggcagttgttgtacatgctgatcctgatgacctagggagggcacacttcagattcctgaatagttgttccagtgttgaggcatcctcatatgtttaattgctcctgaccatgttacttcaatattttgaaggtggccatgaactgagtaagtcaacaggaaacgcaggagctagaattggatgtggtatcattggaattcagtcatcagtttgacaaataacggcttagtagcaccagaaaaagagggggacatgattccacagtccgtgcagtgtcgtggtttagggatatggaaatggtgttcgttgttctggaccgtttgaagactaaatatctccagtcatgtatacaataatcttacagtcggtgaggaaattgcttgtaaaatcttgcattgacttatatcactggttaccagcagcaataagtctatatgtaaaacttctcgatttgtatatgctatgcttcctgtggagcagggaagcgaacacaagtcagccttttgtgagtgcattctgtccagtttttacttggtcatctcgtattctcgtgtgtgtcatgaccaagtggcaagctcaatcctggtattgttgtcttgtctcaaat

SEQ ID NO: 6859 - DNA, 1800 bp, Zea Mays
cccatctacaaagacacgtctaatctgccagagttatttcttgggctgttggtgaaagcgatgaagaatgatgtaatgttgaagagagttgctgctttctcaaagcggctgctgcaggtggctcttcaacggcctcctcaatatgcttgcggatgccttttcattctgtcagaagtccttaaggcaaagccaccattatgggggattgtgctccagaatgaatctgttgatgatggtgatgaacactttgaagacattttagagattcccgaggactcttctgttgcctcagcagtgctacataaacataatgaaaaagtagctgcacatgagaaacacaaccttgatgctgctgatggaattgatagtgtaaaacaagtaaatttggtagatgagaacaatgcatcaactgactcgtccagacaacatgcattctatgatccacgacacagagagccttcttactgcaatgcagatcgtgtcagttggtgggagttaacagtattggcttcacatgtgcacccttcagtttctactatggctagaacattgctatctggcaacaatattgtttacagtggtgatccgctgacagacctatcacttcctgctttccttgacaaattcatggaaaagaaaccaaaagggaaccgcatagctgaaggaagatggcatggtggatcacaaattgctccggctaaaaagcttaatctgaatcatcatctcatcggagaggagcttctagaattggcagaaaatgaagtgcctcctgaagatattgttttccaccgtttctatttgaacaagaccggcactgttaagcgtaagacaaagcagaaggactcagttcttgatgaagatgcgggggaactcttagctgataatgacgctgatgaggctagtgacgagagtggagatgagatactggatctgggagatgggttggcagatgatggagaatatgactatgacgaccttgactcaaatgcatttgaagaggaaaaagatttacttagagatgacagtgatgtggaatttgatgacgtttcagatgatactgcatctggggatgaagggtcagaaaatgacgatgacattcctattctcgcgggcgattcagatggcaacttaagtgatgacgagatggttgatgctggtaagggcggtgtctcttacacaaagaaaaggagggcagggaagaagagtgggttgtctccatttgcaagcctggatgattatgagcacctaatggttggggatgctgatgcaacaacagcaaagcggaagcacatggcaacagggagagctggtggtgagaagaaaccaaagttgagaccacgaaagaaaaggtcgcggagttcagaatgagaaacatgccttttacccttaactcttttaaaatgttcaccacaatggtgttcattacatttttgtacttctggaaggcacaggattgggtaacgctattgttgagccgagaatgtattgagattagattatacaggtgctctcatatagtagtccttatcccacacaacgcatttatacgggctaagtttaagaccaactcaaagagttgtttttcttattgagtcaaattttagattttctgagtaagaaattattctccaacaggtattctatctagagttgtagattagctagcaaaggcatatcgtcctttccacttgctaagccagtcctaattttcctgtctcagctcacccttccgcgagcccgcggctttctcgcgcggtttcccttaccaacttttttgcaatttggcccttttcgggtttt

SEQ ID NO: 6860 - DNA, 3645 bp, Zea Mays
gcgctctttgagccttcgtctcccagtctcctcaactcaggtacgttgtccgcccgccgcacaccctcgccactgttcatcgttgcacgctggtgcttccctcatctccacagaacatctgattcggccagttgagttcctctcggacgctggttgtctccttcgacctccgtttccttgtcatttctgtgcctgacagcaacccgcgctcccgccgcatctattcatggcggagccgacccccaagtcgaagcgcaccaagaaagcgaagaagccctcggcccgggaaggtgatggagaggacatggatacgctcaagtctgacgtcgccacattcgcctcctccctcggcctcctccctggcgctggcgactccaacggcggcttcgatgactccgacttccgcaagtccggccccatgtataaatcctcaaaatttccttccaaacaaccccatcaaaaacctgataacacggcaaacccccatctaaaccctagacctaccaagaagccacaccctctcgagctacgtgactcctatgctgccaccaaacctggtgctgtcaacactaattaccccctgatgaaggcggcagcactctcagggcagtggtacactgatgctgatgagctggaggcgagggtcctaggcggtcgtaagcaggtgcctccagctgtggggcttcaggagatgcagggaatagtggagagaaaacgagagctggcagagaagctcatgttgcagtatgcgagggaatacgatgccgtgaggcgagggcatggtgacctgaagctcctggacatatcagcaaagtctggtacatcagctgacaaggtgtcagcatttacatgtcttgtcgaggacaatccaattgcaaacatgaaggcactcgattccctccttggtatgataacatcaaaagttggtaagaggtatgcgttcacaggattcgatgcaattaaggagttatttctcatgaggttattgcctgaccgtaagctgaaaagtcttatccaacgcccgctagacattttacctgaaacaaaagatgggtactcacttctgctcttctggcattgggaggactgcttaaaacagagatacgaaaggtttgttatggcattggaggatgcggtaaaagatatgctgccaaatcttaaggacaaagcaatgaagacagttttcatgcttttgaaaagtaagtcagaacaggaacgtcgtttgctcacagctcttgttaacaaacttggtgatcctgaaaggagagcagcatcaagtgctgcatatctgttaacatgtctcttggctgctcaccctaatatgaagatggtggtgatagatgaggtggattcttttctcttcagaccacatgttggacttagggccaagtaccaggctgtcaatttcttgagccagattcttcttacaaacaagggagatgggcctaaaattgcaaaacggtactaatgagctctggtgataccaaaggagatacatatagcaaggacagcaagaaaaaggtaggaaaaatagagggaggaaataacaagatggactccagatccaagggaaacaatgaagtgggttcaacagcaggatcagatttggagctggactccagaatcctttctgcgcttttaactggtgtaaatagggcattaccatatgttgcaagctcagaagttgacgatattgtggaagtgcagacacctattcttttcagattggttcacgctgaaaatttcaatgttggtgttcaggcattgatgcttttgttccaaatatctataaagaataatatagcaagtgatcgtttgtaccgtgcattatactcaaaactcttgagtccttctgctgttacttcctcaaagccagagttatttcttgggctgttggtgaaagcgatgaagaatgatgtaatgttgaagagagttgctgctttctcaaagcggctgctgcaggtggctcttcaacggcctcctcaatatgcttgcggatgccttttcattctgtcagaagtccttaaggcaaagccaccattatgggggattgtgctccagaatgaatctgttgatgatggtgatgaacactttgaagacattttagagattcccgaggactcttctgttgcctcagcagtgctacataaacataatgaaaaagtagctgcacatgagaaacacaaccttgatgctgctgatggaattgatagtgtaaaacaagtaaatttggtagatgagaacaatgcatcaactgactcgtccagacaacatgcattctatgatccacgacacagagagccttcttactgcaatgcagatcgtgtcagttggtgggagttaacagtattggcttcacatgtgcacccttcagtttctactatggctagaacattgctatctggcaacaatattgtttacagtggtgatccgctgacagacctatcacttcctgctttccttgacaaattcatggaaaagaaaccaaaagggaaccgcatagctgaaggaagatggcatggtggatcacaaattgctccggctaaaaagcttaatctgaatcatcatctcatcggagaggagcttctagaattggcagaaaatgaagtgcctcctgaagatattgttttccaccgtttctatttgaacaagaccggcactgttaagcgtaagacaaagcagaaggactcagttcttgatgaagatgcgggggaactcttagctgataatgacgctgatgaggctagtgacgagagtggagatgagatactggatctgggagatgggttggcagatgatggagaatatgactatgacgaccttgactcaaatgcatttgaagaggaaaaagatttacttagagatgacagtgatgtggaatttgatgacgtttcagatgatactgcatctggggatgaagggtcagaaaatgacgatgacattcctattctcgcgggcgattcagatggcaacttaagtgatgacgagatggttgatgctggtaagggcggtgtctcttacacaaagaaaaggagggcagggaagaagagtgggttgtctccatttgcaagcctggatgattatgagcacctaatggttggggatgctgatgcaacaacagcaaagcggaagcacatggcaacagggagagctggtggtgagaagaaaccaaagttgagaccacgaaagaaaaggtcgcggagttcagaatgagaaacatgccttttacccttaactcttttaaaatgttcaccacaatggtgttcattacatttttgtacttctggaaggcacaggattgggtaacgctattgttgagccgagaatgtattgagattagattatacaggtgctctcatatagtagtccttatcccacacaacgcatttatacgggctaagtttaagaccaactcaaagagttgtttttcttattgagtcaaattttagattttctgagtaagaaattattctccaacaggtattctatctagagttgtagattagctagcaaaggcatatcgtcctttccacttgctaagccagtcctaattttcctgtctcagctcacccttccgcgagcccgcggctttctcgcgcggtttcccttaccaacttttttgcaatttggcccttttcgggtttt

SEQ ID NO: 6861 - DNA, 3706 bp, Zea Mays
cgccccccagccgccaccgccagttcttccattcctccgcgctctttgagccttcgtctcccagtctcctcaactcaggtacgttgtccgcccgccgcacaccctcgccactgttcatcgttgcacgctggtgcttccctcatctccacagaacatctgattcggccagttgagttcctctcggacgctggttgtctccttcgacctccgtttccttgtcatttctgtgcctgacagcaacccgcgctcccgccgcatctattcatggcggagccgacccccaagtcgaagcgcaccaagaaagcgaagaagccctcggcccgggaaggtgatggagaggacatggatacgctcaagtctgacgtcgccacattcgcctcctccctcggcctcctccctggcgctggcgactccaacggcggcttcgatgactccgacttccgcaagtccggccccatgtataaatcctcaaaatttccttccaaacaaccccatcaaaaacctgataacacggcaaacccccatctaaaccctagacctaccaagaagccacaccctctcgagctacgtgactcctatgctgccaccaaacctggtgctgtcaacactaattaccccctgatgaaggcggcagcactctcagggcagtggtacactgatgctgatgagctggaggcgagggtcctaggcggtcgtaagcaggtgcctccagctgtggggcttcaggagatgcagggaatagtggagagaaaacgagagctggcagagaagctcatgttgcagtatgcgagggaatacgatgccgtgaggcgagggcatggtgacctgaagctcctggacatatcagcaaagtctggtacatcagctgacaaggtgtcagcatttacatgtcttgtcgaggacaatccaattgcaaacatgaaggcactcgattccctccttggtatgataacatcaaaagttggtaagaggtatgcgttcacaggattcgatgcaattaaggagttatttctcatgaggttattgcctgaccgtaagctgaaaagtcttatccaacgcccgctagacattttacctgaaacaaaagatgggtactcacttctgctcttctggcattgggaggactgcttaaaacagagatacgaaaggtttgttatggcattggaggatgcggtaaaagatatgctgccaaatcttaaggacaaagcaatgaagacagttttcatgcttttgaaaagtaagtcagaacaggaacgtcgtttgctcacagctcttgttaacaaacttggtgatcctgaaaggagagcagcatcaagtgctgcatatctgttaacatgtctcttggctgctcaccctaatatgaagatggtggtgatagatgaggtggattcttttctcttcagaccacatgttggacttagggccaagtaccaggctgtcaatttcttgagccagattcttcttacaaacaagggagatgggcctaaaattgcaaaacggttggtggatgtctacattgcacttttcaaggtactaatgagctctggtgataccaaaggagatacatatagcaaggacagcaagaaaaaggtaggaaaaatagagggaggaaataacaagatggactccagatccaagggaaacaatgaagtgggttcaacagcaggatcagatttggagctggactccagaatcctttctgcgcttttaactggtgtaaatagggcattaccatatgttgcaagctcagaagttgacgatattgtggaagtgcagacacctattcttttcagattggttcacgctgaaaatttcaatgttggtgttcaggcattgatgcttttgttccaaatatctataaagaataatatagcaagtgatcgtttgtaccgtgcattatactcaaaactcttgagtccttctgctgttacttcctcaaagccagagttatttcttgggctgttggtgaaagcgatgaagaatgatgtaatgttgaagagagttgctgctttctcaaagcggctgctgcaggtggctcttcaacggcctcctcaatatgcttgcggatgccttttcattctgtcagaagtccttaaggcaaagccaccattatgggggattgtgctccagaatgaatctgttgatgatggtgatgaacactttgaagacattttagagattcccgaggactcttctgttgcctcagcagtgctacataaacataatgaaaaagtagctgcacatgagaaacacaaccttgatgctgctgatggaattgatagtgtaaaacaagtaaatttggtagatgagaacaatgcatcaactgactcgtccagacaacatgcattctatgatccacgacacagagagccttcttactgatcgtgtcagttggtgggagttaacagtattggcttcacatgtgcacccttcagtttctactatggctagaacattgctatctggcaacaatattgtttacagtggtgatccgctgacagacctatcacttcctgctttccttgacaaattcatggaaaagaaaccaaaagggaaccgcatagctgaaggaagatggcatggtggatcacaaattgctccggctaaaaagcttaatctgaatcatcatctcatcggagaggagcttctagaattggcagaaaatgaagtgcctcctgaagatattgttttccaccgtttctatttgaacaagaccggcactgttaagcgtaagacaaagcagaaggactcagttcttgatgaagatgcgggggaactcttagctgataatgacgctgatgaggctagtgacgagagtggagatgagatactggatctgggagatgggttggcagatgatggagaatatgactatgacgaccttgactcaaatgcatttgaagaggaaaaagatttacttagagatgacagtgatgtggaatttgatgacgtttcagatgatactgcatctggggatgaagggtcagaaaatgacgatgacattcctattctcgcgggcgattcagatggcaacttaagtgatgacgagatggttgatgctggtaagggcggtgtctcttacacaaagaaaaggagggcagggaagaagagtgggttgtctccatttgcaagcctggatgattatgagcacctaatggttggggatgctgatgcaacaacagcaaagcggaagcacatggcaacagggagagctggtggtgagaagaaaccaaagttgagaccacgaaagaaaaggtcgcggagttcagaatgagaaacatgccttttacccttaactcttttaaaatgttcaccacaatggtgttcattacatttttgtacttctggaaggcacaggattgggtaacgctattgttgagccgagaatgtattgagattagattatacaggtgctctcatatagtagtccttatcccacacaacgcatttatacgggctaagtttaagaccaactcaaagagttgtttttcttattgagtcaaattttagattttctgagtaagaaattattctccaacaggtattctatctagagttgtagattagctagcaaaggcatatcgtcctttccacttgctaagccagtcctaattttcctgtctcagctcacccttccgcgagcccgcggctttctcgcgcggtttcccttaccaacttttttgcaatttggcccttttcgggtttt

SEQ ID NO: 6862 - DNA, 3738 bp, Zea Mays
gttcgctcgctgttcgccccccagccgccaccgccagttcttccattcctccgcgctctttgagccttcgtctcccagtctcctcaactcaggtacgttgtccgcccgccgcacaccctcgccactgttcatcgttgcacgctggtgcttccctcatctccacagaacatctgattcggccagttgagttcctctcggacgctggttgtctccttcgacctccgtttccttgtcatttctgtgcctgacagcaacccgcgctcccgccgcatctattcatggcggagccgacccccaagtcgaagcgcaccaagaaagcgaagaagccctcggcccgggaaggtgatggagaggacatggatacgctcaagtctgacgtcgccacattcgcctcctccctcggcctcctccctggcgctggcgactccaacggcggcttcgatgactccgacttccgcaagtccggccccatgtataaatcctcaaaatttccttccaaacaaccccatcaaaaacctgataacacggcaaacccccatctaaaccctagacctaccaagaagccacaccctctcgagctacgtgactcctatgctgccaccaaacctggtgctgtcaacactaattaccccctgatgaaggcggcagcactctcagggcagtggtacactgatgctgatgagctggaggcgagggtcctaggcggtcgtaagcaggtgcctccagctgtggggcttcaggagatgcagggaatagtggagagaaaacgagagctggcagagaagctcatgttgcagtatgcgagggaatacgatgccgtgaggcgagggcatggtgacctgaagctcctggacatatcagcaaagtctggtacatcagctgacaaggtgtcagcatttacatgtcttgtcgaggacaatccaattgcaaacatgaaggcactcgattccctccttggtatgataacatcaaaagttggtaagaggtatgcgttcacaggattcgatgcaattaaggagttatttctcatgaggttattgcctgaccgtaagctgaaaagtcttatccaacgcccgctagacattttacctgaaacaaaagatgggtactcacttctgctcttctggcattgggaggactgcttaaaacagagatacgaaaggtttgttatggcattggaggatgcggtaaaagatatgctgccaaatcttaaggacaaagcaatgaaggttagctccaacagttttcatgcttttgaaaagtaagtcagaacaggaacgtcgtttgctcacagctcttgttaacaaacttggtgatcctgaaaggagagcagcatcaagtgctgcatatctgttaacatgtctcttggctgctcaccctaatatgaagatggtggtgatagatgaggtggattcttttctcttcagaccacatgttggacttagggccaagtaccaggctgtcaatttcttgagccagattcttcttacaaacaagggagatgggcctaaaattgcaaaacggttggtggatgtctacattgcacttttcaaggtactaatgagctctggtgataccaaaggagatacatatagcaaggacagcaagaaaaaggtaggaaaaatagagggaggaaataacaagatggactccagatccaagggaaacaatgaagtgggttcaacagcaggatcagatttggagctggactccagaatcctttctgcgcttttaactggtgtaaatagggcattaccatatgttgcaagctcagaagttgacgatattgtggaagtgcagacacctattcttttcagattggttcacgctgaaaatttcaatgttggtgttcaggcattgatgcttttgttccaaatatctataaagaataatatagcaagtgatcgtttgtaccgtgcattatactcaaaactcttgagtccttctgctgttacttcctcaaagccagagttatttcttgggctgttggtgaaagcgatgaagaatgatgtaatgttgaagagagttgctgctttctcaaagcggctgctgcaggtggctcttcaacggcctcctcaatatgcttgcggatgccttttcattctgtcagaagtccttaaggcaaagccaccattatgggggattgtgctccagaatgaatctgttgatgatggtgatgaacactttgaagacattttagagattcccgaggactcttctgttgcctcagcagtgctacataaacataatgaaaaagtagctgcacatgagaaacacaaccttgatgctgctgatggaattgatagtgtaaaacaagtaaatttggtagatgagaacaatgcatcaactgactcgtccagacaacatgcattctatgatccacgacacagagagccttcttactgcaatgcagatcgtgtcagttggtgggagttaacagtattggcttcacatgtgcacccttcagtttctactatggctagaacattgctatctggcaacaatattgtttacagtggtgatccgctgacagacctatcacttcctgctttccttgacaaattcatggaaaagaaaccaaaagggaaccgcatagctgaaggaagatggcatggtggatcacaaattgctccggctaaaaagcttaatctgaatcatcatctcatcggagaggagcttctagaattggcagaaaatgaagtgcctcctgaagatattgttttccaccgtttctatttgaacaagaccggcactgttaagcgtaagacaaagcagaaggactcagttcttgatgaagatgcgggggaactcttagctgataatgacgctgatgaggctagtgacgagagtggagatgagatactggatctgggagatgggttggcagatgatggagaatatgactatgacgaccttgactcaaatgcatttgaagaggaaaaagatttacttagagatgacagtgatgtggaatttgatgacgtttcagatgatactgcatctggggatgaagggtcagaaaatgacgatgacattcctattctcgcgggcgattcagatggcaacttaagtgatgacgagatggttgatgctggtaagggcggtgtctcttacacaaagaaaaggagggcagggaagaagagtgggttgtctccatttgcaagcctggatgattatgagcacctaatggttggggatgctgatgcaacaacagcaaagcggaagcacatggcaacagggagagctggtggtgagaagaaaccaaagttgagaccacgaaagaaaaggtcgcggagttcagaatgagaaacatgccttttacccttaactcttttaaaatgttcaccacaatggtgttcattacatttttgtacttctggaaggcacaggattgggtaacgctattgttgagccgagaatgtattgagattagattatacaggtgctctcatatagtagtccttatcccacacaacgcatttatacgggctaagtttaagaccaactcaaagagttgtttttcttattgagtcaaattttagattttctgagtaagaaattattctccaacaggtattctatctagagttgtagattagctagcaaaggcatatcgtcctttccacttgctaagccagtcctaattttcctgtctcagctcacccttccgcgagcccgcggctttctcgcgcggtttcccttaccaacttttttgcaatttggcccttttcgggtttt

SEQ ID NO: 6863 - DNA, 3607 bp, Zea Mays
ccttgctgttcgctcgctgttcgccccccagccgccaccgccagttcttccattcctccgcgctctttgagccttcgtctcccagtctcctcaactcaggtacgttgtccgcccgccgcacaccctcgccactgttcatcgttgcacgctggtgcttccctcatctccacagaacatctgattcggccagttgagttcctctcggacgctggttgtctccttcgacctccgtttccttgtcatttctgtgcctgacagcaacccgcgctcccgccgcatctattcatggcggagccgacccccaagtcgaagcgcaccaagaaagcgaagaagccctcggcccgggaaggtgatggagaggacatggatacgctcaagtctgacgtcgccacattcgcctcctccctcggcctcctccctggcgctggcgactccaacggcggcttcgatgactccgacttccgcaagtccggccccatgtataaatcctcaaaatttccttccaaacaaccccatcaaaaacctgataacacggcaaacccccatctaaaccctagacctaccaagaagccacaccctctcgagctacgtgactcctatgctgccaccaaacctggtgctgtcaacactaattaccccctgatgaaggcggcagcactctcagggcagtggtacactgatgctgatgagctggaggcgagggtcctaggcggtcgtaagcaggtgcctccagctgtggggcttcaggagatgcagggaatagtggagagaaaacgagagctggcagagaagctcatgttgcagtatgcgagggaatacgatgccgtgaggcgagggcatggtgacctgaagctcctggacatatcagcaaagtctggtacatcagctgacaaggtgtcagcatttacatgtcttgtcgaggacaatccaattgcaaacatgaaggcactcgattccctccttggtatgataacatcaaaagttggtaagaggtatgcgttcacaggattcgatgcaattaaggagttatttctcatgaggttattgcctgaccgtaagctgaaaagtcttatccaacgcccgctagacattttacctgaaacaaaagatgggtactcacttctgctcttctggcattgggaggactgcttaaaacagagatacgaaaggtttgttatggcattggaggatgcggtaaaagatatgctgccaaatcttaaggacaaagcaatgaagacagttttcatgcttttgaaaagtaagtcagaacaggaacgtcgtttgctcacagctcttgttaacaaacttggtgatcctgaaaggagagcagcatcaagtgctgcatatctgttaacatgtctcttggctgctcaccctaatatgaagatggtggtgatagatgaggtggattcttttctcttcagaccacatgttggacttagggccaagtaccaggctgtcaatttcttgagccagattcttcttacaaacaagggagatgggcctaaaattgcaaaacggttggtggatgtctacattgcacttttcaaggtactaatgagctctggtgataccaaaggagatacatatagcaaggacagcaagaaaaaggtaggaaaaatagagggaggaaataacaagatggactccagatccaagggaaacaatgaagtgggttcaacagcaggatcagatttggagctggactccagaatcctttctgcgcttttaactggtgtaaatagggcattaccatatgttgcaagctcagaagttgacgatattgtggaagtgcagacacctattcttttcagattggttcacgctgaaaatttcaatgttggtgttcaggcattgatgcttttgttccaaatatctataaagaataatatagcaagtgatcgtttgtaccgtgcattatactcaaaactcttgagtccttctgctgttacttcctcaaagccagagttatttcttgggctgttggtgaaagcgatgaagaatgatgtaatgttgaagagagttgctgctttctcaaagcggctgctgcaggtggctcttcaacggcctcctcaatatgcttgcggatgccttttcattctgtcagaagtccttaaggcaaagccaccattatgggggattgtgctccagaatgaatctgttgatgatggtgatgaacactttgaagacattttagagattcccgaggactcttctgttgcctcagcagtgctacataaacataatgaaaaagtagctgcacatgagaaacacaaccttgatgctgctgatggaattgatagtgtaaaacaagtaaatttggtagatgagaacaatgcatcaactgactcgtccagacaacatgcattctatgatccacgacacagagagccttcttactgacctatcacttcctgctttccttgacaaattcatggaaaagaaaccaaaagggaaccgcatagctgaaggaagatggcatggtggatcacaaattgctccggctaaaaagcttaatctgaatcatcatctcatcggagaggagcttctagaattggcagaaaatgaagtgcctcctgaagatattgttttccaccgtttctatttgaacaagaccggcactgttaagcgtaagacaaagcagaaggactcagttcttgatgaagatgcgggggaactcttagctgataatgacgctgatgaggctagtgacgagagtggagatgagatactggatctgggagatgggttggcagatgatggagaatatgactatgacgaccttgactcaaatgcatttgaagaggaaaaagatttacttagagatgacagtgatgtggaatttgatgacgtttcagatgatactgcatctggggatgaagggtcagaaaatgacgatgacattcctattctcgcgggcgattcagatggcaacttaagtgatgacgagatggttgatgctggtaagggcggtgtctcttacacaaagaaaaggagggcagggaagaagagtgggttgtctccatttgcaagcctggatgattatgagcacctaatggttggggatgctgatgcaacaacagcaaagcggaagcacatggcaacagggagagctggtggtgagaagaaaccaaagttgagaccacgaaagaaaaggtcgcggagttcagaatgagaaacatgccttttacccttaactcttttaaaatgttcaccacaatggtgttcattacatttttgtacttctggaaggcacaggattgggtaacgctattgttgagccgagaatgtattgagattagattatacaggtgctctcatatagtagtccttatcccacacaacgcatttatacgggctaagtttaagaccaactcaaagagttgtttttcttattgagtcaaattttagattttctgagtaagaaattattctccaacaggtattctatctagagttgtagattagctagcaaaggcatatcgtcctttccacttgctaagccagtcctaattttcctgtctcagctcacccttccgcgagcccgcggctttctcgcgcggtttcccttaccaacttttttgcaatttggcccttttcgggtttt

SEQ ID NO: 6864 - DNA, 3707 bp, Zea Mays
ctaacccttgctgttcgctcgctgttcgccccccagccgccaccgccagttcttccattcctccgcgctctttgagccttcgtctcccagtctcctcaactcaggtacgttgtccgcccgccgcacaccctcgccactgttcatcgttgcacgctggtgcttccctcatctccacagaacatctgattcggccagttgagttcctctcggacgctggttgtctccttcgacctccgtttccttgtcatttctgtgcctgacagcaacccgcgctcccgccgcatctattcatggcggagccgacccccaagtcgaagcgcaccaagaaagcgaagaagccctcggcccgggaaggtgatggagaggacatggatacgctcaagtctgacgtcgccacattcgcctcctccctcggcctcctccctggcgctggcgactccaacggcggcttcgatgactccgacttccgcaagtccggccccatgtataaatcctcaaaatttccttccaaacaaccccatcaaaaacctgataacacggcaaacccccatctaaaccctagacctaccaagaagccacaccctctcgagctacgtgactcctatgctgccaccaaacctggtgctgtcaacactaattaccccctgatgaaggcggcagcactctcagggcagtggtacactgatgctgatgagctggaggcgagggtcctaggcggtcgtaagcaggtgcctccagctgtggggcttcaggagatgcagggaatagtggagagaaaacgagagctggcagagaagctcatgttgcagtatgcgagggaatacgatgccgtgaggcgagggcatggtgacctgaagctcctggacatatcagcaaagtctggtacatcagctgacaaggtgtcagcatttacatgtcttgtcgaggacaatccaattgcaaacatgaaggcactcgattccctccttggtatgataacatcaaaagttggtaagaggtatgcgttcacaggattcgatgcaattaaggagttatttctcatgaggttattgcctgaccgtaagctgaaaagtcttatccaacgcccgctagacattttacctgaaacaaaagatgggtactcacttctgctcttctggcattgggaggactgcttaaaacagagatacgaaaggtttgttatggcattggaggatgcggtaaaagatatgctgccaaatcttaaggacaaagcaatgaagacagttttcatgcttttgaaaagtaagtcagaacaggaacgtcgtttgctcacagctcttgttaacaaacttggtgatcctgaaaggagagcagcatcaagtgctgcatatctgttaacatgtctcttggctgctcaccctaatatgaagatggtggtgatagatgaggtggattcttttctcttcagaccacatgttggacttagggccaagtaccaggctgtcaatttcttgagccagattcttcttacaaacaagggagatgggcctaaaattgcaaaacggttggtggatgtctacattgcacttttcaaggtactaatgagctctggtgataccaaaggagatacatatagcaaggacagcaagaaaaaggtaggaaaaatagagggaggaaataacaagatggactccagatccaagggaaacaatgaagtgggttcaacagcaggatcagatttggagctggactccagaatcctttctgcgcttttaactggtgtaaatagggcattaccatatgttgcaagctcagaagttgacgatattgtggaagtgcagacacctattcttttcagattggcattgatgcttttgttccaaatatctataaagaataatatagcaagtgatcgtttgtaccgtgcattatactcaaaactcttgagtccttctgctgttacttcctcaaagccagagttatttcttgggctgttggtgaaagcgatgaagaatgatgtaatgttgaagagagttgctgctttctcaaagcggctgctgcaggtggctcttcaacggcctcctcaatatgcttgcggatgccttttcattctgtcagaagtccttaaggcaaagccaccattatgggggattgtgctccagaatgaatctgttgatgatggtgatgaacactttgaagacattttagagattcccgaggactcttctgttgcctcagcagtgctacataaacataatgaaaaagtagctgcacatgagaaacacaaccttgatgctgctgatggaattgatagtgtaaaacaagtaaatttggtagatgagaacaatgcatcaactgactcgtccagacaacatgcattctatgatccacgacacagagagccttcttactgcaatgcagatcgtgtcagttggtgggagttaacagtattggcttcacatgtgcacccttcagtttctactatggctagaacattgctatctggcaacaatattgtttacagtggtgatccgctgacagacctatcacttcctgctttccttgacaaattcatggaaaagaaaccaaaagggaaccgcatagctgaaggaagatggcatggtggatcacaaattgctccggctaaaaagcttaatctgaatcatcatctcatcggagaggagcttctagaattggcagaaaatgaagtgcctcctgaagatattgttttccaccgtttctatttgaacaagaccggcactgttaagcgtaagacaaagcagaaggactcagttcttgatgaagatgcgggggaactcttagctgataatgacgctgatgaggctagtgacgagagtggagatgagatactggatctgggagatgggttggcagatgatggagaatatgactatgacgaccttgactcaaatgcatttgaagaggaaaaagatttacttagagatgacagtgatgtggaatttgatgacgtttcagatgatactgcatctggggatgaagggtcagaaaatgacgatgacattcctattctcgcgggcgattcagatggcaacttaagtgatgacgagatggttgatgctggtaagggcggtgtctcttacacaaagaaaaggagggcagggaagaagagtgggttgtctccatttgcaagcctggatgattatgagcacctaatggttggggatgctgatgcaacaacagcaaagcggaagcacatggcaacagggagagctggtggtgagaagaaaccaaagttgagaccacgaaagaaaaggtcgcggagttcagaatgagaaacatgccttttacccttaactcttttaaaatgttcaccacaatggtgttcattacatttttgtacttctggaaggcacaggattgggtaacgctattgttgagccgagaatgtattgagattagattatacaggtgctctcatatagtagtccttatcccacacaacgcatttatacgggctaagtttaagaccaactcaaagagttgtttttcttattgagtcaaattttagattttctgagtaagaaattattctccaacaggtattctatctagagttgtagattagctagcaaaggcatatcgtcctttccacttgctaagccagtcctaattttcctgtctcagctcacccttccgcgagcccgcggctttctcgcgcggtttcccttaccaacttttttgcaatttggcccttttcgggtttt

SEQ ID NO: 6865 - DNA, 3744 bp, Zea Mays
ctaacccttgctgttcgctcgctgttcgccccccagccgccaccgccagttcttccattcctccgcgctctttgagccttcgtctcccagtctcctcaactcaggtacgttgtccgcccgccgcacaccctcgccactgttcatcgttgcacgctggtgcttccctcatctccacagaacatctgattcggccagttgagttcctctcggacgctggttgtctccttcgacctccgtttccttgtcatttctgtgcctgacagcaacccgcgctcccgccgcatctattcatggcggagccgacccccaagtcgaagcgcaccaagaaagcgaagaagccctcggcccgggaaggtgatggagaggacatggatacgctcaagtctgacgtcgccacattcgcctcctccctcggcctcctccctggcgctggcgactccaacggcggcttcgatgactccgacttccgcaagtccggccccatgtataaatcctcaaaatttccttccaaacaaccccatcaaaaacctgataacacggcaaacccccatctaaaccctagacctaccaagaagccacaccctctcgagctacgtgactcctatgctgccaccaaacctggtgctgtcaacactaattaccccctgatgaaggcggcagcactctcagggcagtggtacactgatgctgatgagctggaggcgagggtcctaggcggtcgtaagcaggtgcctccagctgtggggcttcaggagatgcagggaatagtggagagaaaacgagagctggcagagaagctcatgttgcagtatgcgagggaatacgatgccgtgaggcgagggcatggtgacctgaagctcctggacatatcagcaaagtctggtacatcagctgacaaggtgtcagcatttacatgtcttgtcgaggacaatccaattgcaaacatgaaggcactcgattccctccttggtatgataacatcaaaagttggtaagaggtatgcgttcacaggattcgatgcaattaaggagttatttctcatgaggttattgcctgaccgtaagctgaaaagtcttatccaacgcccgctagacattttacctgaaacaaaagatgggtactcacttctgctcttctggcattgggaggactgcttaaaacagagatacgaaaggtttgttatggcattggaggatgcggtaaaagatatgctgccaaatcttaaggacaaagcaatgaagacagttttcatgcttttgaaaagtaagtcagaacaggaacgtcgtttgctcacagctcttgttaacaaacttggtgatcctgaaaggagagcagcatcaagtgctgcatatctgttaacatgtctcttggctgctcaccctaatatgaagatggtggtgatagatgaggtggattcttttctcttcagaccacatgttggacttagggccaagtaccaggctgtatgtcaatttcttgagccagattcttcttacaaacaagggagatgggcctaaaattgcaaaacggttggtggatgtctacattgcacttttcaaggtactaatgagctctggtgataccaaaggagatacatatagcaaggacagcaagaaaaaggtaggaaaaatagagggaggaaataacaagatggactccagatccaagggaaacaatgaagtgggttcaacagcaggatcagatttggagctggactccagaatcctttctgcgcttttaactggtgtaaatagggcattaccatatgttgcaagctcagaagttgacgatattgtggaagtgcagacacctattcttttcagattggttcacgctgaaaatttcaatgttggtgttcaggcattgatgcttttgttccaaatatctataaagaataatatagcaagtgatcgtttgtaccgtgcattatactcaaaactcttgagtccttctgctgttacttcctcaaagccagagttatttcttgggctgttggtgaaagcgatgaagaatgatgtaatgttgaagagagttgctgctttctcaaagcggctgctgcaggtggctcttcaacggcctcctcaatatgcttgcggatgccttttcattctgtcagaagtccttaaggcaaagccaccattatgggggattgtgctccagaatgaatctgttgatgatggtgatgaacactttgaagacattttagagattcccgaggactcttctgttgcctcagcagtgctacataaacataatgaaaaagtagctgcacatgagaaacacaaccttgatgctgctgatggaattgatagtgtaaaacaagtaaatttggtagatgagaacaatgcatcaactgactcgtccagacaacatgcattctatgatccacgacacagagagccttcttactgcaatgcagatcgtgtcagttggtgggagttaacagtattggcttcacatgtgcacccttcagtttctactatggctagaacattgctatctggcaacaatattgtttacagtggtgatccgctgacagacctatcacttcctgctttccttgacaaattcatggaaaagaaaccaaaagggaaccgcatagctgaaggaagatggcatggtggatcacaaattgctccggctaaaaagcttaatctgaatcatcatctcatcggagaggagcttctagaattggcagaaaatgaagtgcctcctgaagatattgttttccaccgtttctatttgaacaagaccggcactgttaagcgtaagacaaagcagaaggactcagttcttgatgaagatgcgggggaactcttagctgataatgacgctgatgaggctagtgacgagagtggagatgagatactggatctgggagatgggttggcagatgatggagaatatgactatgacgaccttgactcaaatgcatttgaagaggaaaaagatttacttagagatgacagtgatgtggaatttgatgacgtttcagatgatactgcatctggggatgaagggtcagaaaatgacgatgacattcctattctcgcgggcgattcagatggcaacttaagtgatgacgagatggttgatgctggtaagggcggtgtctcttacacaaagaaaaggagggcagggaagaagagtgggttgtctccatttgcaagcctggatgattatgagcacctaatggttggggatgctgatgcaacaacagcaaagcggaagcacatggcaacagggagagctggtggtgagaagaaaccaaagttgagaccacgaaagaaaaggtcgcggagttcagaatgagaaacatgccttttacccttaactcttttaaaatgttcaccacaatggtgttcattacatttttgtacttctggaaggcacaggattgggtaacgctattgttgagccgagaatgtattgagattagattatacaggtgctctcatatagtagtccttatcccacacaacgcatttatacgggctaagtttaagaccaactcaaagagttgtttttcttattgagtcaaattttagattttctgagtaagaaattattctccaacaggtattctatctagagttgtagattagctagcaaaggcatatcgtcctttccacttgctaagccagtcctaattttcctgtctcagctcacccttccgcgagcccgcggctttctcgcgcggtttcccttaccaacttttttgcaatttggcccttttcgggtttt

SEQ ID NO: 6866 - DNA, 3762 bp, Zea Mays
ctaacccttgctgttcgctcgctgttcgccccccagccgccaccgccagttcttccattcctccgcgctctttgagccttcgtctcccagtctcctcaactcagcaacccgcgctcccgccgcatctattcatggcggagccgacccccaagtcgaagcgcaccaagaaagcgaagaagccctcggcccgggaaggtgatggagaggacatggatacgctcaagtctgacgtcgccacattcgcctcctccctcggcctcctccctggcgctggcgactccaacggcggcttcgatgactccgacttccgcaagtccggccccatgtataaatcctcaaaatttccttccaaacaaccccatcaaaaacctgataacacggcaaacccccatctaaaccctagacctaccaagaagccacaccctctcgagctacgtgactcctatgctgccaccaaacctggtgctgtcaacactaattaccccctgatgaaggcggcagcactctcagggcagtggtacactgatgctgatgagctggaggcgagggtcctaggcggtcgtaagcaggtgcctccagctgtggggcttcaggagatgcagggaatagtggagagaaaacgagagctggcagagaagctcatgttgcagtatgcgagggaatacgatgccgtgaggcgagggcatggtgacctgaagctcctggacatatcagcaaagtctggtacatcagctgacaaggtgtcagcatttacatgtcttgtcgaggacaatccaattgcaaacatgaaggcactcgattccctccttggtatgataacatcaaaagttggtaagaggtatgcgttcacaggattcgatgcaattaaggagttatttctcatgaggttattgcctgaccgtaagctgaaaagtcttatccaacgcccgctagacattttacctgaaacaaaagatgggtactcacttctgctcttctggcattgggaggactgcttaaaacagagatacgaaaggtttgttatggcattggaggatgcggtaaaagatatgctgccaaatcttaaggacaaagcaatgaagtatgacagatgatgacatcaggaagatacatggaaaccacaaacaagaggagagaaaggaaggaaagcaaattgtttatttaattagagtcggacatggcaatatgtgcaacttacaagagcaagacaagtctacggacgaagtctgttttgggctatgacgatcagcatgagagggaccgacagttttcatgcttttgaaaagtaagtcagaacaggaacgtcgtttgctcacagctcttgttaacaaacttggtgatcctgaaaggagagcagcatcaagtgctgcatatctgttaacatgtctcttggctgctcaccctaatatgaagatggtggtgatagatgaggtggattcttttctcttcagaccacatgttggacttagggccaagtaccaggctgtcaatttcttgagccagattcttcttacaaacaagggagatgggcctaaaattgcaaaacggttggtggatgtctacattgcacttttcaaggtactaatgagctctggtgataccaaaggagatacatatagcaaggacagcaagaaaaaggtaggaaaaatagagggaggaaataacaagatggactccagatccaagggaaacaatgaagtgggttcaacagcaggatcagatttggagctggactccagaatcctttctgcgcttttaactggtgtaaatagggcattaccatatgttgcaagctcagaagttgacgatattgtggaagtgcagacacctattcttttcagattggttcacgctgaaaatttcaatgttggtgttcaggcattgatgcttttgttccaaatatctataaagaataatatagcaagtgatcgtttgtaccgtgcattatactcaaaactcttgagtccttctgctgttacttcctcaaagccagagttatttcttgggctgttggtgaaagcgatgaagaatgatgtaatgttgaagagagttgctgctttctcaaagcggctgctgcaggtggctcttcaacggcctcctcaatatgcttgcggatgccttttcattctgtcagaagtccttaaggcaaagccaccattatgggggattgtgctccagaatgaatctgttgatgatggtgatgaacactttgaagacattttagagattcccgaggactcttctgttgcctcagcagtgctacataaacataatgaaaaagtagctgcacatgagaaacacaaccttgatgctgctgatggaattgatagtgtaaaacaagtaaatttggtagatgagaacaatgcatcaactgactcgtccagacaacatgcattctatgatccacgacacagagagccttcttactgcaatgcagatcgtgtcagttggtgggagttaacagtattggcttcacatgtgcacccttcagtttctactatggctagaacattgctatctggcaacaatattgtttacagtggtgatccgctgacagacctatcacttcctgctttccttgacaaattcatggaaaagaaaccaaaagggaaccgcatagctgaaggaagatggcatggtggatcacaaattgctccggctaaaaagcttaatctgaatcatcatctcatcggagaggagcttctagaattggcagaaaatgaagtgcctcctgaagatattgttttccaccgtttctatttgaacaagaccggcactgttaagcgtaagacaaagcagaaggactcagttcttgatgaagatgcgggggaactcttagctgataatgacgctgatgaggctagtgacgagagtggagatgagatactggatctgggagatgggttggcagatgatggagaatatgactatgacgaccttgactcaaatgcatttgaagaggaaaaagatttacttagagatgacagtgatgtggaatttgatgacgtttcagatgatactgcatctggggatgaagggtcagaaaatgacgatgacattcctattctcgcgggcgattcagatggcaacttaagtgatgacgagatggttgatgctggtaagggcggtgtctcttacacaaagaaaaggagggcagggaagaagagtgggttgtctccatttgcaagcctggatgattatgagcacctaatggttggggatgctgatgcaacaacagcaaagcggaagcacatggcaacagggagagctggtggtgagaagaaaccaaagttgagaccacgaaagaaaaggtcgcggagttcagaatgagaaacatgccttttacccttaactcttttaaaatgttcaccacaatggtgttcattacatttttgtacttctggaaggcacaggattgggtaacgctattgttgagccgagaatgtattgagattagattatacaggtgctctcatatagtagtccttatcccacacaacgcatttatacgggctaagtttaagaccaactcaaagagttgtttttcttattgagtcaaattttagattttctgagtaagaaattattctccaacaggtattctatctagagttgtagattagctagcaaaggcatatcgtcctttccacttgctaagccagtcctaattttcctgtctcagctcacccttccgcgagcccgcggctttctcgcgcggtttcccttaccaacttttttgcaatttggcccttttcgggtttt

SEQ ID NO: 6867 - DNA, 3651 bp, Zea Mays
ctctaacccttgctgttcgctcgctgttcgccccccagccgccaccgccagttcttccattcctccgcgctctttgagccttcgtctcccagtctcctcaactcagttgagttcctctcggacgctggttgtctccttcgacctccgtttccttgtcatttctgtgcctgacagcaacccgcgctcccgccgcatctattcatggcggagccgacccccaagtcgaagcgcaccaagaaagcgaagaagccctcggcccgggaaggtgatggagaggacatggatacgctcaagtctgacgtcgccacattcgcctcctccctcggcctcctccctggcgctggcgactccaacggcggcttcgatgactccgacttccgcaagtccggccccatgtataaatcctcaaaatttccttccaaacaaccccatcaaaaacctgataacacggcaaacccccatctaaaccctagacctaccaagaagccacaccctctcgagctacgtgactcctatgctgccaccaaacctggtgctgtcaacactaattaccccctgatgaaggcggcagcactctcagggcagtggtacactgatgctgatgagctggaggcgagggtcctaggcggtcgtaagcaggtgcctccagctgtggggcttcaggagatgcagggaatagtggagagaaaacgagagctggcagagaagctcatgttgcagtatgcgagggaatacgatgccgtgaggcgagggcatggtgacctgaagctcctggacatatcagcaaagtctggtacatcagctgacaaggtgtcagcatttacatgtcttgtcgaggacaatccaattgcaaacatgaaggcactcgattccctccttggtatgataacatcaaaagttggtaagaggtatgcgttcacaggattcgatgcaattaaggagttatttctcatgaggttattgcctgaccgtaagctgaaaagtcttatccaacgcccgctagacattttacctgaaacaaaagatgggtactcacttctgctcttctggcattgggaggactgcttaaaacagagatacgaaaggtttgttatggcattggaggatgcggtaaaagatatgctgccaaatcttaaggacaaagcaatgaagacagttttcatgcttttgaaaagtaagtcagaacaggaacgtcgtttgctcacagctcttgttaacaaacttggtgatcctgaaaggagagcagcatcaagtgctgcatatctgttaacatgtctcttggctgctcaccctaatatgaagatggtggtgatagatgaggtggattcttttctcttcagaccacatgttggacttagggccaagtaccaggctgtcaatttcttgagccagattcttcttacaaacaagggagatgggcctaaaattgcaaaacggttggtggatgtctacattgcacttttcaaggtactaatgagctctggtgataccaaaggagatacatatagcaaggacagcaagaaaaaggtaggaaaaatagagggaggaaataacaagatggactccagatccaagggaaacaatgaagtgggttcaacagcaggatcagatttggagctggactccagaatcctttctgcgcttttaactggtgtaaatagggcattaccatatgttgcaagctcagaagttgacgatattgtggaagtgcagacacctattcttttcagattggttcacgctgaaaatttcaatgttggtgttcaggcattgatgcttttgttccaaatatctataaagaataatatagcaagtgatcgtttgtaccgtgcattatactcaaaactcttgagtccttctgctgttacttcctcaaagccagagttatttcttgggctgttggtgaaagcgatgaagaatgatgtaatgttgaagagagttgctgctttctcaaagcggctgctgcaggtggctcttcaacggcctcctcaatatgcttgcggatgccttttcattctgtcagaagtccttaaggcaaagccaccattatgggggattgtgctccagaatgaatctgttgatgatggtgatgaacactttgaagacattttagagattcccgaggactcttctgttgcctcagcagtgctacataaacataatgaaaaagtagctgcacatgagaaacacaaccttgatgctgctgatggaattgatagtgtaaaacaagtaaatttggtagatgagaacaatgcatcaactgactcgtccagacaacatgcattctatgatccacgacacagagagccttcttactgcaatgcagatcgtgtcagttggtgggagttaacagtattggcttcacatgtgcacccttcagtttctactatggctagaacattgctatctggcaacaatattgtttacagtggtgatccgctgacagacctatcacttcctgctttccttgacaaattcatggaaaagaaaccaaaagggaaccgcatagctgaaggaagatggcatggtggatcacaaattgctccggctaaaaagcttaatctgaatcatcatctcatcggagaggagcttctagaattggcagaaaatgaagtgcctcctgaagatattgttttccaccgtttctatttgaacaagaccggcactgttaagcgtaagacaaagcagaaggactcagttcttgatgaagatgcgggggaactcttagctgataatgacgctgatgaggctagtgacgagagtggagatgagatactggatctgggagatgggttggcagatgatggagaatatgactatgacgaccttgactcaaatgcatttgaagaggaaaaagatttacttagagatgacagtgatgtggaatttgatgacgtttcagatgatactgcatctggggatgaagggtcagaaaatgacgatgacattcctattctcgcgggcgattcagatggcaacttaagtgatgacgagatggttgatgctggtaagggcggtgtctcttacacaaagaaaaggagggcagggaagaagagtgggttgtctccatttgcaagcctggatgattatgagcacctaatggttggggatgctgatgcaacaacagcaaagcggaagcacatggcaacagggagagctggtggtgagaagaaaccaaagttgagaccacgaaagaaaaggtcgcggagttcagaatgagaaacatgccttttacccttaactcttttaaaatgttcaccacaatggtgttcattacatttttgtacttctggaaggcacaggattgggtaacgctattgttgagccgagaatgtattgagattagattatacaggtgctctcatatagtagtccttatcccacacaacgcatttatacgggctaagtttaagaccaactcaaagagttgtttttcttattgagtcaaattttagattttctgagtaagaaattattctccaacaggtattctatctagagttgtagattagctagcaaaggcatatcgtcctttccacttgctaagccagtcctaattttcctgtctcagctcacccttccgcgagcccgcggctttctcgcgcggtttcccttaccaacttttttgcaatttggcccttttcgggtttt

SEQ ID NO: 6868 - DNA, 3567 bp, Zea Mays
ctctaacccttgctgttcgctcgctgttcgccccccagccgccaccgccagttcttccattcctccgcgctctttgagccttcgtctcccagtctcctcaactcagcaacccgcgctcccgccgcatctattcatggcggagccgacccccaagtcgaagcgcaccaagaaagcgaagaagccctcggcccgggaaggtgatggagaggacatggatacgctcaagtctgacgtcgccacattcgcctcctccctcggcctcctccctggcgctggcgactccaacggcggcttcgatgactccgacttccgcaagtccggccccatgtataaatcctcaaaatttccttccaaacaaccccatcaaaaacctgataacacggcaaacccccatctaaaccctagacctaccaagaagccacaccctctcgagctacgtgactcctatgctgccaccaaacctggtgctgtcaacactaattaccccctgatgaaggcggcagcactctcagggcagtggtacactgatgctgatgagctggaggcgagggtcctaggcggtcgtaagcaggtgcctccagctgtggggcttcaggagatgcagggaatagtggagagaaaacgagagctggcagagaagctcatgttgcagtatgcgagggaatacgatgccgtgaggcgagggcatggtgacctgaagctcctggacatatcagcaaagtctggtacatcagctgacaaggtgtcagcatttacatgtcttgtcgaggacaatccaattgcaaacatgaaggcactcgattccctccttggtatgataacatcaaaagttggtaagaggtatgcgttcacaggattcgatgcaattaaggagttatttctcatgaggttattgcctgaccgtaagctgaaaagtcttatccaacgcccgctagacattttacctgaaacaaaagatgggtactcacttctgctcttctggcattgggaggactgcttaaaacagagatacgaaaggtttgttatggcattggaggatgcggtaaaagatatgctgccaaatcttaaggacaaagcaatgaagacagttttcatgcttttgaaaagtaagtcagaacaggaacgtcgtttgctcacagctcttgttaacaaacttggtgatcctgaaaggagagcagcatcaagtgctgcatatctgttaacatgtctcttggctgctcaccctaatatgaagatggtggtgatagatgaggtggattcttttctcttcagaccacatgttggacttagggccaagtaccaggctgtcaatttcttgagccagattcttcttacaaacaagggagatgggcctaaaattgcaaaacggttggtggatgtctacattgcacttttcaaggtactaatgagctctggtgataccaaaggagatacatatagcaaggacagcaagaaaaaggtaggaaaaatagagggaggaaataacaagatggactccagatccaagggaaacaatgaagtgggttcaacagcaggatcagatttggagctggactccagaatcctttctgcgcttttaactggtgtaaatagggcattaccatatgttgcaagctcagaagttgacgatattgtggaagtgcagacacctattcttttcagattggttcacgctgaaaatttcaatgttggtgttcaggcattgatgcttttgttccaaatatctataaagaataatatagcaagtgatcgtttgtaccgtgcattatactcaaaactcttgagtccttctgctgttacttcctcaaagccagagttatttcttgggctgttggtgaaagcgatgaagaatgatgtaatgttgaagagagttgctgctttctcaaagcggctgctgcaggtggctcttcaacggcctcctcaatatgcttgcggatgccttttcattctgtcagaagtccttaaggcaaagccaccattatgaatgaatctgttgatgatggtgatgaacactttgaagacattttagagattcccgaggactcttctgttgcctcagcagtgctacataaacataatgaaaaagtagctgcacatgagaaacacaaccttgatgctgctgatggaattgatagtgtaaaacaagtaaatttggtagatgagaacaatgcatcaactgactcgtccagacaacatgcattctatgatccacgacacagagagccttcttactgcaatgcagatcgtgtcagttggtgggagttaacagtattggcttcacatgtgcacccttcagtttctactatggctagaacattgctatctggcaacaatattgtttacagtggtgatccgctgacagacctatcacttcctgctttccttgacaaattcatggaaaagaaaccaaaagggaaccgcatagctgaaggaagatggcatggtggatcacaaattgctccggctaaaaagcttaatctgaatcatcatctcatcggagaggagcttctagaattggcagaaaatgaagtgcctcctgaagatattgttttccaccgtttctatttgaacaagaccggcactgttaagcgtaagacaaagcagaaggactcagttcttgatgaagatgcgggggaactcttagctgataatgacgctgatgaggctagtgacgagagtggagatgagatactggatctgggagatgggttggcagatgatggagaatatgactatgacgaccttgactcaaatgcatttgaagaggaaaaagatttacttagagatgacagtgatgtggaatttgatgacgtttcagatgatactgcatctggggatgaagggtcagaaaatgacgatgacattcctattctcgcgggcgattcagatggcaacttaagtgatgacgagatggttgatgctggtaagggcggtgtctcttacacaaagaaaaggagggcagggaagaagagtgggttgtctccatttgcaagcctggatgattatgagcacctaatggttggggatgctgatgcaacaacagcaaagcggaagcacatggcaacagggagagctggtggtgagaagaaaccaaagttgagaccacgaaagaaaaggtcgcggagttcagaatgagaaacatgccttttacccttaactcttttaaaatgttcaccacaatggtgttcattacatttttgtacttctggaaggcacaggattgggtaacgctattgttgagccgagaatgtattgagattagattatacaggtgctctcatatagtagtccttatcccacacaacgcatttatacgggctaagtttaagaccaactcaaagagttgtttttcttattgagtcaaattttagattttctgagtaagaaattattctccaacaggtattctatctagagttgtagattagctagcaaaggcatatcgtcctttccacttgctaagccagtcctaattttcctgtctcagctcacccttccgcgagcccgcggctttctcgcgcggtttcccttaccaacttttttgcaatttggcccttttcgggtttt

SEQ ID NO: 6869 - DNA, 3625 bp, Zea Mays
ccgctcaagacttcgttcacgggtcacgggtacggcgggagcctctaacccttgctgttcgctcgctgttcgccccccagccgccaccgccagttcttccattcctccgcgctctttgagccttcgtctcccagtctcctcaactcagcaacccgcgctcccgccgcatctattcatggcggagccgacccccaagtcgaagcgcaccaagaaagcgaagaagccctcggcccgggaaggtgatggagaggacatggatacgctcaagtctgacgtcgccacattcgcctcctccctcggcctcctccctggcgctggcgactccaacggcggcttcgatgactccgacttccgcaagtccggccccatgtataaatcctcaaaatttccttccaaacaaccccatcaaaaacctgataacacggcaaacccccatctaaaccctagacctaccaagaagccacaccctctcgagctacgtgactcctatgctgccaccaaacctggtgctgtcaacactaattaccccctgatgaaggcggcagcactctcagggcagtggtacactgatgctgatgagctggaggcgagggtcctaggcggtcgtaagcaggtgcctccagctgtggggcttcaggagatgcagggaatagtggagagaaaacgagagctggcagagaagctcatgttgcagtatgcgagggaatacgatgccgtgaggcgagggcatggtgacctgaagctcctggacatatcagcaaagtctggtacatcagctgacaaggtgtcagcatttacatgtcttgtcgaggacaatccaattgcaaacatgaaggcactcgattccctccttggtatgataacatcaaaagttggtaagaggtatgcgttcacaggattcgatgcaattaaggagttatttctcatgaggttattgcctgaccgtaagctgaaaagtcttatccaacgcccgctagacattttacctgaaacaaaagatgggtactcacttctgctcttctggcattgggaggactgcttaaaacagagatacgaaaggtttgttatggcattggaggatgcggtaaaagatatgctgccaaatcttaaggacaaagcaatgaagacagttttcatgcttttgaaaagtaagtcagaacaggaacgtcgtttgctcacagctcttgttaacaaacttggtgatcctgaaaggagagcagcatcaagtgctgcatatctgttaacatgtctcttggctgctcaccctaatatgaagatggtggtgatagatgaggtggattcttttctcttcagaccacatgttggacttagggccaagtaccaggctgtcaatttcttgagccagattcttcttacaaacaagggagatgggcctaaaattgcaaaacggttggtggatgtctacattgcacttttcaaggtactaatgagctctggtgataccaaaggagatacatatagcaaggacagcaagaaaaaggtaggaaaaatagagggaggaaataacaagatggactccagatccaagggaaacaatgaagtgggttcaacagcaggatcagatttggagctggactccagaatcctttctgcgcttttaactggtgtaaatagggcattaccatatgttgcaagctcagaagttgacgatattgtggaagtgcagacacctattcttttcagattggttcacgctgaaaatttcaatgttggtgttcaggcattgatgcttttgttccaaatatctataaagaataatatagcaagtgatcgtttgtaccgtgcattatactcaaaactcttgagtccttctgctgttacttcctcaaagccagagttatttcttgggctgttggtgaaagcgatgaagaatgatgtaatgttgaagagagttgctgctttctcaaagcggctgctgcaggtggctcttcaacggcctcctcaatatgcttgcggatgccttttcattctgtcagaagtccttaaggcaaagccaccattatgggggattgtgctccagaatgaatctgttgatgatggtgatgaacactttgaagacattttagagattcccgaggactcttctgttgcctcagcagtgctacataaacataatgaaaaagtagctgcacatgagaaacacaaccttgatgctgctgatggaattgatagtgtaaaacaagtaaatttggtagatgagaacaatgcatcaactgactcgtccagacaacatgcattctatgatccacgacacagagagccttcttactgcaatgcagatcgtgtcagttggtgggagttaacagtattggcttcacatgtgcacccttcagtttctactatggctagaacattgctatctggcaacaatattgtttacagtggtgatccgctgacagacctatcacttcctgctttccttgacaaattcatggaaaagaaaccaaaagggaaccgcatagctgaaggaagatggcatggtggatcacaaattgctccggctaaaaagcttaatctgaatcatcatctcatcggagaggagcttctagaattggcagaaaatgaagtgcctcctgaagatattgttttccaccgtttctatttgaacaagaccggcactgttaagcgtaagacaaagcagaaggactcagttcttgatgaagatgcgggggaactcttagctgataatgacgctgatgaggctagtgacgagagtggagatgagatactggatctgggagatgggttggcagatgatggagaatatgactatgacgaccttgactcaaatgcatttgaagaggaaaaagatttacttagagatgacagtgatgtggaatttgatgacgtttcagatgatactgcatctggggatgaagggtcagaaaatgacgatgacattcctattctcgcgggcgattcagatggcaacttaagtgatgacgagatggttgatgctggtaagggcggtgtctcttacacaaagaaaaggagggcagggaagaagagtgggttgtctccatttgcaagcctggatgattatgagcacctaatggttggggatgctgatgcaacaacagcaaagcggaagcacatggcaacagggagagctggtggtgagaagaaaccaaagttgagaccacgaaagaaaaggtcgcggagttcagaatgagaaacatgccttttacccttaactcttttaaaatgttcaccacaatggtgttcattacatttttgtacttctggaaggcacaggattgggtaacgctattgttgagccgagaatgtattgagattagattatacaggtgctctcatatagtagtccttatcccacacaacgcatttatacgggctaagtttaagaccaactcaaagagttgtttttcttattgagtcaaattttagattttctgagtaagaaattattctccaacaggtattctatctagagttgtagattagctagcaaaggcatatcgtcctttccacttgctaagccagtcctaattttcctgtctcagctcacccttccgcgagcccgcggctttctcgcgcggtttcccttaccaacttttttgcaatttggcccttttcgggtttt

SEQ ID NO: 6870 - DNA, 1294 bp, Zea Mays
ctaacccttgctgttcgctcgctgttcgccccccagccgccaccgccagttcttccattcctccgcgctctttgagccttcgtctcccagtctcctcaactcagcaacccgcgctcccgccgcatctattcatggcggagccgacccccaagtcgaagcgcaccaagaaagcgaagaagccctcggcccgggaaggtgatggagaggacatggatacgctcaagtctgacgtcgccacattcgcctcctccctcggcctcctccctggcgctggcgactccaacggcggcttcgatgactccgacttccgcaagtccggccccatgtataaatcctcaaaatttccttccaaacaaccccatcaaaaacctgataacacggcaaacccccatctaaaccctagacctaccaagaagccacaccctctcgagctacgtgactcctatgctgccaccaaacctggtgctgtcaacactaattaccccctgatgaaggcggcagcactctcagggcagtggtacactgatgctgatgagctggaggcgagggtcctaggcggtcgtaagcaggtgcctccagctgtggggcttcaggagatgcagggaatagtggagagaaaacgagagctggcagagaagctcatgttgcagtatgcgagggaatacgatgccgtgaggcgagggcatggtgacctgaagctcctggacatatcagcaaagtctggtacatcagctgacaaggtgtcagcatttacatgtcttgtcgaggacaatccaattgcaaacatgaaggcactcgattccctccttggtatgataacatcaaaagttggtaagaggtatgcgttcacaggattcgatgcaattaaggagttatttctcatgaggttattgcctgaccgtaagctgaaaagtcttatccaacgcccgctagacattttacctgaaacaaaagatgggtactcacttctgctcttctggcattgggaggactgcttaaaacagagatacgaaaggtttgttatggcattggaggatgcggtaaaagatatgctgccaaatcttaaggacaaagcaatgaagagaggtgtactttgtctccgaagcatccagggggcctggtgtttatggctgcatcgcaatagggcggtatttgatggtgccagcccttctttgagcaccattcagaggcttcttatggatgaggtggagtgctggtgtatggctggtgcgaagcagattgagagtcttggcctcctggctgtctttctagtgcctaatgctgtgaaagttgg

SEQ ID NO: 6871 - DNA, 4416 bp, Zea Mays
tcgccttccgttccctctccagcaccgcaccacagctagcccgcgtgtcccccaatcatacgtaccaccgcgggggcgtgtccgcttgcatcctcctccctcccccgtcccgtctccaccctccacctcctctcgcgtccgccccgccgctcgcggatgcgccggcgcgctcccacccccaaaccctagcctcgatcccgatgggcacgccccgcgcggggtccccggcgtccccggtcaccggcgaccactacctcgacctgctcgtccgcttcgtggcgcgcaacgcgggcgcgctgctcgacggcaccgtcaccctccgcctccaccccgtcggactccactacgtcgcctcccgcctcgaggcgctccgggagctcgaggccgtgggcgccggcgccccagtcgactacctccgcgcctacgtcgcggaccttggcgaccaccgagcgctcgagcagctacggcggatcctgcgcctcctcacctcgctcaaggtcgtcgccccggggccccgccgcgaccccgcgccgctctcgatcctgcctttcgcgcgcctgcgcgtgctcgagctgcggggctgcgacctctctacctcggccgccaggggccttctcgagctccgacacaccctcgagaagctcgtctgtttcaattctacggatgctcttaggcatgtctttgcgagtagaatcatggatatcaaggactcccctgtatggagcaaactttcatatgtctcatgtgcatctaatggtgtagtactcatggacgagtcgttgcaattgttacctgcaactgaaaccttggaccttagtcgcaacaagtttgcaaaggtggacaatctgcagaaatgtacaaagttgcgaaatctggatctcggatttaatcatttgcgttcgatttcatccttgagtgaggtttccagtcgaatcgtaaaacttgttgtgagaaataatgctttaactacagtaaacgggattgaaaatctcaagtcactcatggggcttgatctctcttacaatatcatctcaattttctcagaattggaaatcctcggcactctacctctgttgcaaaacctctggttggaaggcaacccaatctgctgtgcccggtggtatcgagcacatgtgttcagtttttttcgtaatccagagaatttgaagctagatgataaaggtatgaacacacaagaatactgggaaaagcaagtattgtttgcatgcaggcaaaatcaacctgctggttatggattttattttcctgcaattgatgatcatgaagatgaagacatattgaatttgaagatgagaaaattttcccgacttgtgagcatagtggaggaagagagaaatctctgtgatggtgtagagcagcagtccacccactgtgatagtgacagttccaagaaggatgaaactgcagctgttgatcatgacctaataattgcttcgttgataaacaccgccgaaatgctgaagaaagaaaagtcaagtaattggctttgtgaatttaaggagtggatggatgacaatacagagaaaacagaaggcgacaacctatctgttggcttaactaatggcaatgggaagtatatcaaacaaaagaaaaggcagaaagcacacaaggagacttcaaataacatgtcggatttggtacaagtttcagaaggtggtagtagctcaaaccttttggaatcagattcatctttcacagataatgcattttctggttcaaatggagtcatcaaacaatcctcaaatgaacttaattttgaccaagatcatctaaaaatgcacttgaattcttttcaacgacctcctcctctagagttagtagccacttcacaaactgaccccttttctgagttggaaaatggctctagaaatatgctggcaaatgggacaccatccaatacaatgagcaagttaatagaatcaagtccaccccatacatattcaagtccacagtcacctccacaatacaaggaggacattctacatcgaagactttttatggaggaagaatttttgcagatttcaggacatcttcattctattggttcacttggtagtggtagcagctgcagcgatggttcttcgagtgattttggttcatgcaattctgaagatgattatgaagaaattcagacaaagatggagttgtctcttaatggccagatggttttatttccttctgtaaatggtgatgatcatgaggcgaataataacttagagcatttttcaggggagaatactttgtctgaccatccagaagaaggtgagccgagttgttcagatcacagagagtttgatattgaggagttccataacagtaaccagagaaatggccatctagggcattatttaggccatttaattgggcaaaaaggcaaggagaagtttaagtggagggtatttcctttcaagaatcataatggtaccaaactagaaaatccaaaaatgaatgacgatcaggtggctgagcatgttttagttgaaggaaatggccagttgacatgcaacccaagcaaaagtactcacaaggaaggctctaaaagtcattcttctaatatccttcataagaacaattcatctgtttgcacaattaacacaggcgaacacaacactcttgaggatttcttcaacttggaaatagcggacaaggatgggtttgaaacatgtgaacaagtagcttgttgcgcacacatgtttcaggattcaagtggtttagttcaaagaaatcatgccaagaattttgggcagctatagtctgcaaagtctagaaaaagtttcaattgggctgggactacaggcgctgagagtacacatgtcagatgatacaactcatctattcatcacaaggacttccaaggaagcgcaagatgtactttggctcttgagcgtaactaacttccccaaattaaaccacaagatacattttcaaagttgggagaacatccaagtcaaattgttcgagaaatgtattatacgcagaactgcaaatacgggaatatttctctactctatgttgatgttctggaggaatgacgttgaagaagactccctttttattagatccatctttgtcattgaaggctccatattggtgtgcattgaggacctagatcagtttggtggtatcccttatgattcaaatcccccatacttttcccttgatgcatcttgttctattagcaatatccgagaagtggtcatggatcagcgcaacaacaaatgtttgacattgattttggataatggtaggccaggagagtttcacaatagcatccaaaatcctcaaaacaagcagtctgaggaaatcggcacagtacatacatggaaacttaagtggttctctgaagaagcgtctctgaagttcatttctgtaattaaggctctctcctcgacagcagcaatttcgtctttacatgtaaagtgtatatcctgatgatgtcggttattgtagttctacggtgatttcattcattcttttgtggtttgtccatgtagctgttaatctgtacagtttgatagttgggttctaggtttgtgtttgctgtattctttgtagttattagatgattttcccaccctgaagttgtacagaacagagctagaagtgagtgtaagtgaatggggttgcagttttggcaacgggcggtttcgtaaagttggttcaaaacctcaggaggcgcgatggtttgatcaggaaaggaactcacgcgacagattgcgaagaatcacagtttagcagctacggcaaacaggcatatgaacaatgggactcgcatgctgaaactacaattacctatcggacctgcgtagtaccttcaaacttctgtgtctattttgctaccgctatttgaacagggttcaacctctgcttccccaccgacggcacatttattcatcatcgccagcatgtgaagccgtgacgggatcggcggcaggccgacatcagcgacaccttccagctgctgcacgacgagccccatggtcggccggtcgccttcttcatcctggatgcaccagcacgcgaccttgcagaccctctcgagctccacgttggcatccccggcgatcttgtcgtctagcagcccgaccacgtcccccgcgtgcagcctgacggcggcgtgcaccgggaagtacacagcggagttggaccctgtctccgaggagccgttgttccggcgtcccgagatgagctcgaacaggagcaggccgaagctgtacacgtcggccttggcggtgatcggcgcgcccgcgagccactctggcgccagatagcccatcgttccccgcatggtggtcagaacgcggctgaagtcgtggccgacaagcttggccatgccgaagtccgcaaccttggcgcccatctcctcatcaaggaggatgttctctggcttgatgt

SEQ ID NO: 6872 - DNA, 4266 bp, Zea Mays
tcgccttccgttccctctccagcaccgcaccacagctagcccgcgtgtcccccaatcatacgtaccaccgcgggggcgtgtccgcttgcatcctcctccctcccccgtcccgtctccaccctccacctcctctcgcgtccgccccgccgctcgcggatgcgccggcgcgctcccacccccaaaccctagcctcgatcccgatgggcacgccccgcgcggggtccccggcgtccccggtcaccggcgaccactacctcgacctgctcgtccgcttcgtggcgcgcaacgcgggcgcgctgctcgacggcaccgtcaccctccgcctccaccccgtcggactccactacgtcgcctcccgcctcgaggcgctccgggagctcgaggccgtgggcgccggcgccccagtcgactacctccgcgcctacgtcgcggaccttggcgaccaccgagcgctcgagcagctacggcggatcctgcgcctcctcacctcgctcaaggtcgtcgccccggggccccgccgcgaccccgcgccgctctcgatcctgcctttcgcgcgcctgcgcgtgctcgagctgcggggctgcgacctctctacctcggccgccaggggccttctcgagctccgacacaccctcgagaagctcgtctgtttcaattctacgtactcatggacgagtcgttgcaattgttacctgcaactgaaaccttggaccttagtcgcaacaagtttgcaaaggtggacaatctgcagaaatgtacaaagttgcgaaatctggatctcggatttaatcatttgcgttcgatttcatccttgagtgagaattggaaatcctcggcactctacctctgttgcaaaacctctggttggaaggcaacccaatctgctgtgcccggtggtatcgagcacatgtgttcagtttttttcgtaatccagagaatttgaagctagatgataaaggtatgaacacacaagaatactgggaaaagcaagtattgtttgcatgcaggcaaaatcaacctgctggttatggattttattttcctgcaattgatgatcatgaagatgaagacatattgaatttgaagatgagaaaattttcccgacttgtgagcatagtggaggaagagagaaatctctgtgatggtgtagagcagcagtccacccactgtgatagtgacagttccaagaaggatgaaactgcagctgttgatcatgacctaataattgcttcgttgataaacaccgccgaaatgctgaagaaagaaaagtcaagtaattggctttgtgaatttaaggagtggatggatgacaatacagagaaaacagaaggcgacaacctatctgttggcttaactaatggcaatgggaagtatatcaaacaaaagaaaaggcagaaagcacacaaggagacttcaaataacatgtcggatttggtacaagtttcagaaggtggtagtagctcaaaccttttggaatcagattcatctttcacagataatgcattttctggttcaaatggagtcatcaaacaatcctcaaatgaacttaattttgaccaagatcatctaaaaatgcacttgaattcttttcaacgacctcctcctctagagttagtagccacttcacaaactgaccccttttctgagttggaaaatggctctagaaatatgctggcaaatgggacaccatccaatacaatgagcaagttaatagaatcaagtccaccccatacatattcaagtccacagtcacctccacaatacaaggaggacattctacatcgaagactttttatggaggaagaatttttgcagatttcaggacatcttcattctattggttcacttggtagtggtagcagctgcagcgatggttcttcgagtgattttggttcatgcaattctgaagatgattatgaagaaattcagacaaagatggagttgtctcttaatggccagatggttttatttccttctgtaaatggtgatgatcatgaggcgaataataacttagagcatttttcaggggagaatactttgtctgaccatccagaagaaggtgagccgagttgttcagatcacagagagtttgatattgaggagttccataacagtaaccagagaaatggccatctagggcattatttaggccatttaattgggcaaaaaggcaaggagaagtttaagtggagggtatttcctttcaagaatcataatggtaccaaactagaaaatccaaaaatgaatgacgatcaggtggctgagcatgttttagttgaaggaaatggccagttgacatgcaacccaagcaaaagtactcacaaggaaggctctaaaagtcattcttctaatatccttcataagaacaattcatctgtttgcacaattaacacaggcgaacacaacactcttgaggatttcttcaacttggaaatagcggacaaggatgggtttgaaacatgtgaacaagtagcttgttgcgcacacatgtttcaggattcaagtggtttagttcaaagagaggtagccttgctgcgaagttctcaaaacaaattgtatctgctactacttgatatggtttttgatggacaagaaatcatgccaagaattttgggcagctatagtctgcaaagtctagaaaaagtttcaattgggctgggactacaggcgctgagagtacacatgtcagatgatacaactcatctattcatcacaaggacttccaaggaagcgcaagatgtactttggctcttgagcgtaactaacttccccaaattaaaccacaagatacattttcaaagttgggagaacatccaagtcaaattgttcgagaaatgtattatacgcagaactgcaaatacgggaatatttctctactctatgttgatgttctggaggaatgacgttgaagaagactccctttttattagatccatctttgtcattgaaggctccatattggtgtgcattgaggacctagatcagtttggtggtatcccttatgattcaaatcccccatacttttcccttgatgcatcttgttctattagcaatatccgagaagtggtcatggatcagcgcaacaacaaatgtttgacattgattttggataatggtaggccaggagagtttcacaatagcatccaaaatcctcaaaacaagcagtctgaggaaatcggcacagtacatacatggaaacttaagtggttctctgaagaagcgtctctgaagttcatttctgtaattaaggctctctcctcgacagcagcaatttcgtctttacatgtaaagtgtatatcctgatgatgtcggttattgtagttctacggtgatttcattcattcttttgtggtttgtccatgtagctgttaatctgtacagtttgatagttgggttctaggtttgtgtttgctgtattctttgtagttattagatgattttcccaccctgaagttgtacagaacagagctagaagtgagtgtaagtgaatggggttgcagttttggcaacgggcggtttcgtaaagttggttcaaaacctcaggaggcgcgatggtttgatcaggaaaggaactcacgcgacagattgcgaagaatcacagtttagcagctacggcaaacaggcatatgaacaatgggactcgcatgctgaaactacaattacctatcggacctgcgtagtaccttcaaacttctgtgtctattttgctaccgctatttgaacagggttcaacctctgcttccccaccgacggcacatttattcatcatcgccagcatgtgaagccgtgacgggatcggcggcaggccgacatcagcgacaccttccagctgctgcacgacgagccccatggtcggccggtcgccttcttcatcctggatgcaccagcacgcgaccttgcagaccctctcgagctccacgttggcatccccggcgatcttgtcgtctagcagcccgaccacgtcccccgcgtgcagcctgacggcggcgtgcaccgggaagtacacagcggagttggaccctgtctccgaggagccgttgttccggcgtcccgagatgagctcgaacaggagcaggccgaagctgtacacgtcggccttggcggtgatcggcgcgcccgcgagccactctggcgccagatagcccatcgttccccgcatggtggtcagaacgcggctgaagtcgtggccgacaagcttggccatgccgaagtccgcaaccttggcgcccatctcctcatcaaggaggatgttctctggcttgatgt

SEQ ID NO: 6873 - DNA, 4412 bp, Zea Mays
tcgccttccgttccctctccagcaccgcaccacagctagcccgcgtgtcccccaatcatacgtaccaccgcgggggcgtgtccgcttgcatcctcctccctcccccgtcccgtctccaccctccacctcctctcgcgtccgccccgccgctcgcggatgcgccggcgcgctcccacccccaaaccctagcctcgatcccgatgggcacgccccgcgcggggtccccggcgtccccggtcaccggcgaccactacctcgacctgctcgtccgcttcgtggcgcgcaacgcgggcgcgctgctcgacggcaccgtcaccctccgcctccaccccgtcggactccactacgtcgcctcccgcctcgaggcgctccgggagctcgaggccgtgggcgccggcgccccagtcgactacctccgcgcctacgtcgcggaccttggcgaccaccgagcgctcgagcagctacggcggatcctgcgcctcctcacctcgctcaaggtcgtcgccccggggccccgccgcgaccccgcgccgctctcgatcctgcctttcgcgcgcctgcgcgtgctcgagctgcggggctgcgacctctctacctcggccgccaggggccttctcgagctccgacacaccctcgagaagctcgtctgtttcaattctacggatgctcttaggcatgtctttgcgagtagaatcatggatatcaaggactcccctgtatggagcaaactttcatatgtctcatgtgcatctaatggtgtagtactcatggacgagtcgttgcaattgttacctgcaactgaaaccttggaccttagtcgcaacaagtttgcaaaggtggacaatctgcagaaatgtacaaagttgcgaaatctggatctcggatttaatcatttgcgttcgatttcatccttgagtgaggtttccagtcgaatcgtaaaacttgttgtgagaaataatgctttaactacagtaaacgggattgaaaatctcaagtcactcatggggcttgatctctcttacaatatcatctcaattttctcagaattggaaatcctcggcactctacctctgttgcaaaacctctggttggaaggcaacccaatctgctgtgcccggtggtatcgagcacatgtgttcagtttttttcgtaatccagagaatttgaagctagatgataaaggtatgaacacacaagaatactgggaaaagcaagtattgtttgcatgcaggcaaaatcaacctgctggttatggattttattttcctgcaattgatgatcatgaagatgaagacatattgaatttgaagatgagaaaattttcccgacttgtgagcatagtggaggaagagagaaatctctgtgatggtgtagagcagcagtccacccactgtgatagtgacagttccaagaaggatgaaactgcagctgttgatcatgacctaataattgcttcgttgataaacaccgccgaaatgctgaagaaagaaaagtcaagtaattggctttgtgaatttaaggagtggatggatgacaatacagagaaaacagaaggcgacaacctatctgttggcttaactaatggcaatgggaagtatatcaaacaaaagaaaaggcagaaagcacacaaggagacttcaaataacatgtcggatttggtacaagtttcagaaggtggtagtagctcaaaccttttggaatcagattcatctttcacagataatgcattttctggttcaaatggagtcatcaaacaatcctcaaatgaacttaattttgaccaagatcatctaaaaatgcacttgaattcttttcaacgacctcctcctctagagttagtagccacttcacaaactgaccccttttctgagttggaaaatggctctagaaatatgctggcaaatgggacaccatccaatacaatgagcaagttaatagaatcaagtccaccccatacatattcaagtccacagtcacctccacaatacaaggaggacattctacatcgaagactttttatggaggaagaatttttgcagatttcaggacatcttcattctattggttcacttggtagtggtagcagctgcagcgatggttcttcgagtgattttggttcatgcaattctgaagatgattatgaagaaattcagacaaagatggagttgtctcttaatggccagatggttttatttccttctgtaaatggtgatgatcatgaggcgaataataacttagagcatttttcaggggagaatactttgtctgaccatccagaagaagggcattatttaggccatttaattgggcaaaaaggcaaggagaagtttaagtggagggtatttcctttcaagaatcataatggtaccaaactagaaaatccaaaaatgaatgacgatcaggtggctgagcatgttttagttgaaggaaatggccagttgacatgcaacccaagcaaaagtactcacaaggaaggctctaaaagtcattcttctaatatccttcataagaacaattcatctgtttgcacaattaacacaggcgaacacaacactcttgaggatttcttcaacttggaaatagcggacaaggatgggtttgaaacatgtgaacaagtagcttgttgcgcacacatgtttcaggattcaagtggtttagttcaaagagaggtagccttgctgcgaagttctcaaaacaaattgtatctgctactacttgatatggtttttgatggacaagaaatcatgccaagaattttgggcagctatagtctgcaaagtctagaaaaagtttcaattgggctgggactacaggcgctgagagtacacatgtcagatgatacaactcatctattcatcacaaggacttccaaggaagcgcaagatgtactttggctcttgagcgtaactaacttccccaaattaaaccacaagatacattttcaaagttgggagaacatccaagtcaaattgttcgagaaatgtattatacgcagaactgcaaatacgggaatatttctctactctatgttgatgttctggaggaatgacgttgaagaagactccctttttattagatccatctttgtcattgaaggctccatattggtgtgcattgaggacctagatcagtttggtggtatcccttatgattcaaatcccccatacttttcccttgatgcatcttgttctattagcaatatccgagaagtggtcatggatcagcgcaacaacaaatgtttgacattgattttggataatggtaggccaggagagtttcacaatagcatccaaaatcctcaaaacaagcagtctgaggaaatcggcacagtacatacatggaaacttaagtggttctctgaagaagcgtctctgaagttcatttctgtaattaaggctctctcctcgacagcagcaatttcgtctttacatgtaaagtgtatatcctgatgatgtcggttattgtagttctacggtgatttcattcattcttttgtggtttgtccatgtagctgttaatctgtacagtttgatagttgggttctaggtttgtgtttgctgtattctttgtagttattagatgattttcccaccctgaagttgtacagaacagagctagaagtgagtgtaagtgaatggggttgcagttttggcaacgggcggtttcgtaaagttggttcaaaacctcaggaggcgcgatggtttgatcaggaaaggaactcacgcgacagattgcgaagaatcacagtttagcagctacggcaaacaggcatatgaacaatgggactcgcatgctgaaactacaattacctatcggacctgcgtagtaccttcaaacttctgtgtctattttgctaccgctatttgaacagggttcaacctctgcttccccaccgacggcacatttattcatcatcgccagcatgtgaagccgtgacgggatcggcggcaggccgacatcagcgacaccttccagctgctgcacgacgagccccatggtcggccggtcgccttcttcatcctggatgcaccagcacgcgaccttgcagaccctctcgagctccacgttggcatccccggcgatcttgtcgtctagcagcccgaccacgtcccccgcgtgcagcctgacggcggcgtgcaccgggaagtacacagcggagttggaccctgtctccgaggagccgttgttccggcgtcccgagatgagctcgaacaggagcaggccgaagctgtacacgtcggccttggcggtgatcggcgcgcccgcgagccactctggcgccagatagcccatcgttccccgcatggtggtcagaacgcggctgaagtcgtggccgacaagcttggccatgccgaagtccgcaaccttggcgcccatctcctcatcaaggaggatgttctctggcttgatgt

SEQ ID NO: 6874 - DNA, 3342 bp, Zea Mays
tcgccttccgttccctctccagcaccgcaccacagctagcccgcgtgtcccccaatcatacgtaccaccgcgggggcgtgtccgcttgcatcctcctccctcccccgtcccgtctccaccctccacctcctctcgcgtccgccccgccgctcgcggatgcgccggcgcgctcccacccccaaaccctagcctcgatcccgatgggcacgccccgcgcggggtccccggcgtccccggtcaccggcgaccactacctcgacctgctcgtccgcttcgtggcgcgcaacgcgggcgcgctgctcgacggcaccgtcaccctccgcctccaccccgtcggactccactacgtcgcctcccgcctcgaggcgctccgggagctcgaggccgtgggcgccggcgccccagtcgactacctccgcgcctacgtcgcggaccttggcgaccaccgagcgctcgagcagctacggcggatcctgcgcctcctcacctcgctcaaggtcgtcgccccggggccccgccgcgaccccgcgccgctctcgatcctgcctttcgcgcgcctgcgcgtgctcgagctgcggggctgcgacctctctacctcggccgccaggggccttctcgagctccgacacaccctcgagaagctcgtctgtttcaattctacggatgctcttaggcatgtctttgcgagtagaatcatggatatcaaggactcccctgtatggagcaaactttcatatgtctcatgtgcatctaatggtgtagtactcatggacgagtcgttgcaattgttacctgcaactgaaaccttggaccttagtcgcaacaagtttgcaaaggtggacaatctgcagaaatgtacaaagttgcgaaatctggatctcggatttaatcatttgcgttcgatttcatccttgagtgaggtttccagtcgaatcgtaaaacttgttgtgagaaataatgctttaactacagtaaacgggattgaaaatctcaagtcactcatggggcttgatctctcttacaatatcatctcaattttctcagaattggaaatcctcggcactctacctctgttgcaaaacctctggttggaaggcaacccaatctgctgtgcccggtggtatcgagcacatgtgttcagtttttttcgtaatccagagaatttgaagctagatgataaaggtatgaacacacaagaatactgggaaaagcaagtattgtttgcatgcaggcaaaatcaacctgctggttatggattttattttcctgcaattgatgatcatgaagatgaagacatattgaatttgaagatgagaaaattttcccgacttgtgagcatagtggaggaagagagaaatctctgtgatggtgtagagcagcagtccacccactgtgatagtgacagttccaagaaggatgaaactgcagctgttgatcatgacctaataattgcttcgttgataaacaccgccgaaatgctgaagaaagaaaagtcaagtaattggctttgtgaatttaaggagtggatggatgacaatacagagaaaacagaaggcgacaacctatctgttggcttaactaatggcaatgggaagtatatcaaacaaaagaaaaggcagaaagcacacaaggagacttcaaataacatgtcggatttggtacaagtttcagaaggtggtagtagctcaaaccttttggaatcagattcatctttcacagataatgcattttctggttcaaatggagtcatcaaacaatcctcaaatgaacttaattttgaccaagatcatctaaaaatgcacttgaattcttttcaacgacctcctcctctagagttagtagccacttcacaaactgaccccttttctgagttggaaaatggctctagaaatatgctggcaaatgggacaccatccaatacaatgagcaagttaatagaatcaagtccaccccatacatattcaagtccacagtcacctccacaatacaaggaggacattctacatcgaagactttttatggaggaagaatttttgcagatttcaggacatcttcattctattggttcacttggtagtggtagcagctgcagcgatggttcttcgagtgattttggttcatgcaattctgaagatgattatgaagaaattcagacaaagatggagttgtctcttaatggccagatggttttatttccttctgtaaatggtgatgatcatgaggcgaataataacttagagcatttttcaggggagaatactttgtctgaccatccagaagaaggtgagccgagttgttcagatcacagagagtttgatattgaggagttccataacagtaaccagagaaatggccatctagggcattatttaggccatttaattgggcaaaaaggcaaggagaagtttaagtggagggtatttcctttcaagaatcataatggtaccaaactagaaaatccaaaaatgaatgacgatcaggtggctgagcatgttttagttgaaggaaatggccagttgacatgcaacccaagcaaaagtactcacaaggaaggctctaaaagtcattcttctaatatccttcataagaacaattcatctgtttgcacaattaacacaggcgaacacaacactcttgaggatttcttcaacttggaaatagcggacaaggatgggtttgaaacatgtgaacaagtagcttgttgcgcacacatgtttcaggattcaagtggtttagttcaaagagaggtagccttgctgcgaagttctcaaaacaaattgtatctgctactacttgatatggtttttgatggacaagaaatcatgccaagaattttgggcagctatagtctgcaaagtctagaaaaagtttcaattgggctgggactacaggcgctgagagtacacatgtcagatgatacaactcatctattcatcacaaggacttccaaggaagcgcaagatgtactttggctcttgagcgtaactaacttccccaaattaaaccacaagatacattttcaaagttgggagaacatccaagtcaaattgttcgagaaatgtattatacgcagaactgcaaatacgggaatatttctctactctatgttgatgttctggaggaatgacgttgaagaagactccctttttattagatccatctttgtcattgaaggctccatattggtgtgcattgaggacctagatcagtttggtggtatcccttatgattcaaatcccccatacttttcccttgatgcatcttgttctattagcaatatccgagaagtgggggggtctccgtggaagcctcgtttgtcccacaccaaagcatatgtctaag

SEQ ID NO: 6875 - DNA, 1489 bp, Zea Mays
atgtgttctcagctgtggaggtgcagggggttcgcgcgcttcgtgaacgtgcgggacgacaccggagcgacgccgctgcacctcgcggcgaggcagggctggcggcgctgcgtccacgtcctactcgagaacggcgccatcgtgtctgcctccagtggcgccttcggattctcgggcagcacgccgctgcatttggccgcgcgcgacggcaacctggactgcgtccggcaactgctgtcctggggcgccgaccgcctccagcgagactccgtcgggagaattccgtatgaggtcgccgcgaagcgagggcacgtcgcgtgcgcggcactgctgaacccgtcatccgcggagccccttgtctggccgtccgctctcaagttcatcagcgagctggaacccgatgccaaatctttgctcgaagcagccctgatggaggccaacagagagagggagaggaggaccctgaaaggcgccaagaatgcattgccctcaccatcgcaccccgatgacggcgctcatggcaccgccatagctgagggagagggaagaggagcagaagctgatgaaagaaaagcagaagaaggagaaggccgaaagaaaaaaaaaaagggaaagagtaagaggaagcatcgatcgccgagtgattcagatagcaacagtagtggtgcttcggtgttcgactccgaatctgaatcatgggtgacaggctctgaatactcttctggaagcagttcaagttatagttcatcagactccgagggcaagaagcgacaacacagaaggaagcagaagaagagaaggcacaggagggacaacacatcatcatcatcatcttctgaatctgagtctgcgtctgacagtgattctgatgataagggcagacggaggaagagtaaaagacgggctggtaggtgctgaatttaatgatctagacaaagcagtgtggaagttgaatatcattatatacttccgttctattcatgaatgacctttcatcatcatctgaacatgtgtcgggcttctcggatccaagaaatagatttagcatttgctttcctgaacggtagcactgataattttcactgtatgttcctatgatctttgtgtgaaccattgaatcctgtaacaatattcacctatggatttttcttaagtttggtgtggttcatcgtcatgttccctgtagtattgatgtaatcatttatccctggatcctcctatttgcttcattcttttgtgtaactcaataagttcagcagggcttaggtacacatggatagattaagggaacactaacctttgcattactactagatgtttcttagacgtaatggcaaaagaagattctggtttaagggtacacaagttgtttctgttgaacaattagaaagaaatccaaccaggaacatgatttcattattcattaatgcttttttaagcttataggcttcacatatttttaaaatgaactgttcctaggtgcattttg

SEQ ID NO: 6876 - DNA, 1160 bp, Zea Mays
tactgcacgccggtcataacagccccgtgcaagattgtatttcatatggtttaagaataggcaatagggcaaattcctgtgtactgattatctgagctaaccaaggaatgctaacagaaagctaggtggccacactaaatctagttaggcacacagaatcgatatccttgggccctggcatcatcaaatttgatgaaacggggaatctaatatgccacacaaaatagctggtgagttgtgaccacactccagctattacctaataccacagaccagcgcagaatagtagccccgttttagcataaagctttgttgcctgtataaacctactatgtttacaaaaatagcactaacacatgccaaaacagacccattcgttccagttgatttgaactttactttatgcaaacgcataacgactcacttgtttcggctgaataaaaaagagcaccgacacttgtccaacagcctaagcagaaacgagccatatgcgactacatccgcgcaccaacagagagctcggagctccaccagaagatccagcttgcggccccaacacgcaatgtctccagtctccactctccacaaggttcctcgcagccaaatgtaattcaaatttctagcccgaaaccacaactattcaccatgcacatccagatccgaagctgagcgttcaccaacgaaccccagcgcaaagcagacgcagatcgagcatagaaccggcacggcgaccatggacgaatggaaccgagatctcgcaatgcgggggaaggagctcacctccaaactcatcgcccggatccgagccctccttgccgccaccctgtcccgcgaagggcgggagccagaagagcgccgacagcagcacggccaccccgagcacgagcgccgcaacgaattgcagccgaatcaccctcgccgctcctcctcttccgcaccagcagtagaagcggacgcccctgcttcctcctgcgccgccgcctgccacagtatcatcatgtgaatttacaaagaatgagtaatcgaggatctaagaatttgcaaaaaattataaccaccccccccccccccccccccccccacaaaattctgctagtcaatattgaatatatgtatgtataaaaggaatctatcacattcacatatttcgaaataaaggg

SEQ ID NO: 6877 - DNA, 1649 bp, Zea Mays
ttaggctttaaattctgcttcacacccttggcgtcagacaactctatcatcaaaaacaacctgctagatcaaaactgtacagacaaaccaagtcgcatcaacccaaatctagaagtacccaagaaatccgatgccattttctgtagtcattagagtaacaccaatatcattaagcatgcaaaaatcagaatacagaaagtcgtcagcacaaggagtaacttgataatgctataggtgtcctagattaatgattctaaatagaaattattaacaagaggggaaagatggttcaagaatatatctggagatcagaacaagaaccaacaaaatacaatcctatgtccacactaattgtctcatttcaggagatttttttaaaaaaaactgaacgtggacaaagcaaagaaaaaccaaacatatataatggacatattaatagatcaggcatgtgaggtagttatgttaagtattagcattacataacacaactcattactatagtatggacagtatcacagtgcctacatattaaatcaaataatcagctatatcagggtaaatttatcagattgttcattccatccataaacaaatttaaaatagtgtagcacactaaggcacaaaattagatacgtgatctctaaattgttaatatagttaagccacatttcattatgtctaaatttaacctcaatttgtcaagcctttcctccttacaagtatatactataccctatgaggttataacactgaagtttggcaagatttttcaacatgcaattcttcaattcttttgaaaggtgtttaggatgcccatgtttcacatctctctgtactctgcagaccgcccacaccaaatcccgtaatgtgtattttgaagatgtgaaaaccatattcatctaaatctaaacgttcgatcagaaaaggaaaaacaaagtaattaagaatagagctgctagccactatcaggcacgggcacaccgatctgcagcacaagactgggatgtcgactggcgggcgagcagagcacggggagctcaaatccttcatgcacaccactgccgaacatttaggagcagggctatcttcaaattgatcaaggtattctagagaaggggaaaaagatagacatttaagagggataaggaacaggaaacttggaggatcatgaaaaatgttgttaaaaaacagcagccatgtgaatacaatcagtatttgctttagatttgcatcttaccacttagaatgtgtgctcttttgggtcatcatcaccatagaaccagatcctagcgttgcttggatgataatacttactattaaactcctgcaaacaagcaagacatacaagcacaaaatgaaaaactaaattaagtaattaacaacaaactaagcaaccaatattagcttagtgctactccaaaatatatagatagtttttggtggtgctagaatgaaatttggtgaggtgatatagcacttgttttttatacatcacaatgaatacgaccaactattaaaattaactctagaagtgttaagggcccaagcaatagctaaaagctcaaagcaaaggacatcatctagcactgcatttagatcagtagcaccgtcttgatcaccatgttgatgctacaatcagcaagttaaat

SEQ ID NO: 6878 - DNA, 1281 bp, Zea Mays
gctcgagaggctagtctcgaacaaatggaagtgggaagtgtgatggccagcctcaccgacctcgtcaacctcgacctgagtgactgcaccgacaggatcatcgccgagtacatctggtgatgtgtgactgctacacgccacaaggcgagccaatccccaccaacaagaggtacagcgccgccaaggttttcagccaccccgacgtcgcagctgaggtgccgtggtacggtattgagcaggagtacaccctccttcagaaggacgtgagctggcccctcggctggcctgttggtggataccctggtccccagggaccatactactgcgccgccggtgccgacaaggcctttgggcgcgacgtggttgacgcccactacaaggcctgcctctacgccggcatcaacatcagcggcatcaacggcgaagtcatgcctggacagtgggagttccaagtggggccgtccgttgggatctctgccggcgacgagatatgggtcgcccgctacattctcgagaggatcaccgagatggccggaatcgtcctctccctcgacccgaagccgatcaagggcgactggaacggcgccggcgcccacaccaactacagcaccaagtcgatgagggaggccgggggatacgaggtgatcaaggcggcgatcgacaagctggggaagaggcacaaggagcacatcgccgcgtacggcgagggcaacgagcgccgcctcacgggccgccacgagaccgccgacatcaacaccttcaaatggggcgtggcgaaccgcggcgcatccatccgcgtcggccgcgacaccgagagggagggcaagggctacttcgaggaccgcaggccggcgtccaacatggacccctacgtcgtcaccggcatgatcgccgagaccaccatcctgtggaatggaaactgatcaagcatgtgcattctcgagggagcccactgtttttcttctgcacaacgcatccgccgtggtgtcgctttggttttgaaatttagattccgttgtcctaaaatttatcactacggtctccggtgtattgctcgggaacaatgaataacgactgcgatgtttttttgtttttgcttgcgtcatagatgtacgtttggctgtgcttccagtttattgggtaaatgaaaaaaatgtaatggtctatcggtctcaaaatagtgctccctccgtttctttttagttatcgctagataattcaattttgcactatccagcgataactaaaacgaaatggaggaagcagtcattttagctctaa

SEQ ID NO: 6879 - DNA, 801 bp, Zea Mays
gtttcatccctacttccactaagaatatctgtttcctaaaagaatgcaaagtgcggccttcaagatcttgaggactcgactgaaaactgtgccattcagtgaaaatattaagcgcacatcttcagcaaatccatactcccagattctgcaagtgacagaagatggcaatagaaaccaagatacacagaactatagtgcaatcaatttcccgtcccttctccagcaatttgagcacatgcagctgcagcaccgtaaccatttgaaggatcaactgcaatcccgcaaatctgcttcagctctaacgttatctcaggagatacaaagatacgaagcagcacattcctcttcgctatcagagattaacaggcccccttcaagaacatccaaaggcattttatgatgcatttgattattgcgatgtatgatatgtttcccagaagcatcatcacaaatatgttggggctttggttagtctccttgatttttccaaaggaggttgcatagggtacatagagtgtaatattttttgtttcgttcctagattttgtcaagagatggcaattatttattggagaaagctcgtttctgccctctagtcattcttttcttagccgtttcactgctcatctggtttctgtaatttttcaattgaaggccaaatgagcaaagtagtaattggagatatgttactactgttctgcttatccatctctaataaattagcgttgcaatgtaaattcctgttgttggctcttattatatatttattatattctatatatgccttacctttaccccatt

SEQ ID NO: 6880 - DNA, 1381 bp, Zea Mays
agacagctgtgagcactatagttgagcaggttgtcctattagtattggaagttcatgcacgtatagctgaagagtctcaccacttccatcatcttgtatcctacctaatctgcaccttccacaacaaccattttctactggagaagcgtggtgctttgatagtccgtcgcctctgcgttcttctgggtgctgaaaaagtatatcgtgagttctccactattcttgagagtgaagttgaccttgattttgcatccgtcatggttcaggctttgaatttgattttgctcacatcaactgaacttggtgagctccgctctcttcttaagaagtcgttagtggattcctgtggcaaggacttgtttcagtcattatatgcttcgtggcgccactctccgatggctacaataagtttgtgtttacttgctcaggcatacagtcatgcgagctgtgttattcagtcgctgggagaagaagacataaatgtgaaatttttggttcagttagataaattgatccgtctcttagagactccagtatttgcttacttgcgtttgcagcttcttgagcctggaaagcacacctggcttctgaaaactctttatggtctcctgatgctgttgcctcagcaaagtgcggccttcaagatcttgaggactcgactgaaaactgtgccattcagtgaaaatattaagcgcacatcttcagcaaatccatactcccagattctgcaagtgacagaagatggcaatagaaaccaagatacacagaactatagtgcaatcaatttcccgtcccttctccagcaatttgagcacatgcagctgcagcaccgtaaccatttgaaggatcaactgcaatcccgcaaatctgcttcagctctaacgttatctcaggagatacaaagatacgaagcagcacattcctcttcgctatcagagattaacaggcccccttcaagaacatccaaaggcattttatgatgcatttgattattgcgatgtatgatatgtttcccagaagcatcatcacaaatatgttggggctttggttagtctccttgatttttccaaaggaggttgcatagggtacatagagtgtaatattttttgtttcgttcctagattttgtcaagagatggcaattatttattggagaaagctcgtttctgccctctagtcattcttttcttagccgtttcactgctcatctggtttctgtaatttttcaattgaaggccaaatgagcaaagtagtaattggagatatgttactactgttctgcttatccatctctaataaattagcgttgcaatgtaaattcctgttgttggctcttattatatatttattatattctatatatgccttacctttaccccatt

SEQ ID NO: 6881 - DNA, 1476 bp, Zea Mays
aaaagaccgatgtttttcggactgcattttgatagatctctacaactaccctcaacaattcttggcgtacctgaacgatatttttgatccactccttaatgcactttctgatccttcagacgtggttgtcctattagtattggaagttcatgcacgtatagctgaagagtctcaccacttccatcatcttgtatcctacctaatctgcaccttccacaacaaccattttctactggagaagcgtggtgctttgatagtccgtcgcctctgcgttcttctgggtgctgaaaaagtatatcgtgagttctccactattcttgagagtgaagttgaccttgattttgcatccgtcatggttcaggctttgaatttgattttgctcacatcaactgaacttggtgagctccgctctcttcttaagaagtcgttagtggattcctgtggcaaggacttgtttcagtcattatatgcttcgtggcgccactctccgatggctacaataagtttgtgtttacttgctcaggcatacagtcatgcgagctgtgttattcagtcgctgggagaagaagacataaatgtgaaatttttggttcagttagataaattgatccgtctcttagagactccagtatttgcttacttgcgtttgcagcttcttgagcctggaaagcacacctggcttctgaaaactctttatggtctcctgatgctgttgcctcagcaaagtgcggccttcaagatcttgaggactcgactgaaaactgtgccattcagtgaaaatattaagcgcacatcttcagcaaatccatactcccagattctgcaagtgacagaagatggcaatagaaaccaagatacacagaactatagtgcaatcaatttcccgtcccttctccagcaatttgagcacatgcagctgcagcaccgtaaccatttgaaggatcaactgcaatcccgcaaatctgcttcagctctaacgttatctcaggagatacaaagatacgaagcagcacattcctcttcgctatcagagattaacaggcccccttcaagaacatccaaaggcattttatgatgcatttgattattgcgatgtatgatatgtttcccagaagcatcatcacaaatatgttggggctttggttagtctccttgatttttccaaaggaggttgcatagggtacatagagtgtaatattttttgtttcgttcctagattttgtcaagagatggcaattatttattggagaaagctcgtttctgccctctagtcattcttttcttagccgtttcactgctcatctggtttctgtaatttttcaattgaaggccaaatgagcaaagtagtaattggagatatgttactactgttctgcttatccatctctaataaattagcgttgcaatgtaaattcctgttgttggctcttattatatatttattatattctatatatgccttacctttaccccatt

SEQ ID NO: 6882 - DNA, 1561 bp, Zea Mays
gttctctatcaagtcctttggaaatgaaattatgtagatttgttaggcatctagttatgtgagaattaaacagtgagcatgaggccacacgaactgaagcattgcattggttcttcactttgctggatcaatatcgtgctgagttcttggcgtacctgaacgatatttttgatccactccttaatgcactttctgatccttcagacgtggttgtcctattagtattggaagttcatgcacgtatagctgaagagtctcaccacttccatcatcttgtatcctacctaatctgcaccttccacaacaaccattttctactggagaagcgtggtgctttgatagtccgtcgcctctgcgttcttctgggtgctgaaaaagtatatcgtgagttctccactattcttgagagtgaagttgaccttgattttgcatccgtcatggttcaggctttgaatttgattttgctcacatcaactgaacttggtgagctccgctctcttcttaagaagtcgttagtggattcctgtggcaaggacttgtttcagtcattatatgcttcgtggcgccactctccgatggctacaataagtttgtgtttacttgctcaggcatacagtcatgcgagctgtgttattcagtcgctgggagaagaagacataaatgtgaaatttttggttcagttagataaattgatccgtctcttagagactccagtatttgcttacttgcgtttgcagcttcttgagcctggaaagcacacctggcttctgaaaactctttatggtctcctgatgctgttgcctcagcaaagtgcggccttcaagatcttgaggactcgactgaaaactgtgccattcagtgaaaatattaagcgcacatcttcagcaaatccatactcccagattctgcaagtgacagaagatggcaatagaaaccaagatacacagaactatagtgcaatcaatttcccgtcccttctccagcaatttgagcacatgcagctgcagcaccgtaaccatttgaaggatcaactgcaatcccgcaaatctgcttcagctctaacgttatctcaggagatacaaagatacgaagcagcacattcctcttcgctatcagagattaacaggcccccttcaagaacatccaaaggcattttatgatgcatttgattattgcgatgtatgatatgtttcccagaagcatcatcacaaatatgttggggctttggttagtctccttgatttttccaaaggaggttgcatagggtacatagagtgtaatattttttgtttcgttcctagattttgtcaagagatggcaattatttattggagaaagctcgtttctgccctctagtcattcttttcttagccgtttcactgctcatctggtttctgtaatttttcaattgaaggccaaatgagcaaagtagtaattggagatatgttactactgttctgcttatccatctctaataaattagcgttgcaatgtaaattcctgttgttggctcttattatatatttattatattctatatatgccttacctttaccccatt

SEQ ID NO: 6883 - DNA, 1690 bp, Zea Mays
ttgttcggagggcaggctctactgatgaattcactcggttgacgtctatcacatggatcaacgagtttgtgaagcttggtggggaacaacttgttccttactatgcagatatactgggtgctatcttaccatgcatatctgacgaggaggagaaaatccgagtggttgcacgtgaaacaaatgaggaactacgtgctataaaagctgatccaactgagggatttgatattggagcaatcctttcaatcgcaaaaagagaattaaacagtgagcatgaggccacacgaactgaagcattgcattggttcttcactttgctggatcaatatcgtgctgaggttgtcctattagtattggaagttcatgcacgtatagctgaagagtctcaccacttccatcatcttgtatcctacctaatctgcaccttccacaacaaccattttctactggagaagcgtggtgctttgatagtccgtcgcctctgcgttcttctgggtgctgaaaaagtatatcgtgagttctccactattcttgagagtgaagttgaccttgattttgcatccgtcatggttcaggctttgaatttgattttgctcacatcaactgaacttggtgagctccgctctcttcttaagaagtcgttagtggattcctgtggcaaggacttgtttcagtcattatatgcttcgtggcgccactctccgatggctacaataagtttgtgtttacttgctcaggcatacagtcatgcgagctgtgttattcagtcgctgggagaagaagacataaatgtgaaatttttggttcagttagataaattgatccgtctcttagagactccagtatttgcttacttgcgtttgcagcttcttgagcctggaaagcacacctggcttctgaaaactctttatggtctcctgatgctgttgcctcagcaaagtgcggccttcaagatcttgaggactcgactgaaaactgtgccattcagtgaaaatattaagcgcacatcttcagcaaatccatactcccagattctgcaagtgacagaagatggcaatagaaaccaagatacacagaactatagtgcaatcaatttcccgtcccttctccagcaatttgagcacatgcagctgcagcaccgtaaccatttgaaggatcaactgcaatcccgcaaatctgcttcagctctaacgttatctcaggagatacaaagatacgaagcagcacattcctcttcgctatcagagattaacaggcccccttcaagaacatccaaaggcattttatgatgcatttgattattgcgatgtatgatatgtttcccagaagcatcatcacaaatatgttggggctttggttagtctccttgatttttccaaaggaggttgcatagggtacatagagtgtaatattttttgtttcgttcctagattttgtcaagagatggcaattatttattggagaaagctcgtttctgccctctagtcattcttttcttagccgtttcactgctcatctggtttctgtaatttttcaattgaaggccaaatgagcaaagtagtaattggagatatgttactactgttctgcttatccatctctaataaattagcgttgcaatgtaaattcctgttgttggctcttattatatatttattatattctatatatgccttacctttaccccatt

SEQ ID NO: 6884 - DNA, 2439 bp, Zea Mays
cttttaacagattgcatttgatgcttggaaaatattagttctatatgttgttattcatacattaattcgtaggattttatttaggtttacctttgccatcaactgaaatggatattgtggatctggaagaaaggtcaatgagggagattgcagggctctacagaaaattttcctttgatgtgcaaatcgtgcctcctgtgcttaattctttcctggaccaagatagcagagtgcgttactatgcttgtgaagcgctatacaacatagcaaaggttgtaagaggggatttcatcatctacttcaacaaaatttttgatgctttatgcaagctttctgcagattccgatgctaatgttcaaagtgcagctcaccttcttgacaggcttgtcaaggatatcgtaaccgagagtgaccagttcagcatagaagaattcataccgcttttgagagagcgcatgaatgtgctgaatccttatgtaagacaatttttggtggggtggataacagtgttagacagtgttcctgatattgacatgcttggtttccttcctgattttctcgatggtttattcaatatgctgagtgattccagccatgagataaggcagcaagctgatgcagcactttctgagtttctgcaggagataaagaactcaccaattatggtcgtatggctgaaatacttgttcggagggcaggctctactgatgaattcactcggttgacgtctatcacatggatcaacgagtttgtgaagcttggtggggaacaacttgttccttactatgcagatatactgggtgctatcttaccatgcatatctgacgaggaggagaaaatccgagtggttgcacgtgaaacaaatgaggaactacgtgctataaaagctgatccaactgagggatttgatattggagcaatcctttcaatcgcaaaaagagaattaaacagtgagcatgaggccacacgaactgaagcattgcattggttcttcactttgctggatcaatatcgtgctgagttcttggcgtacctgaacgatatttttgatccactccttaatgcactttctgatccttcagacgtggttgtcctattagtattggaagttcatgcacgtatagctgaagagtctcaccacttccatcatcttgtatcctacctaatctgcaccttccacaacaaccattttctactggagaagcgtggtgctttgatagtccgtcgcctctgcgttcttctgggtgctgaaaaagtatatcgtgagttctccactattcttgagagtgaagttgaccttgattttgcatccgtcatggttcaggctttgaatttgattttgctcacatcaactgaacttggtgagctccgctctcttcttaagaagtcgttagtggattcctgtggcaaggacttgtttcagtcattatatgcttcgtggcgccactctccgatggctacaataagtttgtgtttacttgctcaggcatacagtcatgcgagctgtgttattcagtcgctgggagaagaagacataaatgtgaaatttttggttcagttagataaattgatccgtctcttagagactccagtatttgcttacttgcgtttgcagcttcttgagcctggaaagcacacctggcttctgaaaactctttatggtctcctgatgctgttgcctcagcaaagtgcggccttcaagatcttgaggactcgactgaaaactgtgccattcagtgaaaatattaagcgcacatcttcagcaaatccatactcccagattctgcaagtgacagaagatggcaatagaaaccaagatacacagaactatagtgcaatcaatttcccgtcccttctccagcaatttgagcacatgcagctgcagcaccgtaaccatttgaaggatcaactgcaatcccgcaaatctgcttcagctctaacgttatctcaggagatacaaagatacgaagcagcacattcctcttcgctatcagagattaacaggcccccttcaagaacatccaaaggcattttatgatgcatttgattattgcgatgtatgatatgtttcccagaagcatcatcacaaatatgttggggctttggttagtctccttgatttttccaaaggaggttgcatagggtacatagagtgtaatattttttgtttcgttcctagattttgtcaagagatggcaattatttattggagaaagctcgtttctgccctctagtcattcttttcttagccgtttcactgctcatctggtttctgtaatttttcaattgaaggccaaatgagcaaagtagtaattggagatatgttactactgttctgcttatccatctctaataaattagcgttgcaatgtaaattcctgttgttggctcttattatatatttattatattctatatatgccttacctttaccccatt

SEQ ID NO: 6885 - DNA, 2659 bp, Zea Mays
cttttatgaaagcattttttaaggcaaatctatgcgtatgattatcaagtttctaaactgaacacattaaaagttttttgtagtcaaagttttaaagttttacttaaactttgtcaaaaatgtcaattgtttgccaaccatagggattaacttctacgggttgtagatatgggcatatggcctcccactttcagacacttcctttctggcattcttttaacagattgcatttgatgcttggaaaatattagttctatatgttgttattcatacattaattcgtaggattttatttaggtttacctttgccatcaactgaaatggatattgtggatctggaagaaaggtcaatgagggagattgcagggctctacagaaaattttcctttgatgtgcaaatcgtgcctcctgtgcttaattctttcctggaccaagatagcagagtgcgttactatgcttgtgaagcgctatacaacatagcaaaggttgtaagaggggatttcatcatctacttcaacaaaatttttgatgctttatgcaagctttctgcagattccgatgctaatgttcaaagtgcagctcaccttcttgacaggcttgtcaaggatatcgtaaccgagagtgaccagttcagcatagaagaattcataccgcttttgagagagcgcatgaatgtgctgaatccttatgtaagacaatttttggtggggtggataacagtgttagacagtgttcctgatattgacatgcttggtttccttcctgattttctcgatggtttattcaatatgctgagtgattccagccatgagataaggcagcaagctgatgcagcactttctgagtttctgcaggagataaagaactcaccaaatgtagattatggtcgtatggctgaaatacttgttcggagggcaggctctactgatgaattcactcggttgacgtctatcacatggatcaacgagtttgtgaagcttggtggggaacaacttgttccttactatgcagatatactgggtgctatcttaccatgcatatctgacgaggaggagaaaatccgagtggttgcacgtgaaacaaatgaggaactacgtgctataaaagctgatccaactgagggatttgatattggagcaatcctttcaatcgcaaaaagagaattaaacagtgagcatgaggccacacgaactgaagcattgcattggttcttcactttgctggatcaatatcgtgctgagttcttggcgtacctgaacgatatttttgatccactccttaatgcactttctgatccttcagacgtggttgtcctattagtattggaagttcatgcacgtatagctgaagagtctcaccacttccatcatcttgtatcctacctaatctgcaccttccacaacaaccattttctactggagaagcgtggtgctttgatagtccgtcgcctctgcgttcttctgggtgctgaaaaagtatatcgtgagttctccactattcttgagagtgaagttgaccttgattttgcatccgtcatggttcaggctttgaatttgattttgctcacatcaactgaacttggtgagctccgctctcttcttaagaagtcgttagtggattcctgtggcaaggacttgtttcagtcattatatgcttcgtggcgccactctccgatggctacaataagtttgtgtttacttgctcaggcatacagtcatgcgagctgtgttattcagtcgctgggagaagaagacataaatgtgaaatttttggttcagttagataaattgatccgtctcttagagactccagtatttgcttacttgcgtttgcagcttcttgagcctggaaagcacacctggcttctgaaaactctttatggtctcctgatgctgttgcctcagcaaagtgcggccttcaagatcttgaggactcgactgaaaactgtgccattcagtgaaaatattaagcgcacatcttcagcaaatccatactcccagattctgcaagtgacagaagatggcaatagaaaccaagatacacagaactatagtgcaatcaatttcccgtcccttctccagcaatttgagcacatgcagctgcagcaccgtaaccatttgaaggatcaactgcaatcccgcaaatctgcttcagctctaacgttatctcaggagatacaaagatacgaagcagcacattcctcttcgctatcagagattaacaggcccccttcaagaacatccaaaggcattttatgatgcatttgattattgcgatgtatgatatgtttcccagaagcatcatcacaaatatgttggggctttggttagtctccttgatttttccaaaggaggttgcatagggtacatagagtgtaatattttttgtttcgttcctagattttgtcaagagatggcaattatttattggagaaagctcgtttctgccctctagtcattcttttcttagccgtttcactgctcatctggtttctgtaatttttcaattgaaggccaaatgagcaaagtagtaattggagatatgttactactgttctgcttatccatctctaataaattagcgttgcaatgtaaattcctgttgttggctcttattatatatttattatattctatatatgccttacctttaccccatt

SEQ ID NO: 6886 - DNA, 2212 bp, Zea Mays
aaaacatagctttgatcattatttgttaatagaatcaaatcgtgcctcctgtgcttaattctttcctggaccaagatagcagagtgcgttactatgcttgtgaagcgctatacaacatagcaaaggttgtaagaggggatttcatcatctacttcaacaaaatttttgatgctttatgcaagctttctgcagattccgatgctaatgttcaaagtgcagctcaccttcttgacaggcttgtcaaggatatcgtaaccgagagtgaccagttcagcatagaagaattcataccgcttttgagagagcgcatgaatgtgctgaatccttatgtaagacaatttttggtggggtggataacagtgttagacagtgttcctgatattgacatgcttggtttccttcctgattttctcgatggtttattcaatatgctgagtgattccagccatgagataaggcagcaagctgatgcagcactttctgagtttctgcaggagataaagaactcaccaatcaacgagtttgtgaagcttggtggggaacaacttgttccttactatgcagatatactgggtgctatcttaccatgcatatctgacgaggaggagaaaatccgagtggttgcacgtgaaacaaatgaggaactacgtgctataaaagctgatccaactgagggatttgatattggagcaatcctttcaatcgcaaaaagagaattaaacagtgagcatgaggccacacgaactgaagcattgcattggttcttcactttgctggatcaatatcgtgctgagttcttggcgtacctgaacgatatttttgatccactccttaatgcactttctgatccttcagacgtggttgtcctattagtattggaagttcatgcacgtatagctgaagagtctcaccacttccatcatcttgtatcctacctaatctgcaccttccacaacaaccattttctactggagaagcgtggtgctttgatagtccgtcgcctctgcgttcttctgggtgctgaaaaagtatatcgtgagttctccactattcttgagagtgaagttgaccttgattttgcatccgtcatggttcaggctttgaatttgattttgctcacatcaactgaacttggtgagctccgctctcttcttaagaagtcgttagtggattcctgtggcaaggacttgtttcagtcattatatgcttcgtggcgccactctccgatggctacaataagtttgtgtttacttgctcaggcatacagtcatgcgagctgtgttattcagtcgctgggagaagaagacataaatgtgaaatttttggttcagttagataaattgatccgtctcttagagactccagtatttgcttacttgcgtttgcagcttcttgagcctggaaagcacacctggcttctgaaaactctttatggtctcctgatgctgttgcctcagcaaagtgcggccttcaagatcttgaggactcgactgaaaactgtgccattcagtgaaaatattaagcgcacatcttcagcaaatccatactcccagattctgcaagtgacagaagatggcaatagaaaccaagatacacagaactatagtgcaatcaatttcccgtcccttctccagcaatttgagcacatgcagctgcagcaccgtaaccatttgaaggatcaactgcaatcccgcaaatctgcttcagctctaacgttatctcaggagatacaaagatacgaagcagcacattcctcttcgctatcagagattaacaggcccccttcaagaacatccaaaggcattttatgatgcatttgattattgcgatgtatgatatgtttcccagaagcatcatcacaaatatgttggggctttggttagtctccttgatttttccaaaggaggttgcatagggtacatagagtgtaatattttttgtttcgttcctagattttgtcaagagatggcaattatttattggagaaagctcgtttctgccctctagtcattcttttcttagccgtttcactgctcatctggtttctgtaatttttcaattgaaggccaaatgagcaaagtagtaattggagatatgttactactgttctgcttatccatctctaataaattagcgttgcaatgtaaattcctgttgttggctcttattatatatttattatattctatatatgccttacctttaccccatt

SEQ ID NO: 6887 - DNA, 2674 bp, Zea Mays
ggagaagaaaaaaatagcggtagcgctcggatcccttcttcctccagatcacaccaccgtcgcctccgcctgcaaatccattcctagactcgagctgttgctgcgagcgagctcgggttggggctcaggtctctagggtttcgcctccctgctcctggtgctcatcgccttggaccttggtctgtcgggttagggttgtcgcggctgcgggagccgtgggtcggcgggtgcggccgatgcggcgatcgccggagatagggaggctgtagcggcggcggggcaggggatctcctgggtggattctccggcgatggccgcagacgcactatccatcatcccgggcgccgtgcttcggaacctttctgacaagctctacgagaagaggaaaaacgccgcgctcgagattgaggggattgtgaagcagcttgcaatggctggggagcatgagaggatatcagcagttatctcgctgctcaccaacgatttcacatactcgccacaaacgaaccatcggaagggtgggttgattggtcttgcagcagttactgttggactcaccagtgaggcagctcagcatcttgagcaaatcgtgcctcctgtgcttaattctttcctggaccaagatagcagagtgcgttactatgcttgtgaagcgctatacaacatagcaaaggttgtaagaggggatttcatcatctacttcaacaaaatttttgatgctttatgcaagctttctgcagattccgatgctaatgttcaaagtgcagctcaccttcttgacaggcttgtcaaggatatcgtaaccgagagtgaccagttcagtgttagacagtgttcctgatattgacatgcttggtttccttcctgattttctcgatggtttattcaatatgctgagtgattccagccatgagataaggcagcaagctgatgcagcactttctgagtttctgcaggagataaagaactcaccaatcaacgagtttgtgaagcttggtggggaacaacttgttccttactatgcagatatactgggtgctatcttaccatgcatatctgacgaggaggagaaaatccgagtggttgcacgtgaaacaaatgaggaactacgtgctataaaagctgatccaactgagggatttgatattggagcaatcctttcaatcgcaaaaagagaattaaacagtgagcatgaggccacacgaactgaagcattgcattggttcttcactttgctggatcaatatcgtgctgagttcttggcgtacctgaacgatatttttgatccactccttaatgcactttctgatccttcagacgtggttgtcctattagtattggaagttcatgcacgtatagctgaagagtctcaccacttccatcatcttgtatcctacctaatctgcaccttccacaacaaccattttctactggagaagcgtggtgctttgatagtccgtcgcctctgcgttcttctgggtgctgaaaaagtatatcgtgagttctccactattcttgagagtgaagttgaccttgattttgcatccgtcatggttcaggctttgaatttgattttgctcacatcaactgaacttggtgagctccgctctcttcttaagaagtcgttagtggattcctgtggcaaggacttgtttcagtcattatatgcttcgtggcgccactctccgatggctacaataagtttgtgtttacttgctcaggcatacagtcatgcgagctgtgttattcagtcgctgggagaagaagacataaatgtgaaatttttggttcagttagataaattgatccgtctcttagagactccagtatttgcttacttgcgtttgcagcttcttgagcctggaaagcacacctggcttctgaaaactctttatggtctcctgatgctgttgcctcagcaaagtgcggccttcaagatcttgaggactcgactgaaaactgtgccattcagtgaaaatattaagcgcacatcttcagcaaatccatactcccagattctgcaagtgacagaagatggcaatagaaaccaagatacacagaactatagtgcaatcaatttcccgtcccttctccagcaatttgagcacatgcagctgcagcaccgtaaccatttgaaggatcaactgcaatcccgcaaatctgcttcagctctaacgttatctcaggagatacaaagatacgaagcagcacattcctcttcgctatcagagattaacaggcccccttcaagaacatccaaaggcattttatgatgcatttgattattgcgatgtatgatatgtttcccagaagcatcatcacaaatatgttggggctttggttagtctccttgatttttccaaaggaggttgcatagggtacatagagtgtaatattttttgtttcgttcctagattttgtcaagagatggcaattatttattggagaaagctcgtttctgccctctagtcattcttttcttagccgtttcactgctcatctggtttctgtaatttttcaattgaaggccaaatgagcaaagtagtaattggagatatgttactactgttctgcttatccatctctaataaattagcgttgcaatgtaaattcctgttgttggctcttattatatatttattatattctatatatgccttacctttaccccatt

SEQ ID NO: 6888 - DNA, 2801 bp, Zea Mays
ggagaagaaaaaaatagcggtagcgctcggatcccttcttcctccagatcacaccaccgtcgcctccgcctgcaaatccattcctagactcgagctgttgctgcgagcgagctcgggttggggctcaggtctctagggtttcgcctccctgctcctggtgctcatcgccttggaccttggtctgtcgggttagggttgtcgcggctgcgggagccgtgggtcggcgggtgcggccgatgcggcgatcgccggagatagggaggctgtagcggcggcggggcaggggatctcctgggtggattctccggcgatggccgcagacgcactatccatcatcccgggcgccgtgcttcggaacctttctgacaagctctacgagaagaggaaaaacgccgcgctcgagattgaggggattgtgaagcagcttgcaatggctggggagcatgagaggatatcagcagttatctcgctgctcaccaacgatttcacatactcgccacaaacgaaccatcggaagggtgggttgattggtcttgcagcagttactgttggactcaccagtgaggcagctcagcatcttgagcaaatcgtgcctcctgtgcttaattctttcctggaccaagatagcagagtgcgttactatgcttgtgaagcgctatacaacatagcaaaggttgtaagaggggatttcatcatctacttcaacaaaatttttgatgctttatgcaagctttctgcagattccgatgctaatgttcaaagtgcagctcaccttcttgacaggcttgtcaaggatatcgtaaccgagagtgaccagttcagcatagaagaattcataccgcttttgagagagcgcatgaatgtgctgaatccttatgtaagacaatttttggtggggtggataacagtgttagacagtgttcctgatattgacatgcttggtttccttcctgattttctcgatggtttattcaatatgctgagtgattccagccatgagataaggcagcaagctgatgcagcactttctgagtttctgcaggagataaagaactcaccagctctactgatgaattcactcggttgacgtctatcacatggatcaacgagtttgtgaagcttggtggggaacaacttgttccttactatgcagatatactgggtgctatcttaccatgcatatctgacgaggaggagaaaatccgagtggttgcacgtgaaacaaatgaggaactacgtgctataaaagctgatccaactgagggatttgatattggagcaatcctttcaatcgcaaaaagagaattaaacagtgagcatgaggccacacgaactgaagcattgcattggttcttcactttgctggatcaatatcgtgctgagttcttggcgtacctgaacgatatttttgatccactccttaatgcactttctgatccttcagacgtggttgtcctattagtattggaagttcatgcacgtatagctgaagagtctcaccacttccatcatcttgtatcctacctaatctgcaccttccacaacaaccattttctactggagaagcgtggtgctttgatagtccgtcgcctctgcgttcttctgggtgctgaaaaagtatatcgtgagttctccactattcttgagagtgaagttgaccttgattttgcatccgtcatggttcaggctttgaatttgattttgctcacatcaactgaacttggtgagctccgctctcttcttaagaagtcgttagtggattcctgtggcaaggacttgtttcagtcattatatgcttcgtggcgccactctccgatggctacaataagtttgtgtttacttgctcaggcatacagtcatgcgagctgtgttattcagtcgctgggagaagaagacataaatgtgaaatttttggttcagttagataaattgatccgtctcttagagactccagtatttgcttacttgcgtttgcagcttcttgagcctggaaagcacacctggcttctgaaaactctttatggtctcctgatgctgttgcctcagcaaagtgcggccttcaagatcttgaggactcgactgaaaactgtgccattcagtgaaaatattaagcgcacatcttcagcaaatccatactcccagattctgcaagtgacagaagatggcaatagaaaccaagatacacagaactatagtgcaatcaatttcccgtcccttctccagcaatttgagcacatgcagctgcagcaccgtaaccatttgaaggatcaactgcaatcccgcaaatctgcttcagctctaacgttatctcaggagatacaaagatacgaagcagcacattcctcttcgctatcagagattaacaggcccccttcaagaacatccaaaggcattttatgatgcatttgattattgcgatgtatgatatgtttcccagaagcatcatcacaaatatgttggggctttggttagtctccttgatttttccaaaggaggttgcatagggtacatagagtgtaatattttttgtttcgttcctagattttgtcaagagatggcaattatttattggagaaagctcgtttctgccctctagtcattcttttcttagccgtttcactgctcatctggtttctgtaatttttcaattgaaggccaaatgagcaaagtagtaattggagatatgttactactgttctgcttatccatctctaataaattagcgttgcaatgtaaattcctgttgttggctcttattatatatttattatattctatatatgccttacctttaccccatt

SEQ ID NO: 6889 - DNA, 2990 bp, Zea Mays
gatacacctggtccacgcactgcgctgctcggctgacagtcaaggtcatgaagcccggtcccacttgccaggctggcctccgctctggaccatcacccacgagaaacaggcgccgttaatggctgccacaacggtaaacgttaccctttcggagaagaaaaaaatagcggtagcgctcggatcccttcttcctccagatcacaccaccgtcgcctccgcctgcaaatccattcctagactcgagctgttgctgcgagcgagctcgggttggggctcaggtctctagggtttcgcctccctgctcctggtgctcatcgccttggaccttggtctgtcgggttagggttgtcgcggctgcgggagccgtgggtcggcgggtgcggccgatgcggcgatcgccggagatagggaggctgtagcggcggcggggcaggggatctcctgggtggattctccggcgatggccgcagacgcactatccatcatcccgggcgccgtgcttcggaacctttctgacaagctctacgagaagaggaaaaacgccgcgctcgagattgaggggattgtgaagcagcttgcaatggctggggagcatgagaggatatcagcagttatctcgctgctcaccaacgatttcacatactcgccacaaacgaaccatcggaagggtgggttgattggtcttgcagcagttactgttggactcaccagtgaggcagctcagcatcttgagcaaatcgtgcctcctgtgcttaattctttcctggaccaagatagcagagtgcgttactatgcttgtgaagcgctatacaacatagcaaaggttgtaagaggggatttcatcatctacttcaacaaaatttttgatgctttatgcaagctttctgcagattccgatgctaatgttcaaagtgcagctcaccttcttgacaggcttgtcaaggatatcgtaaccgagagtgaccagttcagcatagaagaattcataccgcttttgagagagcgcatgaatgtgctgaatccttatgtaagacaatttttggtggggtggataacagtgttagacagtgttcctgatattgacatgcttggtttccttcctgattttctcgatggtttattcaatatgctgagtgattccagccatgagataaggcagcaagctgatgcagcactttctgagtttctgcaggagataaagaactcaccaattatggtcgtatggctgaaatacttgttcggagggcaggctctactgatgaattcactcggttgacgtctatcacatggatcaacgagtttgtgaagcttggtggggaacaacttgttccttactatgcagatatactgggtgctatcttaccatgcatatctgacgaggaggagaaaatccgagtggttgcacgtgaaacaaatgaggaactacgtgctataaaagctgatccaactgagggatttgatattggagcaatcctttcaatcgcaaaaagagaattaaacagtgagcatgaggccacacgaactgaagcattgcattggttcttcactttgctggatcaatatcgtgctgagttcttggcgtacctgaacgatatttttgatccactccttaatgcactttctgatccttcagacgtggttgtcctattagtattggaagttcatgcacgtatagctgaagagtctcaccacttccatcatcttgtatcctacctaatctgcaccttccacaacaaccattttctactggagaagcgtggtgctttgatagtccgtcgcctctgcgttcttctgggtgctgaaaaagtatatcgtgagttctccactattcttgagagtgaagttgaccttgattttgcatccgtcatggttcaggctttgaatttgattttgctcacatcaactgaacttggtgagctccgctctcttcttaagaagtcgttagtggattcctgtggcaaggacttgtttcagtcattatatgcttcgtggcgccactctccgatggctacaataagtttgtgtttacttgctcaggcatacagtcatgcgagctgtgttattcagtcgctgggagaagaagacataaatgtgaaatttttggttcagttagataaattgatccgtctcttagagactccagtatttgcttacttgcgtttgcagcttcttgagcctggaaagcacacctggcttctgaaaactctttatggtctcctgatgctgttgcctcagcaaagtgcggccttcaagatcttgaggactcgactgaaaactgtgccattcagtgaaaatattaagcgcacatcttcagcaaatccatactcccagattctgcaagtgacagaagatggcaatagaaaccaagatacacagaactatagtgcaatcaatttcccgtcccttctccagcaatttgagcacatgcagctgcagcaccgtaaccatttgaaggatcaactgcaatcccgcaaatctgcttcagctctaacgttatctcaggagatacaaagatacgaagcagcacattcctcttcgctatcagagattaacaggcccccttcaagaacatccaaaggcattttatgatgcatttgattattgcgatgtatgatatgtttcccagaagcatcatcacaaatatgttggggctttggttagtctccttgatttttccaaaggaggttgcatagggtacatagagtgtaatattttttgtttcgttcctagattttgtcaagagatggcaattatttattggagaaagctcgtttctgccctctagtcattcttttcttagccgtttcactgctcatctggtttctgtaatttttcaattgaaggccaaatgagcaaagtagtaattggagatatgttactactgttctgcttatccatctctaataaattagcgttgcaatgtaaattcctgttgttggctcttattatatatttattatattctatatatgccttacctttaccccatt

SEQ ID NO: 6890 - DNA, 3006 bp, Zea Mays
tggattatggatacacctggtccacgcactgcgctgctcggctgacagtcaaggtcatgaagcccggtcccacttgccaggctggcctccgctctggaccatcacccacgagaaacaggcgccgttaatggctgccacaacggtaaacgttaccctttcggagaagaaaaaaatagcggtagcgctcggatcccttcttcctccagatcacaccaccgtcgcctccgcctgcaaatccattcctagactcgagctgttgctgcgagcgagctcgggttggggctcaggtctctagggtttcgcctccctgctcctggtgctcatcgccttggaccttggtctgtcgggttagggttgtcgcggctgcgggagccgtgggtcggcgggtgcggccgatgcggcgatcgccggagatagggaggctgtagcggcggcggggcaggggatctcctgggtggattctccggcgatggccgcagacgcactatccatcatcccgggcgccgtgcttcggaacctttctgacaagctctacgagaagaggaaaaacgccgcgctcgagattgaggggattgtgaagcagcttgcaatggctggggagcatgagaggatatcagcagttatctcgctgctcaccaacgatttcacatactcgccacaaacgaaccatcggaagggtgggttgattggtcttgcagcagttactgttggactcaccagtgaggcagctcagcatcttgagcaaatcgtgcctcctgtgcttaattctttcctggaccaagatagcagagtgcgttactatgcttgtgaagcgctatacaacatagcaaaggttgtaagaggggatttcatcatctacttcaacaaaatttttgatgctttatgcaagctttctgcagattccgatgctaatgttcaaagtgcagctcaccttcttgacaggcttgtcaaggatatcgtaaccgagagtgaccagttcagcatagaagaattcataccgcttttgagagagcgcatgaatgtgctgaatccttatgtaagacaatttttggtggggtggataacagtgttagacagtgttcctgatattgacatgcttggtttccttcctgattttctcgatggtttattcaatatgctgagtgattccagccatgagataaggcagcaagctgatgcagcactttctgagtttctgcaggagataaagaactcaccaaatgtagattatggtcgtatggctgaaatacttgttcggagggcaggctctactgatgaattcactcggttgacgtctatcacatggatcaacgagtttgtgaagcttggtggggaacaacttgttccttactatgcagatatactgggtgctatcttaccatgcatatctgacgaggaggagaaaatccgagtggttgcacgtgaaacaaatgaggaactacgtgctataaaagctgatccaactgagggatttgatattggagcaatcctttcaatcgcaaaaagagaattaaacagtgagcatgaggccacacgaactgaagcattgcattggttcttcactttgctggatcaatatcgtgctgagttcttggcgtacctgaacgatatttttgatccactccttaatgcactttctgatccttcagacgtggttgtcctattagtattggaagttcatgcacgtatagctgaagagtctcaccacttccatcatcttgtatcctacctaatctgcaccttccacaacaaccattttctactggagaagcgtggtgctttgatagtccgtcgcctctgcgttcttctgggtgctgaaaaagtatatcgtgagttctccactattcttgagagtgaagttgaccttgattttgcatccgtcatggttcaggctttgaatttgattttgctcacatcaactgaacttggtgagctccgctctcttcttaagaagtcgttagtggattcctgtggcaaggacttgtttcagtcattatatgcttcgtggcgccactctccgatggctacaataagtttgtgtttacttgctcaggcatacagtcatgcgagctgtgttattcagtcgctgggagaagaagacataaatgtgaaatttttggttcagttagataaattgatccgtctcttagagactccagtatttgcttacttgcgtttgcagcttcttgagcctggaaagcacacctggcttctgaaaactctttatggtctcctgatgctgttgcctcagcaaagtgcggccttcaagatcttgaggactcgactgaaaactgtgccattcagtgaaaatattaagcgcacatcttcagcaaatccatactcccagattctgcaagtgacagaagatggcaatagaaaccaagatacacagaactatagtgcaatcaatttcccgtcccttctccagcaatttgagcacatgcagctgcagcaccgtaaccatttgaaggatcaactgcaatcccgcaaatctgcttcagctctaacgttatctcaggagatacaaagatacgaagcagcacattcctcttcgctatcagagattaacaggcccccttcaagaacatccaaaggcattttatgatgcatttgattattgcgatgtatgatatgtttcccagaagcatcatcacaaatatgttggggctttggttagtctccttgatttttccaaaggaggttgcatagggtacatagagtgtaatattttttgtttcgttcctagattttgtcaagagatggcaattatttattggagaaagctcgtttctgccctctagtcattcttttcttagccgtttcactgctcatctggtttctgtaatttttcaattgaaggccaaatgagcaaagtagtaattggagatatgttactactgttctgcttatccatctctaataaattagcgttgcaatgtaaattcctgttgttggctcttattatatatttattatattctatatatgccttacctttaccccatt

SEQ ID NO: 6891 - DNA, 1315 bp, Zea Mays
tgatgaattcactcggttgacgtctatcacatggatcaacgagtttgtgaagcttggtggggaacaacttgttccttactatgcagatatactgggtgctatcttaccatgcatatctgacgaggaggagaaaatccgagtggttgcacgtgaaacaaatgaggaactacgtgctataaaagctgatccaactgagggatttgatattggagcaatcctttcaatcgcaaaaagagaattaaacagtgagcatgaggccacacgaactgaagcattgcattggttcttcactttgctggatcaatatcgtgctgagttcttggcgtacctgaacgatatttttgatccactccttaatgcactttctgatccttcagacgtggttgtcctattagtattggaagttcatgcacgtatagctgaagagtctcaccacttccatcatcttgtatcctacctaatctgcaccttccacaacaaccattttctactggagaagcgtggtgctttgatagtccgtcgcctctgcgttcttctgggtgctgaaaaagtatatcgtgagttctccactattcttgagagtgaagttgaccttgattttgcatccgtcatggttcaggctttgaatttgattttgctcacatcaactgaacttggtgagctccgctctcttcttaagaagtcgttagtggattcctgtggcaaggacttgtttcagtcattatatgcttcgtggcgccactctccgatggctacaataagtttgtgtttacttgctcaggcatacagtcatgcgagctgtgttattcagtcgctgggagaagaagacataaatgtgaaatttttggttcagttagataaattgatccgtctcttagagactccagtatttgcttacttgcgtttgcagcttcttgagcctggaaagcacacctggcttctgaaaactctttatggtctcctgatgctgttgcctcagcaaagtgcggccttcaagatcttgaggactcgactgaaaactgtgccattcagtgaaaatattaagcgcacatcttcagcaaatccatactcccagattctgcaagtgacagaagatggcaatagaaaccaagatacacagaactatagtgcaatcaatttcccgtcccttctccagcaatttgagcacatgcagctgcagcaccgtaaccatttgaaggatcaactgcaatcccgcaaatctgcttcagctctaacgttatctcaggaactttgttaaacaatgttttcttgatgtaaagatgcttatcgccgaagcagaagattaatatctgac

SEQ ID NO: 6892 - DNA, 2721 bp, Zea Mays
agagaaacctgaaaggccgaaaccagcctcggtgcgtgcccattgcccactctccagtcgactccgcaaccgaaacttcttgccgccactacgccccaaggcccccatcaagctcgccaccgggcaccagccattcccatgtctataggccgcctcggccgcgcgcccgcgtcgctattcctgctccagtcctttgccacgaccaccgcctcatcttcccctgccgcgaccaccacctcatccccgggcttcctcgcgcaccacctgctcgacgaattctcccgcccgcgcgccacccgtgacgcggcccgcctccgccgcctcgcggcgtatctcacgccgcccgccgcggagtccgtcatcctccgcctgccgtcctggcgccacgcgctcgacttcttccgctgggccgcggagcagccgggcttccgccactcctgctattccctcaacgccatggcatcactcctgccaccgcaccagcgcgcgcacctcgaccgcctcgccaccgatgcactcgtctcccgctgctccatgacgcctggcgcgctggggttccttctccgccgcctcggcgcggctggcctcccggacaccgctgcccgcgtctttgatgcagcgaagacgacgctcagctgcgccccaaactcgtacacgtacaactgcctccttgacgcgctcgcgaaggccggccgcgcggaagacgccgaggcgcggttgcaggagatggtggtgacgtgcggtgacgagagcgtcgacagagaatgagcaagagggcctgggtggatgagcacgtgttgacgatgcttattgtggcgtacagcaagtggggaaaggtggaggatgcagttgagctgcttgggaggatggaggcacttgacatgcgaccaaacgagaagacattgagcgttctggtacatgggcttgccaggcaggggagggttgatgtggccatgaatatgtttggtaagatggccagttatggattcagtgtggatttggcgatgtacagtgtgttaattgaggggctgtgtcatggaaacgagatggggaaagctgtgaaattgttcgaggatatgaagcgggacaggattacacctgatgtccgcttgctcaagaagataatcgaagcattctgtaggcaaggagatttctctactgttggtccattcattaatgaaaatgcagtgcatctgaaacccggcagtgctgttctattatataatgtgattcttgacggtcttattaaccatggagaggtagaagcagcatatcagttgctcagctccatggtgcgtggtgatcagagggttagtgacgatgatactgttggtgtgcatatttttgttatcactgaagatgttaaaccaaactctgattcgtttaacattgttgtgtgcggcctttgtaaggttaagaagctggatctggctttggctctcacaaaggacatggttggccttggttgcaagggaaagcttttgatgtttaatgatttgatacttgaattgtgcaattcgggtaaactagatgaagcatatgagatattcaaccaaatgaaggatcttggtttgaaaccctccgagttcacatacaattcattgctttatggtatttgtagaagaaaagatactagtgctgccgctgatctgctgagggagatgcgcgcaaatgcgcacaaaccatggattaagaactgcacagacatggtgcaacagctttgtttgagtggcaggataacagaagccttgcaatttcttgatggaatgctagaattaggttttcttcctgatattgtcacgtactctgctgccatgaatgggatgtgtaaagttggagacatagaaaatgcattggggcttttccttgacatttcttccaaatgttatcttccagatgtggtggcacataatatcttgataaatggattccggaaagcaggtaagttcgacgaggcacaggaaatcatggaagaaatgttgagtaagggtatgcttccttctgtagttacctacaatcttatgattgatatttggtgcaagtctggcagtattgacaaagcaatcacttgcgtatacaaaatgattgatgaagagaagccaccaacagttgttacatatacaagcttgttagatggactctgtaatgctggaaggcccgatgaagccattgttttgtggtgcaaaatgagggaaaaaggttgttcgccaaatgggatagcatatactgctttggttaatggactgtgcaagtgtggtcgaatggagactgcagtgaactactatgaagagatgaagacgaaaggttttgacttggatatcttttccctattaaatttaacaaatctgttgatagcacagggacaggccagtaaaggatgtgagcttttgaaagttgttctccaaaaagatgtggtgcacaataaccatttgaaaatggtagacttagtaaataaagcagctaaggagctgtctaaagatggaagtatctcttcagatatcatgataattatagatgcatggttagtttcaaggggtcaaggtatgcacaatgaagatggaaacaaatcagatttctcttagatgtgttctcaagtctgacagtgaccaaagacagcttgttcgctgcggcttgctgcggctgcaatccggctgcggctgcggcttctacagtatttttctctctatggattgcagctgcagcagtccaaacagctgcaac

SEQ ID NO: 6893 - DNA, 3689 bp, Zea Mays
cgcacacacgccggtaaatttcctccccagttgattccagcggcactgcacttgtgctgcctgcgttcttctcccctgagagctgcggaaagatccaagcgcaaggccacctaaccagaaccaaacaaggccgcctccggatcgccgagcaaattccatattattttcctcccgtttcttgtttttctcctctcgcttatccgtctcccagaaggagagggagagggagagccgaaccggggtgatcgttgccgtccctgtcacccccacaccccgctgtcgtggtgtcctatgcgactcgtttgttgccgtcggtcgcctggttgattaatccaaggccaaggatctcccctccacgaggacctccggagaggccagggtggctgcttgttgagtccagtgtgtcagtgtgtgccacttctctcacaaacactgcgagcttgtccctatcctgcaagaaacagcggaccaaagcatccgctccatttctccgctagttcgtgcgtcgatccaaacgccaatcttggatttctgccgcaaggactgtgcttcttgtagcaaaagcccccaaagatttgatccaagccagctcggaatcggatccctgcgaggaccaggcggcctgccatggcgtcccgctcctactccaacctcctcgacctggcaaccggagcagcggaccaggcgccggcggtcgcggcgcttggcgcgctccggcggcggctgccgcgcgtggtcaccacccccgggctcatcgacgactcgccggcgtcgccgtccacgccgccgcggccgcgcaccatcatcgtggccaaccagctcccgatccggtcccaccgcccggagtcgccggaggagccctggaccttcgagtgggacgaggactccctcctccgccacctccaccactcgtcgtcccccctgatggagttcatctacatcggctgcctgcgcgacgacatcccgcaggccgagcaggacgccgtcgcgcaggcgctcctcgagacccacaactgcgtgccggccttcctgcccacggacatcgccgagcgctactaccacggcttctgcaagcagcacctgtggcccctcttccactacatgctgccgctgtcccccgacctcggcggccgcttcgaccgcgcgctgtggcaggcctacgtctcggccaacaagatcttcgcggacaaggtgctggaggtgatcaacccggacgacgacttcgtgtgggtgcacgactaccacctcatggtgctcccaaccttcctgcgcaagcgcttcaaccgcatcaagctcggcttcttcctgcactcgccgttcccctcgtccgagatctacaagacgctccccgtgcgcgaggagcttctgcgcgccctgctcaactccgacctcatcggcttccacaccttcgactacgcgcgccacttcctctcctgctgcggccggatgctcgggctctcgtacgagtccaagcgggggcacatttgcctcgagtactacggccgtacggtgagcatcaagatcctgcctgtgggggtgcacatggagcagctcaagacggtgctcgggttgccggagaccgaggccaaggtgtccgagctgatggagatgtactctggaaaggggagagtggtcatgctaggcgtcgacgacatggacatcttcaaggggatcagcctcaagctccttgccatggaggagcttctgcggcagcaccccgagtggcgggggaagctggtgctggtgcaggtggccaacccggcgcgagggagggggaaggacgtcgccgaggtgcagaccgagacgtacgccatggtgcggcgcatcaacgaggtgtacggtgagccggggtacgagccggtggtcctgatcgatgagcctctgcagttctacgagcgcgtggcctactacgtcatagccgaggtgtgcctggtgaccgcggtcagggacggcatgaacctgattccctatgagtacatcgtctcccggcaggggaacgagaagctggacaggatgctgcggcaggggaagccagaggagaagaagagcatgctggtggtgtccgagttcatcgggtgctcgccgtctctgagcggcgccatcagggtgaacccgtggaacatcgaggccgtggctgacgccatggagaccgcccttgtgctgcctgagaacgagaagaggctgcgccacgataagcacttccgctacgtgagcacccacgacgtcgggtactgggctaacagcttcctcctggaccttgagaggacctgcaagtatcattctcagaagaggtgctggggcattggcttcggcctgcggttcagagtggtctcgctcgacctgaccttcaggaagctttccttggagaacatccttatggcataccggagagccaagacacgggcaattctgctggactacgatggcacgctgatgccacaggcgattaacaagagcccgtcaactgaatctgtgcggatcctcaacagcctgtgccgagacaaggacaatgtggtgtacctatgcagcgggtatgaccggcgcacccttcatgagtggttcccttgtgagaaccttggcatagccgcggagcatggctacttcctgaggtgtaagagggacgcggaatggaagacctgtgtcgctgccacagactgcagctggaagcagatcgcggagccggtgatgtgcctgtacagggagacgacggacggctcaaccatcgaggacagggagacggtgctcgtgtggaactacgaggacgcggaccccgacttcgggtcgtgccaggccaaggagctcgtcgaccaccttgagagcgtgctcgcgaacgagcctgtgtcggtgaagaccacgcctcactcagttgaagtgaaaccgcagggcgtgagcaagggcttggtggcccggcgcatgcttgtgtcgatgaaggagcggggccagtgcccggacttcgtcctgtgcatcggcgacgacaagtccgacgaggacatgttccagctgatcgccaccgctgcctgcggggactcgctggcgtccaaggcggaggtgttcgcgtgcaccgtcggccgcaagcccagcaaggccaagtactacctcgacgacgcggcggaggtggtgaggctgatgcaggggctctcctacgtctccgaggagctggcgctggcgaaccagcgggatgaagacgaggactcctctctggacgacgtgtgggagtaggaaggagcgttcccttcccgtgctgctcctgcggtaatgtctgtttgtgttggctcggctggagctttcgccgagtagtttaggtgtgtaaatgaggtatgctttccagcgtaatgtattgccagtggtctagtctcgagagctggcttgaatctagtgatgctctagtactttggtttgtggtgctatttacctgatccgtggaaggcagtactatgagctatacaagatgcagacctgaaatctcattcatctgaagaccatgacctttctcctaggcgtgtgtatacgtctttggattttggaactaaccatcatgtgccagtattagaggagctcgtttttacgtgatgatcagtttttttggaactagcgcgaacaaaagctgcaagttcccaagttgcaggctttgcgaaggtctttgggcagagtgaaactttaggctgtgtccagcagtccgctaccgaaaa

SEQ ID NO: 6894 - DNA, 3726 bp, Zea Mays
cgcacacacgccggtaaatttcctccccagttgattccagcggcactgcacttgtgctgcctgcgttcttctcccctgagagctgcggaaagatccaagcgcaaggccacctaaccagaaccaaacaaggccgcctccggatcgccgagcaaattccatattattttcctcccgtttcttgtttttctcctctcgcttatccgtctcccagaaggagagggagagggagagccgaaccggggtgatcgttgccgtccctgtcacccccacaccccgctgtcgtggtgtcctatgcgactcgtttgttgccgtcggtcgcctggttgattaatccaaggccaaggatctcccctccacgaggacctccggagaggccaggctgtactcccccacgtccaccaggcaagaacagcaacgtggctgcttgttgagtccagtgtgtcagtgtgtgccacttctctcacaaacactgcgagcttgtccctatcctgcaagaaacagcggaccaaagcatccgctccatttctccgctagttcgtgcgtcgatccaaacgccaatcttggatttctgccgcaaggactgtgcttcttgtagcaaaagcccccaaagatttgatccaagccagctcggaatcggatccctgcgaggaccaggcggcctgccatggcgtcccgctcctactccaacctcctcgacctggcaaccggagcagcggaccaggcgccggcggtcgcggcgcttggcgcgctccggcggcggctgccgcgcgtggtcaccacccccgggctcatcgacgactcgccggcgtcgccgtccacgccgccgcggccgcgcaccatcatcgtggccaaccagctcccgatccggtcccaccgcccggagtcgccggaggagccctggaccttcgagtgggacgaggactccctcctccgccacctccaccactcgtcgtcccccctgatggagttcatctacatcggctgcctgcgcgacgacatcccgcaggccgagcaggacgccgtcgcgcaggcgctcctcgagacccacaactgcgtgccggccttcctgcccacggacatcgccgagcgctactaccacggcttctgcaagcagcacctgtggcccctcttccactacatgctgccgctgtcccccgacctcggcggccgcttcgaccgcgcgctgtggcaggcctacgtctcggccaacaagatcttcgcggacaaggtgctggaggtgatcaacccggacgacgacttcgtgtgggtgcacgactaccacctcatggtgctcccaaccttcctgcgcaagcgcttcaaccgcatcaagctcggcttcttcctgcactcgccgttcccctcgtccgagatctacaagacgctccccgtgcgcgaggagcttctgcgcgccctgctcaactccgacctcatcggcttccacaccttcgactacgcgcgccacttcctctcctgctgcggccggatgctcgggctctcgtacgagtccaagcgggggcacatttgcctcgagtactacggccgtacggtgagcatcaagatcctgcctgtgggggtgcacatggagcagctcaagacggtgctcgggttgccggagaccgaggccaaggtgtccgagctgatggagatgtactctggaaaggggagagtggtcatgctaggcgtcgacgacatggacatcttcaaggggatcagcctcaagctccttgccatggaggagcttctgcggcagcaccccgagtggcgggggaagctggtgctggtgcaggtggccaacccggcgcgagggagggggaaggacgtcgccgaggtgcagaccgagacgtacgccatggtgcggcgcatcaacgaggtgtacggtgagccggggtacgagccggtggtcctgatcgatgagcctctgcagttctacgagcgcgtggcctactacgtcatagccgaggtgtgcctggtgaccgcggtcagggacggcatgaacctgattccctatgagtacatcgtctcccggcaggggaacgagaagctggacaggatgctgcggcaggggaagccagaggagaagaagagcatgctggtggtgtccgagttcatcgggtgctcgccgtctctgagcggcgccatcagggtgaacccgtggaacatcgaggccgtggctgacgccatggagaccgcccttgtgctgcctgagaacgagaagaggctgcgccacgataagcacttccgctacgtgagcacccacgacgtcgggtactgggctaacagcttcctcctggaccttgagaggacctgcaagtatcattctcagaagaggtgctggggcattggcttcggcctgcggttcagagtggtctcgctcgacctgaccttcaggaagctttccttggagaacatccttatggcataccggagagccaagacacgggcaattctgctggactacgatggcacgctgatgccacaggcgattaacaagagcccgtcaactgaatctgtgcggatcctcaacagcctgtgccgagacaaggacaatgtggtgtacctatgcagcgggtatgaccggcgcacccttcatgagtggttcccttgtgagaaccttggcatagccgcggagcatggctacttcctgaggtgtaagagggacgcggaatggaagacctgtgtcgctgccacagactgcagctggaagcagatcgcggagccggtgatgtgcctgtacagggagacgacggacggctcaaccatcgaggacagggagacggtgctcgtgtggaactacgaggacgcggaccccgacttcgggtcgtgccaggccaaggagctcgtcgaccaccttgagagcgtgctcgcgaacgagcctgtgtcggtgaagaccacgcctcactcagttgaagtgaaaccgcagggcgtgagcaagggcttggtggcccggcgcatgcttgtgtcgatgaaggagcggggccagtgcccggacttcgtcctgtgcatcggcgacgacaagtccgacgaggacatgttccagctgatcgccaccgctgcctgcggggactcgctggcgtccaaggcggaggtgttcgcgtgcaccgtcggccgcaagcccagcaaggccaagtactacctcgacgacgcggcggaggtggtgaggctgatgcaggggctctcctacgtctccgaggagctggcgctggcgaaccagcgggatgaagacgaggactcctctctggacgacgtgtgggagtaggaaggagcgttcccttcccgtgctgctcctgcggtaatgtctgtttgtgttggctcggctggagctttcgccgagtagtttaggtgtgtaaatgaggtatgctttccagcgtaatgtattgccagtggtctagtctcgagagctggcttgaatctagtgatgctctagtactttggtttgtggtgctatttacctgatccgtggaaggcagtactatgagctatacaagatgcagacctgaaatctcattcatctgaagaccatgacctttctcctaggcgtgtgtatacgtctttggattttggaactaaccatcatgtgccagtattagaggagctcgtttttacgtgatgatcagtttttttggaactagcgcgaacaaaagctgcaagttcccaagttgcaggctttgcgaaggtctttgggcagagtgaaactttaggctgtgtccagcagtccgctaccgaaaa

SEQ ID NO: 6895 - DNA, 3798 bp, Zea Mays
cgcacacacgccggtaaatttcctccccagttgattccagcggcactgcacttgtgctgcctgcgttcttctcccctgagagctgcggaaagatccaagcgcaaggccacctaaccagaaccaaacaaggccgcctccggatcgccgagcaaattccatattattttcctcccgtttcttgtttttctcctctcgcttatccgtctcccagaaggagagggagagggagagccgaaccggggtgatcgttgccgtccctgtcacccccacaccccgctgtcgtggtgtcctatgcgactcgtttgttgccgtcggtcgcctggttgattaatccaaggccaaggatctcccctccacgaggacctccggagaggccaggtccagcagagttcctttgcttcattgctcgctttgaaggggatttttactgctagtctctgagccgtcaaatttttcaccactcagctgtactcccccacgtccaccaggtggctgcttgttgagtccagtgtgtcagtgtgtgccacttctctcacaaacactgcgagcttgtccctatcctgcaagaaacagcggaccaaagcatccgctccatttctccgctagttcgtgcgtcgatccaaacgccaatcttggatttctgccgcaaggactgtgcttcttgtagcaaaagcccccaaagatttgatccaagccagctcggaatcggatccctgcgaggaccaggcggcctgccatggcgtcccgctcctactccaacctcctcgacctggcaaccggagcagcggaccaggcgccggcggtcgcggcgcttggcgcgctccggcggcggctgccgcgcgtggtcaccacccccgggctcatcgacgactcgccggcgtcgccgtccacgccgccgcggccgcgcaccatcatcgtggccaaccagctcccgatccggtcccaccgcccggagtcgccggaggagccctggaccttcgagtgggacgaggactccctcctccgccacctccaccactcgtcgtcccccctgatggagttcatctacatcggctgcctgcgcgacgacatcccgcaggccgagcaggacgccgtcgcgcaggcgctcctcgagacccacaactgcgtgccggccttcctgcccacggacatcgccgagcgctactaccacggcttctgcaagcagcacctgtggcccctcttccactacatgctgccgctgtcccccgacctcggcggccgcttcgaccgcgcgctgtggcaggcctacgtctcggccaacaagatcttcgcggacaaggtgctggaggtgatcaacccggacgacgacttcgtgtgggtgcacgactaccacctcatggtgctcccaaccttcctgcgcaagcgcttcaaccgcatcaagctcggcttcttcctgcactcgccgttcccctcgtccgagatctacaagacgctccccgtgcgcgaggagcttctgcgcgccctgctcaactccgacctcatcggcttccacaccttcgactacgcgcgccacttcctctcctgctgcggccggatgctcgggctctcgtacgagtccaagcgggggcacatttgcctcgagtactacggccgtacggtgagcatcaagatcctgcctgtgggggtgcacatggagcagctcaagacggtgctcgggttgccggagaccgaggccaaggtgtccgagctgatggagatgtactctggaaaggggagagtggtcatgctaggcgtcgacgacatggacatcttcaaggggatcagcctcaagctccttgccatggaggagcttctgcggcagcaccccgagtggcgggggaagctggtgctggtgcaggtggccaacccggcgcgagggagggggaaggacgtcgccgaggtgcagaccgagacgtacgccatggtgcggcgcatcaacgaggtgtacggtgagccggggtacgagccggtggtcctgatcgatgagcctctgcagttctacgagcgcgtggcctactacgtcatagccgaggtgtgcctggtgaccgcggtcagggacggcatgaacctgattccctatgagtacatcgtctcccggcaggggaacgagaagctggacaggatgctgcggcaggggaagccagaggagaagaagagcatgctggtggtgtccgagttcatcgggtgctcgccgtctctgagcggcgccatcagggtgaacccgtggaacatcgaggccgtggctgacgccatggagaccgcccttgtgctgcctgagaacgagaagaggctgcgccacgataagcacttccgctacgtgagcacccacgacgtcgggtactgggctaacagcttcctcctggaccttgagaggacctgcaagtatcattctcagaagaggtgctggggcattggcttcggcctgcggttcagagtggtctcgctcgacctgaccttcaggaagctttccttggagaacatccttatggcataccggagagccaagacacgggcaattctgctggactacgatggcacgctgatgccacaggcgattaacaagagcccgtcaactgaatctgtgcggatcctcaacagcctgtgccgagacaaggacaatgtggtgtacctatgcagcgggtatgaccggcgcacccttcatgagtggttcccttgtgagaaccttggcatagccgcggagcatggctacttcctgaggtgtaagagggacgcggaatggaagacctgtgtcgctgccacagactgcagctggaagcagatcgcggagccggtgatgtgcctgtacagggagacgacggacggctcaaccatcgaggacagggagacggtgctcgtgtggaactacgaggacgcggaccccgacttcgggtcgtgccaggccaaggagctcgtcgaccaccttgagagcgtgctcgcgaacgagcctgtgtcggtgaagaccacgcctcactcagttgaagtgaaaccgcagggcgtgagcaagggcttggtggcccggcgcatgcttgtgtcgatgaaggagcggggccagtgcccggacttcgtcctgtgcatcggcgacgacaagtccgacgaggacatgttccagctgatcgccaccgctgcctgcggggactcgctggcgtccaaggcggaggtgttcgcgtgcaccgtcggccgcaagcccagcaaggccaagtactacctcgacgacgcggcggaggtggtgaggctgatgcaggggctctcctacgtctccgaggagctggcgctggcgaaccagcgggatgaagacgaggactcctctctggacgacgtgtgggagtaggaaggagcgttcccttcccgtgctgctcctgcggtaatgtctgtttgtgttggctcggctggagctttcgccgagtagtttaggtgtgtaaatgaggtatgctttccagcgtaatgtattgccagtggtctagtctcgagagctggcttgaatctagtgatgctctagtactttggtttgtggtgctatttacctgatccgtggaaggcagtactatgagctatacaagatgcagacctgaaatctcattcatctgaagaccatgacctttctcctaggcgtgtgtatacgtctttggattttggaactaaccatcatgtgccagtattagaggagctcgtttttacgtgatgatcagtttttttggaactagcgcgaacaaaagctgcaagttcccaagttgcaggctttgcgaaggtctttgggcagagtgaaactttaggctgtgtccagcagtccgctaccgaaaa

SEQ ID NO: 6896 - DNA, 2221 bp, Zea Mays
cttatggtgtgcttggtgctcatgctgcacaggtagatgaaatcttatatttacactgttctctgaaccaactgttgcagtggtatttccgtgtttggtccttggtctttggcagtcagcagcatcatgtaattaatttgtccgatgacatgtttgtggtgtactggtgtgtatgtacaagtatatctctactactctgcatcatgtaattaaggagggagagcaaggatctatagtcttgagaccccatatagatgaagatgtgcactgcatcatgtagtaccatttatagattaaaccttataatttatgagtatggggccacaaggccttcgactcatatatacctccccactaatattttatctaaatattagcatcaaccgatatataccggtagaatgcatataaactttataccccaatacaaaccaccaatacacacaagcatacacgacattaacaacattgtttgttaggaaaattcaactgaaacatgatcgaaaaaatgaaaccaaagtggatagtgaacaggtactcatagttcaagtgtatttctaaatgaaattccacaattcctgaaaataacaatctgactgaaatcaacatggttgtccgttcacaagttactatatgagcaagtagtggagttaattcatggcagaacatctagagacaaatgtaaacccatgaaacaaagtatcaatcagtgtttcaacatgactgaatgtgttccatgggtatggcaatttactaacatatcacaggctatgttccatgggtatggcaatttactaacatatcacaggctattaaagaacagttgcaggaacaatctgactgaaatcaacatggttgtccgttcacaagttactatatgagcaagtagtggagttaattcatggcagaacatctagagacaaatgtaaacccatgaaacaaagtatcaatcagtgtttcaacatgactgaatgtgttccatgggtatggcaatttactaacatatcacaggctattaaagaacagttgcaggaacaaaattgtttgaaagcttaccttggcctgagaagatgcggaagccgtcgatgtgttgcagcgaactcccgacggtgtcctgccgtccggtccgggtcaaccaagcgccttatcccttcctttttccacacccctcgctagccgaagcaacaaactactacaatgaaacccccatacacaatttcagtaaacactcgatgatcaatgtagccgaaacaacaaactaaataacttaagaacagaaataatggtccactgcgaccagtttcacaattgatgctgatagcccaataaaaatacatatcaaacaaaaccaaattctgtagtgctaccaggaccacgaacaatgcaatgacagtgaggaacaaagatctaagttttcgtctgaataactataagtagctggggaaagtttcaacaacaaaattgagataagataacaaccgacacttggatgaacagttgcagcacatctagagacacatgtaaacccatgaaacagtatcatattctcatttgacagatgtaaacccatggaacacattcagtcatgttgaaacacattcatggcatcagaatagtacacgcaccaaagtatttctgttcaagtttacacgcaccaaagtttacacacaccaatggcatcagaagagtacacgcaccaaagttcaggcatgaaataacttgaaaaattgataacattgccatacccatgaacatattaaacattgaggcatgttgaaacacagaatctggcagagaactgaactcaccggcgaaggcgttgaagcccactgcacagacaacgagcgtgatgaacagacaacgagcgtgctgaacagacaacgatcgtcgaagtttgatgggagatttgtctacatccctcgcagtggtcgtgtgttttaataggagttgacagcgacgatggaatgggacttgacgatgaatgctgattgaggtggggatttgggtttccatgtgagatactggggggcgccgagtgcggagattgctcgtttccaagtgcggagattgcatcgcaccatggagcggaggtggagggcagaaggttcgcgacgcaccaggatctgttgggggcgggcgttgctggcgcggcggggactgcgggcacagcagctttgcgggggcgcggcgaattcggggacagcggggacgagcacggcgg

SEQ ID NO: 6897 - DNA, 2177 bp, Zea Mays
atgttccagtcctcggtactccagtccagacatgaggatctgtatggtgcagcaccatcaggattcaggacagtagtgcggctagtgcctgtggcgaccttgcatttgccactgcgagtaccggtccaagttcttgaaaagcgattgaatgatcaattcgtcatgcgccgtgctcttgagaaagctctaggttacaagccttgtgctatccatgcatcaagtgagaactgcattccaaagccgactgaggagctaataaaggagattgcagttctcgagctagaggtcatatgcttggagcaacatctcctaacactatacagaaaggcatttgagcaacaattttcccctgcaagttctgcttgtgacatggagagcaacaagcagccagcaaggtccttttcaggcatactctctgaagctccagagctgagcttctcgaccccaaggaagcatcatcagctaaaccagtccagtcgaatggtcctggcacgcaagtccacgcctacagcttctacaagcgagactagcaatgagaagatcaatatcggacgcagccattcctcgctcctgcaccgctccgttagggtatctccgtcggcaaacaatctcgctagagctctgaaaccatgccatacttcgcctctatcttttgttgaggaagggaaatgcatggatcctggcgtggtgagtttggcagacatcttggggaccagggtcgcggaccatgttccccaaacgccgaacaagatatccgaggacatgatcaaatgcattacggccgtatacatgaggctgagagacgtccccgccgtgcagcacgccttcttcccctcaccgtgctcatccttttcttcggcgagcgggctgtcttccaaatacaccgcggacatatggagccccaggtgcaggaaagagagcttcgttgaggagtggcaggacaacgggttaggcaacggtgaatctagggagctggccctgccatatgattctgtggtagaggtgtctgctctttgcaaaggtgatcagaggtccgctgacgtgaaggatatgctgcgcaaatacatgttgcactctgtaggtcacttgtgcagcttctcgaaagcgttgatctcagcgggatgaaacatgaagagaagctcgctttctggatcaacgtgcataatgcgatgatgatgcatgcccatatagagtacgggatcccacagagtaacagcaaaaggatactgcttaccaaggtgtcgtacatcattagtggccaaagagtgaacgcggagctgatagagtaccagatcctgtgctgccgagcgcactcttctggacagtggcttcggctgctgctatacccgaaatggaagtccagggacaaggacgagctgcaaggcttcgccgtggaccgccccgagccgctggtgcacttcgcactgtcctccggtagctactcggatccagtggtgcggctgtacagccccaagagcgtgttccagcagctggaggcggcgaaggaggagtacgtccgcgccaacgtgggcgtccgcgggcgggggcagcacaagatcatcctccccaaggccctggagctgtacgcgagggacgccgggctgggcgcgcaggaggtggtggccgcggtcgagtgccacctgcccgagggcctccgggacgccgtgcgccggagccagcagcaggccggccgggcgcgcgccgtggagtggaagccccacaacctggcgttccggtacctgctggccaaggagctggtcggcgggtcccccgcgtgcagccggccgctggagccggtcagtgcgccgctgcgggctggtccgtgatccgtcatcagatcgccgtgggcccgtggccgtgccgagccgagcacgagttgagatgtgcggcggcggcacactgcgttcgggccttgggggcgttgtatgtacagagagtcagagagatggacggcgaaacagacatctgattttactcgtaccagtatgcgccctgctgtcaaactgtgaatagtgaattccgcctagccgcccacgttattgactgacgctcgagcgctgcagctgcagctggcctgctgcgcttgccctgcgcctgcacaacccgccctcgttttttttttggataaaggggagtttatttcattaagctaatgaaaaacagtgctcggtctctac

SEQ ID NO: 6898 - DNA, 3085 bp, Zea Mays
aaaacctatcagttattcggtaccattgccatcactctctagtacgccgcaaaagacatcagccagacttcccaatttccggccacaaccatacctgctacgcttgcgccgccgcctccccccttgtcttcgcttcccgtgcaagcttcaccgccgccgtctccgactcccttcgcgatgcgaccgctttcgcgccacgattcctctatccccgccttccccgcccgcgccgatgggccgcgacgctgaggatacttcgtctccggtgtcctcgtcggaattggagcaggaagacgacgacgattgctacctgagcgatcagggggacgatgccctagaagagtctgttctccatgttctcgaggacgagcacctcgaggactgccattggtctgcctcatctgtgatcaccaaggaatcccttttggtggcgcagagagaggatcttaggaaggtgatggagctgctagggttgagggagcaccatgcccggacgctcctcatccactaccgctgggacgtggagaggattttcgagcttcttgatcagaaggacagggataggctcttctcggaggctggtattcctcttcagtacaccaggaatgccggcccaacctcctcggcggaggtgacctgcaatgtttgttatgatgatgtgccaccctcggctgcctccgagatggattgtggccatagctactgcaatgattgttggactgaatatttcattgtgaaaataaatgagggtcagagccggcgtgtcaggtgcatggctccaaagtgcaatgctgtttgtgatgaagcaataattcgaaaactagtcactgcaagacacctatatatcgcagaacgctttgaaagatttttactggaatcatatattgaagataatgatacagtcaagtggtgcccaagcacaccacattgtggaaatgctatacgcgtcaagggcgatatttattgtgaggtggagtgcacatgtggatgccagttttgttttaattgctctttacgagcacactcaccgtgttcctgcatgatgtgggagctctggatcaagaaatgccgtgatgaatcagaaacagtgaattggataacagtaaatactaagccctgtcccaagtgtcacaaacctgtggagaagaatggtggctgcaacctggttgcatgtatatgtggacaagcattctgctggttatgtgggggtgctacaggtagagatcacacatggtcaactattagtggccacagttgtggcaggttcactgatgatcagactaagaagacagaacaagcaaggcgagacctctatagatatatgcactaccacaatagatacaaggctcacaccgactctcttaagcaggaagcaaagctaaagaatgagatccaggggaagatatccatttcagaaaataaggaatcaaagataaaagattattcttgggtcataaatgggttaaacaggttgttcagatcaaggcgtgttctttcatattcgtatccgtttgcattctacatgtttggtgatgagattttcaaggatgagatgactcctgaggaaagagaactgaagcagaatttatttgaggaccagcaacaacagttagaatttaatgtcgaaagactgtctggtttccttgagaaagattttcaactttttaccgatgatgaggtcatggatacaatgaagcatgttataaatctttccaatgtggttgataggctctgcaaacaaatgtatcaatgcattgagaatgatttgttatatcctctacgcacacctcacaacattgctccatacaaatctaagggcattgacagggcctcggagctcaatattagttgggatcctggtgaacaaagttcacagtcaacaaaacatagccaggatgaacacaggaacaaacaagcatcaaatatttcgggtaaacgaactcatgaattgcatggttcgagttcttctaacaagcgagagagggtagatgttaacggtggtggtggtgcactttttgatctcaacgtgccagctgaagtggtggacaagatctgaaacttcattatctgatgggtgatggcacattcctttgaactgtacagctgacttaagcttcgtcaccaacataaaggaaaaaatactgttcttttttgctgccttaccaccatagagtacctgcatgtcaaatttttaccctggtgcttgtatcccaaggtatagagtagcttttaagttatatgttgtatttcatggcatgatctgaagccaatgttcatagttctgatgaagttgtacccctcaagcaagatgaggatattttggaatagaaccatgcctgtgttgcaaattccagatataatgtatgcagcatggtgaaaagggaattgtttgttgagaagaatgtgagtgattatttcctggcaaatgggtggttctattgacaatgaagacaatgactgattcgtcgtattaaatgtgcactttgttgcaactggcaaccatcttgtttctaggacagctttgtattcaacctgtgaaaatcccggttttctgggcacacattccagattattatggataactgcattctactgtagctgcgggaggagctgcaagatatcaatcaggtgcggtgcgtgttgacagtgtgttccttcgtttcttcacattcaagtgttatccgccctcctgtattttaccaagataacactttctcgagaaaagggtcttagagttgtgttttgatgtgggactgaagaagagttttttttttatttcaacctaaattttgttttcaaggaagtcagaatttaagatctgaggagtgttaactagactgcttaattgattaaactgaaggctcttttgccaaattggatcaaaattgaaagttctgtttttgtacatagaaaagaaagaactctgcttacgatttggaatggagtgggtacatatttgtcaggtcaatatatgtttgtcaagtcaagctttggaccgtgcgttgaaacgtagcatcaagctatgccgtagctttctagaacccatgtagagacacgcatatggtgatccatggaaattgggagc

SEQ ID NO: 6899 - DNA, 5822 bp, Zea Mays
atggcaacaaaaggggagagctggcgccaattaaaagaaagaaagaatacacgcatcattttgacccaattctaaaagcttccagaaaggtaaatattcctacacgctcatcctgacagtagtactaaaaagaaagtgtgtgtgccacatttgggtaatgtacgtacacgttcatgttacatctcggttcagaaagctccactgcttgcaacagcagtgacgaatcgtccgtcaggtcagagcagcagctgaaggaaaactcgggcaccttgaatttgtgtgactttgtgtgttgtgatgccacccactgctctgcaagcccatcgccggcctccagcatcctgaccacctctaacatcttggtactgacgtactgtggccagggaggaactgggtacatagcagcgccacttgcatcatctcctctagctcaatgtggtcatatttgctcctcaggcccttgtcgacaagtgtgtccaactgcttttcttggtgcatcttcttcagctgaacaacatcaatgtctgttagctcaagtacaatcatatgccacaagttatgtagaccatattaaaccggtatcgcgctaacctacccagtctaacatggctcccttctgaactaagtccaagcaaactgaacttgttttagcgaagcgcgtaaactcctcaagctcaaatagccggttaatgctccaaagcttaaaatattctttcccaccccactgtgacttagttttccctatgtataatgtttcatgtgaagaaaaagaacatgagagctcaagcattatttaatacattccaaagtgcttcaaagatgcacccatgcagtaagctttggaccattacaagcaagtataataatttgtgccgatagcctggtagactgagtggtggcacctatattattgacatttggtcatcgtagggacttctgtaaaaaaaaacacagaaatcccaccgaagaaacctaaagcatttcttgaaacttacaatagcactccgtttgaattatatgcagaagcaatagcaaatcaaggaactggaattagagagaattccatggtcattgaggatgcagagagctcgaaggattattatgatctcttacagtagcacaggagtttgaagaaggatgtccatgatattgtcctctctccaaaacattttctacctttcttacaacctggaaggcttgtccacgttgaatttagtacagatgagccagccaacttttccattgatgaaaatgttacatggggaattataataaacttcgaaaaagtgaaatcacatggtgaaggtacacaagttaaaacaataatctcattccaatctattcctctaatctgattctctattttgtttatatgttcagaatatagattacctacctgttcagtaatgtattccatgacatgatttattcagaatttagaatacagaattgatccgacctgttttaaaaaacaaacagagctgagagtaacctagtgttggttcttacaaagcaatcggagtagtgtaacatcaagaaaacacaatttatgagagcaagtgtagtagagccaacatagtcataagctaagaagtcatgtcatagtggagatacgtgatgacatagctaacgtggatattggctttgaagaagatttaaattttccaacagcaaccccattaattagatcaaaagggcatatacaaaactaatttcttacaataaaatttatagcaggaccgtaggacagaatttcttacaaaattaatatgttccttaaaaagtttatgctacttaacttttagaaactaattttatccccattaattagataaaaaaaggcatacacaaaactttacgtacacatcccaagcaacaggaaccagacaaacaaaaaatgtgaccgtcgcttcatcatattcaagcttataatgctcaagaataacttctaccaacctgactctgaatggtaccaacatcaatgcagcaagtggataaaatcattgtctataaactataggtaacaacaaaagaagacgcacagataaataaaacgttgtcttaaatgagaaggcaatcaaacaaaaggctatttcttagttgcttgaaggagcattgtgtattccaaaggaaaagcacaagaatcagagaaatctaaactgtcttatgaacccgaacgacaaagttatgatgcaacagaggaaaaagaacaacaacatctctatactgcaagtggtcagtgtacctatggtaatcagctaaggataaaattgccctagtacaacatcaattaggctggcactgaaagtaaatgcttttttaatagcatttaaaactgtggccccagacagtaaacaccccttagtgctaagtatgccctactgcagaggatattaatcaatgatgcaagttgaaacgactatattgactacaatattgtacaaaaatagttaagaaatatattgcatgtgcggttgtgagagaacctatgggtcaagtgacctctagaaaatagattcgccggataagatggtattctattagcaattataccacattaacacataacacatccaaggaccaaaacaatatctgagaaataaaacatataaggatgagcaaactaccacaaagcaacataagctagagaagttagaaaaaattagtgctatttagacaaccgaacacaaagcacaaccaatataacataggatctttccaagtgcataaccagagaaaacacagaagatagaacaatattatgcttcagttgcaaataaatttccgtcgttcagcacaacatagggttccccatgaggttgttcagcacaaccgacttgccagcttcgatgttaccgagcgcggcggcattgagaaagagaaaggtggaggggcggcgtgaggtgttttcgatggaggggtcatcgtccgcaaggagcgaggcggcctaccacatggactcggagagctggacgagctcgtcgattgcctccatggctgccgaagatgacatgtccgcagggatctcgaggctggtcggaagatctcggggtggcgctggagattggtgaggtgcgcggttcgagtgcggagcaccgagaaattggggacagactcatggaattcacggggacgccctgctgcacctcaactcgaacagcttcgcggggacgctcccggagtccctccccaagatgcggctcctccacaagctggacgtcagcaacaaccgcctctcgggtggcttcccgcagcacatcctgtgcctgcccagcgtcaggtatgtggacctgcggttcaacgacctgcgcgggccggtgccgccggcgctcttcgacaagccgttggatgccatcttcctcaacgacaaccgcttcgacttcgagctgccggacagcctgggcaactcaccggcgtccgtgctcgtgctggccaacctgcgcctgcgcggctgcatcccgtgcagcgtgggccgcatggcgggcacgctgggcgagctggtggcgctcaactcgggcctccgctcctgcctccggcaggagctgggctggctacgcgagctcacgctgctggacctcagctccaaccagctgcaggggatgctgccggagtccatggccggcttgcacaacctgcagcagctccacgtggcgcgcaacgagctgtggggccacgtccccgagggcgtctgcacgctgcccgcactccgcaacttcacctactcgtacaagtacttctgctccgagccaagccgctgcctcaacgtccgtgaggtcgacgaccgccagaactgcatcgccgctaggttcacgaggcgagtcggcggcgctctagcatcagcctcaacagtcgtgccgcctacaccaggtccatctcgccggaagcggagaatacggatctgtggcgccggcatgtggtctcagctcctccactgagccgggtggcgagactggggagggagagggggttgttgaagctactgatgtggactacggcagtcatctctgcctgcgccactgttcacggacacaacactctattagtcgaatccaaacgtaaattcgtgtccgatgcacttaggcacacgtggcgagacgtggtgggcggaagccccaccgaatgcggaggagcctccaattcctagtggcttttaacaagaaagaagtaattgctcagcctctgtgccgctggttatcatttctcccaagtataaataccacccctgtccatccccacctcgctccatcggccagacacgtcgcgccacttgtgtcatgtaacacgaaaccattcttctagatcaaactacaatagagcaatagagctcgtgtcagaggcaaacacaaatggcgttccacagaacaatggcacgctgtctatgggtaggcaagaacgcagccgctagaggcgccggcgcggccattcccaaacctccggctccccatcccccggcaccgcgatctctgccggccgtggacgactgcccgacgctcgcattcctgcggccgaagccgaccgcggtcgggtacggcaccgcgaccgtcccgctcccggcgcactgctttcccgccctccccgtcggcgaccacctcttccaccgcctccagctcgacgggcttatacctcccgtgagcacggcgacgcggccgccggagcttgtgggcgtgacggtggagcaggcgaggaaggtggcgagggcggccgagatggaggtggcgagggcgaggctgaggtccaacgcccagagcgtcgtgtccgggtcggaattcgccgcgctctgcgtcgacattgccggcggcgtcgagggaggccgccggctggcccgtgcgctcgacgagtccggcgtcgtcatcgtcctcggcgaggccgtcttcctccgccccgacatggtagcgaaggccatcgggagcatcctccccgtgaaaaagcagctgcaggcgccgcgagccggagacgggagcgaggcgcgcaagcgcgagctggaggctatggaagctcagaaggcggcgatcgacgcggacgcggccgcgcaggtgcggcgcgagctgtggtgcgggctgggcctgctggcgacgcagacgctggggttcatgcggctcaccttctgggagctgtcgtgggacgtgatggagccggtgtgcttctacgccacgtcgctctacttcatgtccggctacgccttcttcatgcgcacggccacggagccgtccttcgagggcttctaccggagccgcttcgcgtccaagcagcgccgcctcatgcgggcgcgcgggttcgacgtcgaccgctacaacgccctgcggaagggccaggggcaggggctcgttccctcgccgaccccgacgcgtgtaggcacgtcagccatgtacaatagcgcgtcgctccgcccggacgaggccgcttggcttgtgccaggggggcacacatgagataaacgtgcgtcgcatcgtcgactcaccgtctaatcgtgaagcaacagctctctgtacagattcaggaggacgagccatggtagaagaaggctcgtcacaacggaaactatatgtttaactaacgtgtgacacacaccctgattcacaatctcacacgcgtgttgagtgaagaagagacgtatcgggaactcgaggttacctatctgagcaaaggaattaggatcacgatcctattggctttttgtcgtcattggggactcggaacatgcttttttatcgtttcgccacatcaggtgcaccagagccgacgagccgtggtctacgtgcaccgtgtacacgcgtgtgcacgaatggcgtgataacatgtcgacacaccgagcataaaacaag

SEQ ID NO: 6900 - DNA, 4101 bp, Zea Mays
aaacaaagttaggtaattgctgacttgcacacacacccctacaaaacgaaaatgtgagaattcagagaccgtagaatcagatccacagaacaagaaagaggacaacagctaagaaagtgtggcattcaaatcaccaggggaataaccgaagcagcttagggactaagatccagccatccgaaaaccaaaaggctagctggttgtattccttttcctggggccaagcctccaggataggggattgctcaaaacttaacagagcgtactgtccccaccccaaaccatcgaaatttgatcctggggaaccacaagtgatggattggcaaatattatcgtcataactcactacttcatatcctgttctatagcatgacgatgtaagaatcaccaggatcccggagaagcaaatttcggccaagaaaggctcaagcgatgctggtgcttgtcccttttctctgaagcaaagactaagcaggatatggagaagcaaaaaaaaaacactccgatgcagtgcataaatcatttggtacaaggccaatatcgcttaatgagttagcataattcctgaaaatgaatgggtggggcagagacaaatgattgggctgttcaaagagacagagtactcatgaagagatgaacgcaatttgctatcttcaaagagaacatcatactgcagcgccagtagcaaataaagaaaggaaaaaaagatgaaataaggtacgacgcacctgtacttgtcccgaatacagacctattcccaaagagcatgccacagtacatataaagtaccaataatagagcatatgatttcttgttaccagcggtgagagctgctgctcccctgttcgtcttcgatctgatattccactgttgctcagcagccctttgctagagtaaatagttttcaccatgaatgtcgtgcgcacatgtggccacgactgaaaacagttctccaccaggctttcaccgcctaatattatttttttctacacccagtaaacttagccgcaacagcaagcacacaaatacttctcttgtggaagcctgattgggtacttgcatgttggcatcaccacgagatagtccttccacactgccaactgccgtgaaattaggtctttcctaacaaacaccacatgttctattattgcacgttgtacattgccatactttactgccgctcagtgggcttttcctagtgtctatgtaggacagtaggagtaggaagcggttcatcaatgtcctgtttcacaggaatatgggtgccatcgcagccagaattattaccgagcaatagcggagatgggggagctgctggtagggggctggacgccgaataatacagtcaaagcgaagactagcatgcagcaggggtatcacatcctgcagtgcttcctgcctgacagaggtagccaatagaggcgtatcgtcaccgaattggattctggttggggcttgtttgcgcttgtgtaggtgcagcaccgcgcagcttccatcgttgtacattcgtacctgttccaaaattaatgcacaatgaatactagaatactccaatgtccaactgaagggaacagagattctgtctcgctgcagtagtcttcctacgttccaaggttgatatatgctggataaataaaaacacatcaggaatgtgtttgtattttatgtgaataatatgtccacaagttacacaagacgatacaagtgcagaatcgcatagtacatatcctgatccattaaacgtcgaaccaacgatcacctgtcgtttagccaaacgaccgattaggttaactgtgcaaataatagaaggtacaatagattaaaacacctcgtacaaaaagtagatgaaaacaataaattgtccatgcagaaaacgatctaacaccaacataatacacactggcaattttatagcccccacacctagtgccattttgtgtgcaagcaactgctactacataaaagcatatacaccaaccacaaatgagaatcaaaattcagatcaacaatcatagcaatgagatctcatggcagtaaaacacttacccaatccagatttataaagtctttcctcccatgccaccccccacagtcttttcagcgcaccaaaccacaagcaaagagtccgtctcagaaagctgaagccttttctcgggctccgagacaggtctgattttagtactggtaacagtggctcagtgccagttaagtgatcagaaaggcagaaagctaaacctcgtgacagtcatttcacggtttaataacataatagaaaagggtaaatgaggccaatagtcaataggacatgtgtaaacaatgcagagtgcatgcacgcgtacaccaaaaagaagtgtcctttcttcatgtggtcaatgtaaagttcaccttaaaagaattttgcaatctttggtcccccaatggtggaggatgatctatgtatggttcattacatctatcataggccacaaagcagcatggtacaaaagcatcaagcagaaatgcttcacaagtccagcaagctatgatcgccccacactatccccagtctgatacgactgaattgcataatgaaatggtcaagccacaactcaagcacctgaaagttcagactatatttacattatctaggaacacggataacacaagaataaacacatcaaagtgaagattctgaataataaccaccccaatcaagacagtatcttcacattttgccttgaccaatcaaacaataaataaatgtattatcaactttctgaatcatccaagtgagaagtatgaggagaacaaggacatcgatattatagtatcatagaatagaagacaataagatgccagtcagatgcaacaacagctcatgtccatatgtcaaaaacatgtatctgcaacctcgaaaatggacaaataagtaaacagtgatatgaaaccatactcagaaccatgacaacgcaactggaggtaatacagaagctcataatttctatagagaaaagagataataaccatccagtgcttgcaagaataatattctacgacaacagaaagaatgttaccccagtgagttgtgtatcaatgtatcatacaaactgtaacagaacaaaaaaaattacaactcattagacctgtatttagtttttggttggggatttgcaaaaacacacgcatgcaccgatgcacgcacgtggagactcactggcggtcctcatcatgtcacataaacttgtactgcagatgatgtgcatgtgtgtgtgcgtgtgtgttttgggggattggggggttgtagttccagaaagctaggtaataggtatagtattaaattctggcttttaggagtatgtttaacccagccatccctatataaagagacaatattcaggaataaaaggaacaaaagaagttatggcctatgcatgttccctcaactcaccgccactatggttagatcgaggcttgtaccttctcccattgagcaattcacattcaccacacaacagcacgacaaataaacaatcatcgtttttaatcatagattcatacaacatacccaggtacagaattgttataggcttatagcctcaactagttacatcaacatagtcctagtatgttacatacatcccaaaatgatccacatgtcatttattcaaagctgcacttcttatcatcacactgattcttccagtaatggatttttttaaaaaaaaaacatgcatacgccatctagtggtagatattaaaacaaaaactgtatcagattgtttgatgttttagctctaatttgtatacaagattactacgcagttctcggcatcagtgatatttcgctgttttaaataaaacaaaacagcaccttaataatactccctctgtcccaaattaaaatttgctttagccttttaatagattcatacaataatttatgcatgtgttttgtatatatgtctagattcatcatcatctatttgaatatagacataaaaatcaaaagctaaaacgaatactaatttgggacggagggagtagtatgcttccattatttcatacagctctagaccaagactgatgacagaataatagtataatagaagaacctgattattc

SEQ ID NO: 6901 - DNA, 1578 bp, Zea Mays
gtgccaatagctgcaaacccaagttctatcgctttctgcaggactagctgtagcagcagtggacgaatacacagcgccggaaacgagcgttcgccgccaggctatccgccgcttgcataagtacagcccactccgactccgtatgggacacatgggcgggtgcgtggtgcactggtgcttccatcgaactgtgctcgtttgattaatttgccctcctcttccttccctccagctaacccatcagccattggtaggtagcccgtgaacgaaggccggaggaggaggcggcggcggatgctcccttctgctcccgcgccggtggcagtcgtcgctgccgcagctggaccacgtcgccgacaggtccaacgaggagagcggcggcgagatcgactgggacaacctcggcttcggcctcaccccgaccgactacatgtacgtcacgcggtgctcgccggaggaccgcggcgacttcccccgcggcgagctctgccgctacggcaacatcgagctcagcccctcctccggcgttctaaactacgcccagggcctgttcgagggaatgaaggcgtaccggcggccggaccgggccgggtacacgctgttccggccggaggagaacgcgcggcggatgcagcgcggcgccgagcgcatgtgcatgccggcgccgtcggtggagcagttcgtccacgccgtcaggcagacagtcctcgccaacaggcgctgggtgccgccgcaggggaagggagccctgtacctccggcctctgctcgtggggagcggcccgatccttgggctggctccggcccccgagtacaccttcctcatctacgccgcacccgttgggaactacttcaaggagggcctggcgcccatcaacctggtggtgcatgacgagttccaccgcgcgatgcccggcggcaccggcggggtcaagaccatcgccaactacgcgccggtgctgagggcgcagatggacgccaagagcaaggggttcacggacgtgctgtacctggactcggtccacaagcggtacctggaggaggtgtcgtcgtgcaacgtgttcgtcgtcaagggcggcgtggtcgccacgccggacacccggggcaccatcctgccgggcatcacgcgcaagagcgtcatcgagctcgccagggaccgcggatacaaggttgaggaacgcctggtttccatcgacgatctggtggccgcagacgaggtgttctgcaccgggaccgcggtggtggttgctcccgtgtcgacagtcacgtaccagggcgagaggtatgagttcagaacggggccggacacggtgtcgcaggagctgtacacgacgctgacatccattcagatgggcatggccgccgaggacagcaagggatggacagtagcagtagagtagattaataaggttggggaatgccatcgccacgacattggatcctacatcagtattgtcatccggtagaatgcatactcggttgatcagcatatgtagtgttgcagcaaattgaagaataaaccgtgtgtgttcgatggcgatcagtgacgaggccattgagcagccattgatttgatctc

SEQ ID NO: 6902 - DNA, 1919 bp, Zea Mays
tcctcatttcctcctcaaccatttcattccttccttccttcccctcgctcgccttcctggcttcttcctccccagcacgcacacgcacacgcacacacccagccttttggctgccctgccggccgtcagagagagaaaccgagctctaactaactgaagtggcggccacatagctagctactcttctgatcctgagcgcgcacgcgccatggctcaggaggacgtgcacctggacgacgcaggcctcgcgctgggcctgtccctcggcagcggcagcggcggcgcctctggtgcggcgcgccacggtggtatcagccgccggctgagcagggaggtgcggctgccgtcgccgcacccgctggagccgtcgctgacgctgagcttgccggacgaagcgaccgcgaccgggtccggcgggggcggggccgcgcacagcgtgtcgtcgctgtcagtggcgggcgtgaagagggagcgcgtggatgacgccgagggagagcgggcgtcgtctacggccgcgttgccgcgggcctgcgccggcgccgaggacgacgacgacgacgggagcacgcggaagaagctgaggctgaccaaggagcagtccgcgctcctggaggaccgcttcaaggagcacagcaccctgaacccgaagcagaaagtcgcgttggcgaagcaactgaagctgaggccacggcaggtggaggtgtggttccaaaacaggcgagcaagccgcgcgcgcaggacgaagctgaagcagacggaggtggactgcgagctgctgaagcgctgctgcgagtcgctgacggaggagaaccggcggctgcagcgggagctgcaggagctccgcgcgctcaagttcgccccacacccacaggcgccgccgtcgtccgcgacgcaggccggcgcggcggcgggcgtcgttccggcgccgccgccgccgttgtacatgcagatgcagatgccggccgccgccacgctgagcctgtgcccgtcctgcgaccgcctggccgggcccggcgccgccgccaaggccgagcccaggcccaaggcagccgccacccaccacttcttcaaccccttcacccactccgccgcctgctgatgatgagggcagggcagcacgcagccacgcaacgcagcggcagtaaacagagcaccgccccgtgcagataataccacgtctgtacgtgtcacaagtaattaacaaacgtatggtcctcctctctatctattttcttgatccggagggctaagttagttgttttcgtgtcgatcccaaatgcatcagctaatccatcaatcataggcttgatagagtagtcgaaaaaaatagccgtagctttcctagcactccctccgccccccccccccccccccatccatgtatatttctgttgtaattctgtccctctctcgcggtctacttgctcccttttcgattggagtacgtagctcctttgcctttttgtttttggttttttgtttctgtttctgtttgagacaggttaatataatcgccgtcgtccgagggtgtagtgtcagggattgatatccctgtacaccgattattggattgagatgcttctagctagtcttcgtactgataagcgtgcgtgcgtacgtcagagcaccacagtgctggaatggatgatgacatgagagacaggtagagaagcccagctgcgtggctcttggacctttctgcaggtgtacgtggtgtgtacacacgcacacccttttttatagtacatatatacggctcaatgattgtgcgtgccggggctctcgactctccaaattgctgtcgcttttgctcgttttaattattgggagcgcgagcgcggcagcccgctcttgtcttgagcatgcccacccctcgctggcgcacaagccatcagttctctgcaccgtatatgcatggc

SEQ ID NO: 6903 - DNA, 1901 bp, Zea Mays
tcctcatttcctcctcaaccatttcattccttccttccttcccctcgctcgccttcctggcttcttcctccccagcacgcacacgcacacgcacacacccagccttttggctgccctgccggccgtcagagagagaaaccgagctctaactaactgaagtggcggccacatagctagctactcttctgatcctgagcgcgcacgcgccatggctcaggaggacgtgcacctggacgacgcaggcctcgcgctgggcctgtccctcggcagcggcagcggcggcgcctctggtgcggcgcgccacggtggtatcagccgccggctgagcagggaggtgcggctgccgtcgccgcacccgctggagccgtcgctgacgctgagcttgccggacgaagcgaccgcgaccgggtccggcgggggcggggccgcgcacagcgtgtcgtcgctgtcagtggcgggcgtgaagagggagcgcgtggatgacgccgagggagagcgggcgtcgtctacggccgcgttgccgcgggcctgcgccggcgccgaggacgacgacgacgacgggagcacgcggaagaagctgaggctgaccaaggagcagtccgcgctcctggaggaccgcttcaaggagcacagcaccctgaacccgaaagtcgcgttggcgaagcaactgaagctgaggccacggcaggtggaggtgtggttccaaaacaggcgagcaaggacgaagctgaagcagacggaggtggactgcgagctgctgaagcgctgctgcgagtcgctgacggaggagaaccggcggctgcagcgggagctgcaggagctccgcgcgctcaagttcgccccacacccacaggcgccgccgtcgtccgcgacgcaggccggcgcggcggcgggcgtcgttccggcgccgccgccgccgttgtacatgcagatgcagatgccggccgccgccacgctgagcctgtgcccgtcctgcgaccgcctggccgggcccggcgccgccgccaaggccgagcccaggcccaaggcagccgccacccaccacttcttcaaccccttcacccactccgccgcctgctgatgatgagggcagggcagcacgcagccacgcaacgcagcggcagtaaacagagcaccgccccgtgcagataataccacgtctgtacgtgtcacaagtaattaacaaacgtatggtcctcctctctatctattttcttgatccggagggctaagttagttgttttcgtgtcgatcccaaatgcatcagctaatccatcaatcataggcttgatagagtagtcgaaaaaaatagccgtagctttcctagcactccctccgccccccccccccccccccatccatgtatatttctgttgtaattctgtccctctctcgcggtctacttgctcccttttcgattggagtacgtagctcctttgcctttttgtttttggttttttgtttctgtttctgtttgagacaggttaatataatcgccgtcgtccgagggtgtagtgtcagggattgatatccctgtacaccgattattggattgagatgcttctagctagtcttcgtactgataagcgtgcgtgcgtacgtcagagcaccacagtgctggaatggatgatgacatgagagacaggtagagaagcccagctgcgtggctcttggacctttctgcaggtgtacgtggtgtgtacacacgcacacccttttttatagtacatatatacggctcaatgattgtgcgtgccggggctctcgactctccaaattgctgtcgcttttgctcgttttaattattgggagcgcgagcgcggcagcccgctcttgtcttgagcatgcccacccctcgctggcgcacaagccatcagttctctgcaccgtatatgcatggc

SEQ ID NO: 6904 - DNA, 2177 bp, Zea Mays
atttaaactctcctgtgcagcaagtgtcaaagcgtgggctcgcgtacgtacgtgcacgtgatgtgcgcgtgcatccgcgcgcttgtccgttgccggctccgctcctcctcaaatattctcgcctgccctcctcatttcctcctcaaccatttcattccttccttccttcccctcgctcgccttcctggcttcttcctccccagcacgcacacgcacacgcacacacccagccttttggctgccctgccggccgtcagagagagaaaccgagctctaactaactgaagtggcggccacatagctagctactcttctgatcctgagcgcgcacgcgccatggctcaggaggacgtgcacctggacgacgcaggcctcgcgctgggcctgtccctcggcagcggcagcggcggcgcctctggtgcggcgcgccacggtggtatcagccgccggctgagcagggaggtgcggctgccgtcgccgcacccgctggagccgtcgctgacgctgagcttgccggacgaagcgaccgcgaccgggtccggcgggggcggggccgcgcacagcgtgtcgtcgctgtcagtggcgggcgtgaagagggagcgcgtggatgacgccgagggagagcgggcgtcgtctacggccgcgttgccgcgggcctgcgccggcgccgaggacgacgacgacgacgggagcacgcggaagaagctgaggctgaccaaggagcagtccgcgctcctggaggaccgcttcaaggagcacagcaccctgaacccgcaccacaaaacggctgcggctccggctgcacttgccttgcctagtactacacctcgatgaattactagtcgacactggctgcgtacatggctgattattactacagccacacacatatatattgtacagtatatgcgagcagaagcagaaagtcgcgttggcgaagcaactgaagctgaggccacggcaggtggaggtgtggttccaaaacaggcgagcaaggacgaagctgaagcagacggaggtggactgcgagctgctgaagcgctgctgcgagtcgctgacggaggagaaccggcggctgcagcgggagctgcaggagctccgcgcgctcaagttcgccccacacccacaggcgccgccgtcgtccgcgacgcaggccggcgcggcggcgggcgtcgttccggcgccgccgccgccgttgtacatgcagatgcagatgccggccgccgccacgctgagcctgtgcccgtcctgcgaccgcctggccgggcccggcgccgccgccaaggccgagcccaggcccaaggcagccgccacccaccacttcttcaaccccttcacccactccgccgcctgctgatgatgagggcagggcagcacgcagccacgcaacgcagcggcagtaaacagagcaccgccccgtgcagataataccacgtctgtacgtgtcacaagtaattaacaaacgtatggtcctcctctctatctattttcttgatccggagggctaagttagttgttttcgtgtcgatcccaaatgcatcagctaatccatcaatcataggcttgatagagtagtcgaaaaaaatagccgtagctttcctagcactccctccgccccccccccccccccccatccatgtatatttctgttgtaattctgtccctctctcgcggtctacttgctcccttttcgattggagtacgtagctcctttgcctttttgtttttggttttttgtttctgtttctgtttgagacaggttaatataatcgccgtcgtccgagggtgtagtgtcagggattgatatccctgtacaccgattattggattgagatgcttctagctagtcttcgtactgataagcgtgcgtgcgtacgtcagagcaccacagtgctggaatggatgatgacatgagagacaggtagagaagcccagctgcgtggctcttggacctttctgcaggtgtacgtggtgtgtacacacgcacacccttttttatagtacatatatacggctcaatgattgtgcgtgccggggctctcgactctccaaattgctgtcgcttttgctcgttttaattattgggagcgcgagcgcggcagcccgctcttgtcttgagcatgcccacccctcgctggcgcacaagccatcagttctctgcaccgtatatgcatggc

SEQ ID NO: 6905 - DNA, 2077 bp, Zea Mays
gtcaccgaaaacagcctgcttgcggtttactcttccgtttacatttaaactctcctgtgcagcaagtgtcaaagcgtgggctcgcgtacgtacgtgcacgtgatgtgcgcgtgcatccgcgcgcttgtccgttgccggctccgctcctcctcaaatattctcgcctgccctcctcatttcctcctcaaccatttcattccttccttccttcccctcgctcgccttcctggcttcttcctccccagcacgcacacgcacacgcacacacccagccttttggctgccctgccggccgtcagagagagaaaccgagctctaactaactgaagtggcggccacatagctagctactcttctgatcctgagcgcgcacgcgccatggctcaggaggacgtgcacctggacgacgcaggcctcgcgctgggcctgtccctcggcagcggcagcggcggcgcctctggtgcggcgcgccacggtggtatcagccgccggctgagcagggaggtgcggctgccgtcgccgcacccgctggagccgtcgctgacgctgagcttgccggacgaagcgaccgcgaccgggtccggcgggggcggggccgcgcacagcgtgtcgtcgctgtcagtggcgggcgtgaagagggagcgcgtggatgacgccgagggagagcgggcgtcgtctacggccgcgttgccgcgggcctgcgccggcgccgaggacgacgacgacgacgggagcacgcggaagaagctgaggctgaccaaggagcagtccgcgctcctggaggaccgcttcaaggagcacagcaccctgaacccgaagcagaaagtcgcgttggcgaagcaactgaagctgaggccacggcaggtggaggtgtggttccaaaacaggcgagcaaggacgaagctgaagcagacggaggtggactgcgagctgctgaagcgctgctgcgagtcgctgacggaggagaaccggcggctgcagcgggagctgcaggagctccgcgcgctcaagttcgccccacacccacaggcgccgccgtcgtccgcgacgcaggccggcgcggcggcgggcgtcgttccggcgccgccgccgccgttgtacatgcagatgcagatgccggccgccgccacgctgagcctgtgcccgtcctgcgaccgcctggccgggcccggcgccgccgccaaggccgagcccaggcccaaggcagccgccacccaccacttcttcaaccccttcacccactccgccgcctgctgatgatgagggcagggcagcacgcagccacgcaacgcagcggcagtaaacagagcaccgccccgtgcagataataccacgtctgtacgtgtcacaagtaattaacaaacgtatggtcctcctctctatctattttcttgatccggagggctaagttagttgttttcgtgtcgatcccaaatgcatcagctaatccatcaatcataggcttgatagagtagtcgaaaaaaatagccgtagctttcctagcactccctccgccccccccccccccccccatccatgtatatttctgttgtaattctgtccctctctcgcggtctacttgctcccttttcgattggagtacgtagctcctttgcctttttgtttttggttttttgtttctgtttctgtttgagacaggttaatataatcgccgtcgtccgagggtgtagtgtcagggattgatatccctgtacaccgattattggattgagatgcttctagctagtcttcgtactgataagcgtgcgtgcgtacgtcagagcaccacagtgctggaatggatgatgacatgagagacaggtagagaagcccagctgcgtggctcttggacctttctgcaggtgtacgtggtgtgtacacacgcacacccttttttatagtacatatatacggctcaatgattgtgcgtgccggggctctcgactctccaaattgctgtcgcttttgctcgttttaattattgggagcgcgagcgcggcagcccgctcttgtcttgagcatgcccacccctcgctggcgcacaagccatcagttctctgcaccgtatatgcatggc

SEQ ID NO: 6906 - DNA, 1737 bp, Zea Mays
cggttgcgaggctaaactggacatttctagacttctctaccaagtcatatctcatatcccccgaaacagtcaggggctgagggaggcgccgcctgggtggagtggagagctggaggcagatcgaaataaagagcaccttccgaaccgacgtcctcgccaacgtcgtctcaaacgtgcccctcacgagaccgtcctccaaaatcctgaaacctatataattcccgctccatcaccggccggacgcctgatccgagcccctgagtcctgatagtacacgacaggcaccgcagcagaccggccggactcggcgccaagcgcgatggatttgtcatccgacgacgtgaaggcggcgaacatgcggcctgcggttgctgctgccgacggcacgtcgacgcttctgcggggttggcgggagttcatgcggagcggcgcgccggcgaggttcctctgttatgaggacggcaagtggatcggtatcaccggagaggccgagtcatcctcgggcgtggacgtgcgctcaggggagagacacggcgtggacgccaagaagatgaaggcatgggagaacgcggcggtgaggctcgaggagaacgacatgtactaccaggtcgtcagcaagctattcctcagctatgggatggcgcaacgcggcgcggcgatcacggaggtgcgcaagatcgcgcccggcgcgaggaccgtggcgttccgggaacaggggcagcgcctcgcctacgcgcgctgcacagccaccggcaccgccaagttcgcatggtacggcgcctcggaggacgacgtggccgccgtcgtcgagcgaggattcgtgaggaacaacgcgccaaggctgggcgcgcgcaagcacggcgacggcgttcatctttcgccggcgcagtgcccttacacgagtgccatgctggccaaggcagacgggagcgacgaggcgcacatcgtgctgtgccgcgtgctgatgggccggccggaggctgtcccggcaggatcttcgcagttctgccccagcagccgcagctacgacagcgccgtggataagctggagaatccacagtggtacgttgtgtggaacatggatatgaacacgaggatcctcccggaatacgtggtcagcttcaagtgctccaagctgcaacagatgcgagaatcatcagaagcgacttcaaagctgaagaagccggcaccagtggctcgcgacatgttcccgacgcttcttgcagagatccagcagatcgtgccagacaagtgtgatctattgcaggagtcatacaaaaacttcaagatgggtcagattaagaaagaccagttcatccagttcctccgcaattacgtcggagacgaagtgctgaaaaccgtggccaagaaacttcgacgatgctaaatttctagtgcgcggtgcgacatcattatctccttgatttctactcgagctgtctgtagtagtgctcagtagagatgaggaggttcacttctgtttctgttgattcaagtttctgtcaagggcttatagggggtttggcgcgctgttcttacattaaccaacagtccaacacaaaggatagatgcagtttctgatactgagacgtttcgattcttcttttagtgtcctgcagcctgtgataatctgtacagactgaaatgatatatgcataaatggaaccattgttgagctggccagtcgctccaaagttttgccgttggccaatcgctccaaagttttgccgttgcaga

SEQ ID NO: 6907 - DNA, 366 bp, Zea Mays
atggcaacaaatagtgaggcaaatgactcctatgacccactcaaagatcaatcacgaaggccaaagtcaaatgatccagaatggaaatatgcatactatgttgaggcgggaaagcgagagctgattcaatgtgctttgtgccccaaacaaataaaaggaggtatcaagagggtgaaacagcatgtagctggtggctatggagacattgtcaagtgtcctaacactactagagagattgctaaagagatgaacgaagctttgaataatgggaagcgggctaggacattgtacctagatgacgatgtactggaagatgaagcaggacaagatgatgatgtccaagttatggaaagcaggtcaatgtaa

SEQ ID NO: 6908 - DNA, 516 bp, Zea Mays
cgcacatggaagcatcagcgcgcgcgcaggcgccgcgcgggcacggcactcatcatgctcgcgctcactagaaaatttgcaagccacagggcactgggagagagtaccgaggctgccacatccatggcgatgttcaggtgcggctctctcattttcagaaacaaatcaaaagaggagctgaatcagtcgacgcatctagacacaggatttggagagatgcaactttttaagtggatcaaaatggtcctcaaaagtttgacccaaagggtgccttctttctaacgaccggtggacgttggtcacacgagcacactcaacaataagttccacatcccgcggagaccaaagacaccaacgaactgattgagaacccttctctatgtgattgtagagattcaacggtccttacacctagagttttgcttgagttagagtatgataacaacagtgaagtaagtgcatgtttgtttctcttgatccttgtaattgcctctgcctaaaattaataatatgtca

SEQ ID NO: 6909 - DNA, 1053 bp, Zea Mays
ctcctactgtaaatcagaagcgtacacactaagatataaattaacattcatgggatcagatgcaacagcaacagcgcaaatgttttgctttgatactgtagcacgacatatagttggcagaccatgtgaaacagttctgaaacaagccactgaagcagcaccaatacctccagatctagcacaaatagtatccttaaagtttacatttcgtgttacagcatcaaaccaaacattcgctcaacgagagaagcaacccactgtgttacaaataaattctatagttgttgtacatggaagacaacactctctaccatcaggaattcaaaacaccatagatcaaggtccatcaacaccaaacaaagaagctacactcaaattattagaagaatcaccttctactgctatggaaaggttatcaacaaaagtatccaaagatgttggcaaaaaactcacatattcaacacaggacgaagacatcatagggtctcaagtcttggatgtagcacaaggaactaatgcagataaggtaacttcgttatcaaccaaagcatacttaaacaaacaaaatattacgctaattctattttaataattgcagggaatccccactgataaaggcaaagagatcgaacctcatcttcaatctcctccaaaaaggcacaaacaaggaccgttgacaatcaaagagtagacaagaccaaggcaccaccaagaatgatatgtgcaaccacatggaactaattcaaaaatggctactgtctttattctgtgcaagctagccacccttttgcaactttataaatgtagtactgacatgccacaaacagttcatatggctacctcattttccttttgaatgactgccttttttacaaaaggcataaatattgtataattaatactcggatcacactaaatgcttaatgctttaaacattgtatatatatgccatcaaggtctgtcttcctctctgtatcatattttccgtatcatacatattatggcgcgctgggcgcgcgttagtcactagtaggactttatcctgcaacaacc

SEQ ID NO: 6910 - DNA, 1125 bp, Zea Mays
tatttatgtactgacaattttatagaaacaaggatatgaatgcacagttacaatcatagaagtacctacaacaaatcgttggtggtttccatcttgcaccaaatgcagtcgagcatgtagaccacaagatggtggttactattgctcctactgtaaatcagaagcgtacacactaagatataaattaacattcatgggatcagatgcaacagcaacagcgcaaatgttttgctttgatactgtagcacgacatatagttggcagaccatgtgaaacagttctgaaacaagccactgaagcagcaccaatacctccagatctagcacaaatagtatccttaaagtttacatttcgtgttacagcatcaaaccaaacattcgctcaacgagagaagcaacccactgtgttacaaataaattctatagttgttgtacatggaagacaacactctctaccatcaggaattcaaaacaccatagatcaaggtccatcaacaccaaacaaagaagctacactcaaattattagaagaatcaccttctactgctatggaaaggttatcaacaaaagtatccaaagatgttggcaaaaaactcacatattcaacacaggacgaagacatcatagggtctcaagtcttggatgtagcacaaggaactaatgcagataagggaatccccactgataaaggcaaagagatcgaacctcatcttcaatctcctccaaaaaggcacaaacaaggaccgttgacaatcaaagagtagacaagaccaaggcaccaccaagaatgatatgtgcaaccacatggaactaattcaaaaatggctactgtctttattctgtgcaagctagccacccttttgcaactttataaatgtagtactgacatgccacaaacagttcatatggctacctcattttccttttgaatgactgccttttttacaaaaggcataaatattgtataattaatactcggatcacactaaatgcttaatgctttaaacattgtatatatatgccatcaaggtctgtcttcctctctgtatcatattttccgtatcatacatattatggcgcgctgggcgcgcgttagtcactagtaggactttatcctgcaacaacc

SEQ ID NO: 6911 - DNA, 1009 bp, Zea Mays
gacgaagtggggcgcctagcttcttactagttttttttttccttgcgcaaagcttgcacttgctgagagagagggagagagaaatccagagataaaggcgcttcattcattccctctcctgctttctctctccaacccatccgtcctctctctccacacataaaaaccaacgaagcgggcgagtgatcaggcagaggcagcaggcaggaaataaatttgaagaaagctagacctctgatcagcaggagctcatgggcgccatgatggcctccataaccagcgagctcctcttcttccttcccttcatcctgctggccctcctcgccttgtacaccaccaccgtcgccaaatgccacggcacccacccgtggcgccgtcagaagaagaagcggcccaacctgcccccgggcgcccgcggatggcccttggtcggcgaaactttcggctacctccgcgcccacccggccacctccgtgggccgcttcatggagcggcatgtcgcacggtacgggaagatataccggtcgagcctgttcggggagcggacggtggtgtcggcggacgcggggctgaaccgctacatcctgcagaacgaggggcggctgttcgagtgcagctacccgcgcagcatcggcggcatcctgggcaagtggtccatgctggtgctcgtgggcgacgcgcaccgcgagatgcgcgctatctcgctcaacttcctcagctccgtccgcctccgcgccgtgctgctccccgaggtggagcgccacaccctgctggtcctccgctcgtggccgccctccgacggcaccttctccgcccagcacgaagccaagaagttcacgtttaacctgatggcgaagaacataatgagcatggaccccggcgaggaggagacggagcggctgcggctggagtacatcaccttcatgaagggcgtcgtgtcagcgccgctcaacttcccgggcacggcctactggaaggcgctcaagttgcccatggtgcatggtttttt

SEQ ID NO: 6912 - DNA, 579 bp, Zea Mays
cacagatgagtcttcagttacatgctagggaaatttcgctatgggatgttaaacaaacatgatactgtattggagagatctcaaggttgctgtcatctatgcggtcctgttttgttttctcatggtgtcctgctatgccgccctttacttgaaatggttcagactttcagccatgtttgtaaccttcgggatcctccttccagtgagtctcaaaatctctaggcatagaaggctgaagaggaaaagagaaaggagactgttgttgccactgtccatgtgaatacattttttttgatacaccctgtaacattctagtggagttggccagctacagaagatagggaaatcctcggcagacgaactcaactttacggccccagcctacgctttggaaaatgttgtatgcatcacctgttgtgcttctgtcctccacatgtgtacacacacacatacgtgccgaacactttgcgttgttttgccccccgcccctgtgtttgcatcaaacttcgtccgttgaaagttgatgcatgttgctggagtttctgacggcaaatcttggacgaatctcgtactacttag

SEQ ID NO: 6913 - DNA, 564 bp, Zea Mays
aaaatggcaacactggtgtgaaacttatttgtctatgtgtgggaacctctgtatttagagagatctcaaggttgctgtcatctatgcggtcctgttttgttttctcatggtgtcctgctatgccgccctttacttgaaatggttcagactttcagccatgtttgtaaccttcgggatcctccttccagtgagtctcaaaatctctaggcatagaaggctgaagaggaaaagagaaaggagactgttgttgccactgtccatgtgaatacattttttttgatacaccctgtaacattctagtggagttggccagctacagaagatagggaaatcctcggcagacgaactcaactttacggccccagcctacgctttggaaaatgttgtatgcatcacctgttgtgcttctgtcctccacatgtgtacacacacacatacgtgccgaacactttgcgttgttttgccccccgcccctgtgtttgcatcaaacttcgtccgttgaaagttgatgcatgttgctggagtttctgacggcaaatcttggacgaatctcgtactacttag

SEQ ID NO: 6914 - DNA, 913 bp, Zea Mays
aaaacgactaatattttgggattaagggattatctttctattctattaccttgttctgcccttcatttctgaactctgagcatacagggtagcaagggcagcaaaatgtactgcatgtcttttaaacttaaagtagaaggaggttggtgttcttgccccatacttcgaaggcaaattatgattttaccctcattttttcaactttgttattttaccctgttttttaaatctgaagccaccatttgcccctgtttagactctgttagctaaaaggctgcacaaatgaattgaacaaaaataaatattaaaatgtttaaaagactatattaacccctgaccttatcctaaccttccaggtttcgtcgattgttgactaagcatgtgcaacttgttaatgtttgctaaggagagatctcaaggttgctgtcatctatgcggtcctgttttgttttctcatggtgtcctgctatgccgccctttacttgaaatggttcagactttcagccatgtttgtaaccttcgggatcctccttccagtgagtctcaaaatctctaggcatagaaggctgaagaggaaaagagaaaggagactgttgttgccactgtccatgtgaatacattttttttgatacaccctgtaacattctagtggagttggccagctacagaagatagggaaatcctcggcagacgaactcaactttacggccccagcctacgctttggaaaatgttgtatgcatcacctgttgtgcttctgtcctccacatgtgtacacacacacatacgtgccgaacactttgcgttgttttgccccccgcccctgtgtttgcatcaaacttcgtccgttgaaagttgatgcatgttgctggagtttctgacggcaaatcttggacgaatctcgtactacttag

SEQ ID NO: 6915 - DNA, 541 bp, Zea Mays
tggacatgtgatgaaagatcaaggaaaatcctctgagagatctcaaggttgctgtcatctatgcggtcctgttttgttttctcatggtgtcctgctatgccgccctttacttgaaatggttcagactttcagccatgtttgtaaccttcgggatcctccttccagtgagtctcaaaatctctaggcatagaaggctgaagaggaaaagagaaaggagactgttgttgccactgtccatgtgaatacattttttttgatacaccctgtaacattctagtggagttggccagctacagaagatagggaaatcctcggcagacgaactcaactttacggccccagcctacgctttggaaaatgttgtatgcatcacctgttgtgcttctgtcctccacatgtgtacacacacacatacgtgccgaacactttgcgttgttttgccccccgcccctgtgtttgcatcaaacttcgtccgttgaaagttgatgcatgttgctggagtttctgacggcaaatcttggacgaatctcgtactacttag

SEQ ID NO: 6916 - DNA, 5540 bp, Zea Mays
gtggtgcacggttctgcctttgttccgcgcccctgcgtccggaaatctcgccgcgcccctgcgtccggaaatctcgccgcgcccctacgcaatcacctcctcctctcccctcactacgccgccacctcctcctctccccctcactgcgtcgccctcctctcccactcactgcgtcgtcccctggatcctcgccccagcctctccaaccgcctccgcgctgtcccctggatctcgcgtcgcgcgtctgcagcacgcccgccacacacgccgcgattggagattggtggaaagcggtccgcggcttcaactccgacatctccggcgagctcgagcgcctcgctgcaacgacgggggcgacgctcagatccgacgtgccggacgcggccgccgtggatctgaacgacctcgagtccatggatctgtcggcggacgctgctccgctggagcacatggagccgttcgtgctggcatgcgcgcgggtgctgggcccgacgccgggccggacgcgtggcgtcgccgacggccgggtcgtcttctgggacggcaagcggtgggtcccattcgcgacggcctctccgcgctggacgcaggagctctgcggcgggcccaaggcctcgccgctggagtatctccccacgcccggcgatggcgccctgcacctcacgcccgtgctccgcccccacacccagcaggcaggcatggatctcgcagggcagggatctcgcggatcacgccgtgcggggatctcgcggatcacgccgggcggggatctcggccaagcctgatcagaagtttggggccctatcaaagcgattcgcagaagtggaggctgggggatcgaagcggaggtggtggagatgacggaggcgctgaagtccgtctggaatccggtgacacagaaaaagatcagagtttctccttctacttcgtcgggtgaagtcccggtggtggacaacacctcgacgctgatccctctggaagctgcggcaggcattgctggtgccgatgcaacccacatttggcattcccactccaatcgaagggtttttggtgtcgctgaacaggacactaggcttctgctctgcttactaatccattggtttcaagatgacagaagccgtcatcaaactgaatacttcttctaactgaatacttcttcccagctgacagatcagatcaaacttgacgtgtgttaggtatcagagaaaaaaaccaaggcatggtgcacttctaaagagcacatctgcagctgcccgctcgggctccgtttcgataagactagggacctgtacatcgccgacgcctacttcagcttgctcaaagttggccccgagggcaggctggagagttgctgtgaaaactctcaagtgagggaacatgatcatgtgcacgcaagatcctgatgactgttggcagaatcaagtcatagttaaataaacaggcccccacccgacggcgcgagcgaggcacgcggccctcccggcggggtggacgcggcccctggctgtgaggcgacgatggggctggaggctgcgatggcgctgggcgacccgccggcggactacgcatccatcgcgacggtggggctgttcgtggcattcatgtgcgtctgcatcgtcgtcgggcacctcctcgaggagaaccgctggatgaacgagtccatcaccatgctcttcatcggctttgggaccttgatgttgcaatgctgtatgttggggattgcaggggctgggaactagagcagtcatcctgttcgcgtcgagcgagaagcattcacgtgtgctggtgttcagtgaggacctcttatttatttacctgctgccgctgatcatattcaatgcagggaggcaggagcatccttaattgaacggcagtgatcctgcagtttatgttggaaagaaattaacataggagcattgcacgtatttggttattgttttagaacctatttctataggttttctctttggagctttctgagctaaagtccaaaaaggattccatcttctgaacacttcagtagcaaagcaactatgttgtgctattaaatataaatctgcaattattccaccaagtctttggcgttaggagtgtagctgatatgttgtcatgttccaagtgaagaagaaacagttctttcgaaacttcattactattacactgtttggtgcagttggcaccttgatctcttttactgtaatatcccttggcgctctaggactaatatcaaggcttaatatcggcgcacttgaactgggagactatcttgcacttggggcaatattctcggccacagactcggtttgtaccttgcaggtgttaagccaagatgagacaccattcttgtacagcctcgtgtttggtgaaggtgttgtcaatgacacaacttctgttgtgttgttcaatgcaatccagaactttgatcatggaaatatcagcggtgccaaattactgaacttcattggcagtttcctttatctgttcggctccagcaccattcttggagtagcttctggacttcttagtgcttataccattaagaagttgtactttggcaggcattcaaccgatcatgaagtttccattatgatgctaatggcttatttatcttacatgctagctgaaaaagttcgagggtcacaaccaagcatgcctttgcaacattgtcgtttatcttcgagacttttctgtttctttatgttggtatggatgcattggatatagagaagtggaagattgtcggtcaaacttataggcatactctctccctctttctctctcttcattgctcaactagaagatctttcttctggatctgtattttctatcatgtgcagcccggtaaagtctatcgctttgagcagcaccattttagccttggtgctggtttcaagagctgcttttgttttcccactatcctttctatcaaatttgaccaaaaaactccaaatggaaagatatcttttaggcagcaggttattgtttggtgggcgggtctcatgagaggtgttgtgtctattgtgttggcttacaataaggttaatcttgtgtttggtctatctggtttgagctttggtctggaattatgttactgcttttgtttcctctatccattccaaaacataggacattttttgttgtcgtaagtcaaaaattctctaactttgacagagtttatagaaaaacaaaccaacatcaacagccttcatttcttaatcttatatagaagttgcagtattttagtctaatagatggacatgttttaaattttgaggcattgaaacaatttgcatcatgaaggcgttcgacttaatgtttccaaggttctgtggcagtgcgaggcattttgggaggtggtgagcgcctcgcttggcaccttcattttcgtgatgatgctgtccttcaggctgcagtgccacacaagttcgtttggtgtaggtgctgcttgatttttggcggtgcatgccgggtgttcgacaatgtttctgaggttttgtggcagtgcgaggcattttgggagggacatcatcatgcccaacttgaagtcgtccgtgaccacaacagcgagcgcggtggagtacatggatgaagtattgaaggcgttgtcgccaggtagtaccttcttcccactcatgacactacctcgtagacaacacaagtctagatgttgctggtgcagctgttcaacacgggcaaggtgctgttttccaatgtggtcgtcgacggcggcatgttcgtcttggccctcctcacctaccgcagcttcttcgcggcgccatcattctccctgtccgtctgattttctatcaggttgctcgatcgtcgtcaatataatccgtgtcaacaaattttaatcttggttcataagtaaagaacagaaaaggaaaacctagatgtctataattatacgtacatcaaatctaatgattttaggtacatattttctgtttgccattgcaaaatctaatcacgtgaattttatagttccaatcggggctatgtctatgtactcttatttttgtccagaacccttatgtaaggggaagtggaaagaaatggattggcacactgctggatggatcttcctcaatacgtttatcgagtaaataagcttgcattgttttggataattacatcatgtaaccgattttgacatttttttattaatcaccggcaacttacccaatttgctgtaataataaaataaaaggctacactatactacacactttcttgccatacattaaatctgacggtcattttttttattcctgacgacgcccgcagccgccgccgccgacgacggaggagcagcacctctcgtctgtccaccgctgaccgctcgtttgtcagcctagcaccggggtgcatgaacgcccagtatatgctacagcaccgccgcccctggccctgccgcctgcgccggtcgttgccctgtgcactccgcgggcctcgggaatggccaaccaggacatttatcggtttgcccaccctctcctctcttctcttctctcccgcccgctctccctctctcccttctctccggcttccgattgggtattgtttattggcttctggctttaattaattactgtatttgcatgttcaggtatgttgttcatccatctcgtatgatgaagtgttttatgctcttttccaattattgttgcaagtagcaaaattagaacatgtccttatgtttagactatgaaagaaaacacttatttcaatttgtaggtgtatttttctgtttcagttggcatatcatcatgaggatgtgaattccacaggaaggcccatgtgatcttattgctcccttagatcttccacattttttacagtcttattccttgccgaggggagtcctgctccagtagtggtctcagaaggggcaaataccatggatgttggcaggcctgtgcttgtgcagaatgcaccaaggacaagactggatgcagggacatgggggacgatggggattggattgggggcgattctggatttggcttcggtgcaatggaggttgaggtgaacaggggcttcaacagtgatgctgttttagcaatggagacgatccattccctgtcagcttcaaaatcaagttacccaatggctgatctcacccaactcttcatgacagctactcaagaagggaaaagatcagaatcgcaaggccagattcttagggtggaatgctatagcttaatgccctaatctttatatgcctcttcttatatctgcacttccatgggcaccgggcgacactaaattcacaagataccccctccacctcaaggtgtaagaccatagcttccatcgctctttacgttatgtaatatatttgtagtatgctaatttgattcaccataatccttaccattcatactattatgcttgtttttctctcttcagtaatcgtcgaaaatggttcattgttcatagctcaagccaacttaattttaacgcaaaaatgtagcagtacttaaagtttcatctgtaatttatcaatggataagtgagttagaaatagtatttatcat

SEQ ID NO: 6917 - DNA, 5652 bp, Zea Mays
gtggtgcacggttctgcctttgttccgcgcccctgcgtccggaaatctcgccgcgcccctgcgtccggaaatctcgccgcgcccctacgcaatcacctcctcctctcccctcactacgccgccacctcctcctctccccctcactgcgtcgccctcctctcccactcactgcgtcgtcccctggatcctcgccccagcctctccaaccgcctccgcgctgtcccctggatctcgcgtcgcgcgtctgcagcacgcccgccacacacgccgcgattggagattggtggaaagcggtccgcggcttcaactccgacatctccggcgagctcgagcgcctcgctgcaacgacgggggcgacgctcagatccgacgtgccggacgcggccgccgtggatctgaacgacctcgagtccatggatctgtcggcggacgctgctccgctggagcacatggagccgttcgtgctggcatgcgcgcgggtgctgggcccgacgccgggccggacgcgtggcgtcgccgacggccgggtcgtcttctgggacggcaagcggtgggtcccattcgcgacggcctctccgcgctggacgcaggagctctgcggcgggcccaaggcctcgccgctggagtatctccccacgcccggcgatggcgccctgcacctcacgcccgtgctccgcccccacacccagcaggcaggcatggatctcgcagggcagggatctcgcggatcacgccgtgcggggatctcgcggatcacgccgggcggggatctcggccaagcctgatcagaagtttggggccctatcaaagcgattcgcagaagtggaggctgggggatcgaagcggaggtggtggagatgacggaggcgctgaagtccgtctggaatccggtgacacagaaaaagatcagagtttctccttctacttcgtcgggtgaagtcccggtggtggacaacacctcgacgctgatccctctggaagctgcggcaggcattgctggtgccgatgcaacccacatttggcattcccactccaatcgaagggtttttggtgtcgctgaacaggacactaggcttctgctctgcttactaatccattggtttcaagatgacagaagccgtcatcaaactgaatacttcttctaactgaatacttcttcccagctgacagatcagatcaaacttgacgtgtgttaggtatcagagaaaaaaaccaaggcatggtgcacttctaaagagcacatctgcagctgcccgctcgggctccgtttcgataagactagggacctgtacatcgccgacgcctacttcagcttgctcaaagttggccccgagggcaggctggagagttgctgtgaaaactctcaagtgagggaacatgatcatgtgcacgcaagatcctgatgactgttggcagaatcaagtcatagttaaataaacaggcccccacccgacggcgcgagcgaggcacgcggccctcccggcggggtggacgcggcccctggctgtgaggcgacgatggggctggaggctgcgatggcgctgggcgacccgccggcggactacgcatccatcgcgacggtggggctgttcgtggcattcatgtgcgtctgcatcgtcgtcgggcacctcctcgaggagaaccgctggatgaacgagtccatcaccatgctcttcatcggctttgggaccttgatgttgcaatgctgtatgttggggattgcaggggctgggaactagagcagtcatcctgttcgcgtcgagcgagaagcattcacgtgtgctggtgttcagtgaggacctcttatttatttacctgctgccgctgatcatattcaatgcagggaggcaggagcatccttaattgaacggcagtgatcctgcagtttatgttggaaagaaattaacataggagcattgcacgtatttggttattgttttagaacctatttctataggttttctctttggagctttctgagctaaagtccaaaaaggattccatcttctgaacacttcagtagcaaagcaactatgttgtgctattaaatataaatctgcaattattccaccaagtctttggcgttaggagtgtagctgatatgttgtcatgtatgattatgctgaatatctggcactaagaacctttgtgtataacccactcacaattcttttttttttcttccccaataagccaggttccaagtgaagaagaaacagttctttcgaaacttcattactattacactgtttggtgcagttggcaccttgatctcttttactgtaatatcccttggcgctctaggactaatatcaaggcttaatatcggcgcacttgaactgggagactatcttgcacttggggcaatattctcggccacagactcggtttgtaccttgcaggtgttaagccaagatgagacaccattcttgtacagcctcgtgtttggtgaaggtgttgtcaatgacacaacttctgttgtgttgttcaatgcaatccagaactttgatcatggaaatatcagcggtgccaaattactgaacttcattggcagtttcctttatctgttcggctccagcaccattcttggagtagcttctggacttcttagtgcttataccattaagaagttgtactttggcaggcattcaaccgatcatgaagtttccattatgatgctaatggcttatttatcttacatgctagctgaattgctcgatttgagtggcattctcactgtgtttttctgtggtatcgtaatgtcacactatacttggcaaaatgtaacagaaagttcgagggtcacaaccaagcatgcctttgcaacattgtcgtttatcttcgagacttttctgtttctttatgttggtatggatgcattggatatagagaagtggaagattgtcggtcaaacttataggcatactctctccctctttctctctcttcattgctcaactagaagatctttcttctggatctgtattttctatcatgtgcagcccggtaaagtctatcgctttgagcagcaccattttagccttggtgctggtttcaagagctgcttttgttttcccactatcctttctatcaaatttgaccaaaaaactccaaatggaaagatatcttttaggcagcaggtaagtctttaacttagcaacatcttaacttcttatgttctcttgaaacagttgttatattccttacatgatattggtcatttaggttattgtttggtgggcgggtctcatgagaggtgttgtgtctattgtgttggcttacaataaggttaatcttgtgtttggtctatctggtttgagctttggtctggaattatgttactgcttttgtttcctctatccattccaaaacataggacattttttgttgtcgtaagtcaaaaattctctaactttgacagagtttatagaaaaacaaaccaacatcaacagccttcatttcttaatcttatatagaagttgcagtattttagtctaatagatggacatgttttaaattttgaggcattgaaacaatttgcatcatgaaggcgttcgacttaatgtttccaaggttctgtggcagtgcgaggcattttgggaggtggtgagcgcctcgcttggcaccttcattttcgtgatgatgctgtccttcaggctgcagtgccacacaagttcgtttggtgtaggtgctgcttgatttttggcggtgcatgccgggtgttcgacaatgtttctgaggttttgtggcagtgcgaggcattttgggagggacatcatcatgcccaacttgaagtcgtccgtgaccacaacagcgagcgcggtggagtacatggatgaagtattgaaggcgttgtcgccaggtagtaccttcttcccactcatgacactacctcgtagacaacacaagtctagatgttgctggtgcagctgttcaacacgggcaaggtgctgttttccaatgtggtcgtcgacggcggcatgttcgtcttggccctcctcacctaccgcagcttcttcgcggcgccatcattctccctgtccgtctgattttctatcaggttgctcgatcgtcgtcaatataatccgtgtcaacaaattttaatcttggttcataagtaaagaacagaaaaggaaaacctagatgtctataattatacgtacatcaaatctaatgattttaggtacatattttctgtttgccattgcaaaatctaatcacgtgaattttatagttccaatcggggctatgtctatgtactcttatttttgtccagaacccttatgtaaggggaagtggaaagaaatggattggcacactgctggatggatcttcctcaatacgtttatcgaccgccgccgccgacgacggaggagcagcacctctcgtctgtccaccgctgaccgctcgtttgtcagcctagcaccggggtgcatgaacgcccagtatatgctacagcaccgccgcccctggccctgccgcctgcgccggtcgttgccctgtgcactccgcgggcctcgggaatggccaaccaggacatttatcggtttgcccaccctctcctctcttctcttctctcccgcccgctctccctctctcccttctctccggcttccgattgggtattgtttattggcttctggctttaattaattactgtatttgcatgttcaggtatgttgttcatccatctcgtatgatgaagtgttttatgctcttttccaattattgttgcaagtagcaaaattagaacatgtccttatgtttagactatgaaagaaaacacttatttcaatttgtaggtgtatttttctgtttcagttggcatatcatcatgaggatgtgaattccacaggaaggcccatgtgatcttattgctcccttagatcttccacattttttacagtcttattccttgccgaggggagtcctgctccagtagtggtctcagaaggggcaaataccatggatgttggcaggcctgtgcttgtgcagaatgcaccaaggacaagactggatgcagggacatgggggacgatggggattggattggggtactgtattgcagctgcagtagctgaacctgaatgactcgtggttgctgtggagggcgattctggatttggcttcggtgcaatggaggttgaggggcttcaacagtgatgctgttttagcaatggagacgatccattccctgtcagcttcaaaatcaagttacccaatggctgatctcacccaactcttcatgacagctactcaagaagggaaaagatcagaatcgcaaggccagattcttagggtggaatgctatagcttaatgccctaatctttatatgcctcttcttatatctgcacttccatgggcaccgggcgacactaaattcacaagataccccctccacctcaaggtgtaagaccatagcttccatcgctctttacgttatgtaatatatttgtagtatgctaatttgattcaccataatccttaccattcatactattatgcttgtttttctctcttcagtaatcgtcgaaaatggttcattgttcatagctcaagccaacttaattttaacgcaaaaatgtagcagtacttaaagtttcatctgtaatttatcaatggataagtgagttagaaatagtatttatcat

SEQ ID NO: 6918 - DNA, 4601 bp, Zea Mays
gtggtgcacggttctgcctttgttccgcgcccctgcgtccggaaatctcgccgcgcccctgcgtccggaaatctcgccgcgcccctacgcaatcacctcctcctctcccctcactacgccgccacctcctcctctccccctcactgcgtcgccctcctctcccactcactgcgtcgtcccctggatcctcgccccagcctctccaaccgcctccgcgctgtcccctggatctcgcgtcgcgcgtctgcagcacgcccgccacacacgccgcgattggagattggtggaaagcggtccgcggcttcaactccgacatctccggcgagctcgagcgcctcgctgcaacgacgggggcgctgaagtccgtctggaatccggtgacacagaaaaagatcagagtttctccttctacttcgtcgggtgaagtcccggtggtggacaacacctcgacgctgatccctctggaagctgcggcaggcattgctggtgccgatgcaacccacatttggcattcccactccaatcgaagggtttttggtgtcgctgaacaggacactaggcttctgctctgcttactaatccattggtttcaagatgacagaagccgtcatcaaactgaatacttcttctaactgaatacttcttcccagctgacagatcagatcaaacttgacgtgtgttaggtatcagagaaaaaaaccaaggcatggtgcacttctaaagagcacatctgcagctgcccgctcgggctccgtttcgataagactagggacctgtacatcgccgacgcctacttcagcttgctcaaagttggccccgagggcaggctggagagttgctgtgaaaactctcaagtgagggaacatgatcatgtgcacgcaagatcctgatgactgttggcagaatcaagtcatagttaaataaacaggcccccacccgacggcgcgagcgaggcacgcggccctcccggcggggtggacgcggcccctggctgtgaggcgacgatggggctggaggctgcgatggcgctgggcgacccgccggcggactacgcatccatcgcgacggtggggctgttcgtggcattcatgtgcgtctgcatcgtcgtcgggcacctcctcgaggagaaccgctggatgaacgagtccatcaccatgctcttcatcggctttgggaccttgatgttgcaatgctgtatgttggggattgcaggggctgggaactagagcagtcatcctgttcgcgtcgagcgagaagcattcacgtgtgctggtgttcagtgaggacctcttatttatttacctgctgccgctgatcatattcaatgcagggttccaagtgaagaagaaacagttctttcgaaacttcattactattacactgtttggtgcagttggcaccttgatctcttttactgtaatatcccttggcgctctaggactaatatcaaggcttaatatcggcgcacttgaactgggagactatcttgcacttggggcaatattctcggccacagactcgaactttgatcatggaaatatcagcggtgccaaattactgaacttcattggcagtttcctttatctgttcggctccagcaccattcttggagtagcttctggacttcttagtgcttataccattaagaagttgtactttggcaggcattcaaccgatcatgaagtttccattatgatgctaatggcttatttatcttacatgctagctgaaaaagttcgagggtcacaaccaagtaagtagcttcataccttctgtatggacatttgcttttgatcatgcattctttggtaatgcttatgctaatgtactattggatggatcacaggcatgcctttgcaacattgtcgtttatcttcgagacttttctgtttctttatgttggtatggatgcattggatatagagaagtggaagattgtcggtcaaacttataggcatactctctccctctttctctctcttcattgctcaactagaagatctttcttctggatctgtattttctatcatgtgcagcccggtaaagtctatcgctttgagcagcaccattttagccttggtgctggtttcaagagctgcttttgttttcccactatcctttctatcaaatttgaccaaaaaactccaaatggaaagatatcttttaggcagcaggttattgtttggtgggcgggtctcatgagaggtgttgtgtctattgtgttggcttacaataaggttaatcttgtgtttggtctatctggtttgagctttggtctggaattatgttactgcttttgtttcctctatccattccaaaacataggacattttttgttgtcgtaagtcaaaaattctctaactttgacagagtttatagaaaaacaaaccaacatcaacagccttcatttcttaatcttatatagaagttgcagtattttagtctaatagatggacatgttttaaattttgaggcattgaaacaatttgcatcatgaaggcgttcgacttaatgtttccaaggttctgtggcagtgcgaggcattttgggaggtggtgagcgcctcgcttggcaccttcattttcgtgatgatgctgtccttcaggctgcagtgccacacaagttcgtttggtgtaggtgctgcttgatttttggcggtgcatgccgggtgttcgacaatgtttctgaggttttgtggcagtgcgaggcattttgggagggacatcatcatgcccaacttgaagtcgtccgtgaccacaacagcgagcgcggtggagtacatggatgaagtattgaaggcgttgtcgccaggtagtaccttcttcccactcatgacactacctcgtagacaacacaagtctagatgttgctggtgcagctgttcaacacgggcaaggtgctgttttccaatgtggtcgtcgacggcggcatgttcgtcttggccctcctcacctaccgcagcttcttcgcggcgccatcattctccctgtccgtctgattttctatcaggttgctcgatcgtcgtcaatataatccgtgtcaacaaattttaatcttggttcataagtaaagaacagaaaaggaaaacctagatgtctataattatacgtacatcaaatctaatgattttaggtacatattttctgtttgccattgcaaaatctaatcacgtgaattttatagttccaatcggggctatgtctatgtactcttatttttgtccagaacccttatgtaaggggaagtggaaagaaatggattggcacactgctggatggatcttcctcaatacgtttatcgaccgccgccgccgacgacggaggagcagcacctctcgtctgtccaccgctgaccgctcgtttgtcagcctagcaccggggtgcatgaacgcccagtatatgctacagcaccgccgcccctggccctgccgcctgcgccggtcgttgccctgtgcactccgcgggcctcgggaatggccaaccaggacatttatcggtttgcccaccctctcctctcttctcttctctcccgcccgctctccctctctcccttctctccggcttccgattgggtattgtttattggcttctggctttaattaattactgtatttgcatgttcaggtatgttgttcatccatctcgtatgatgaagtgttttatgctcttttccaattattgttgcaagtagcaaaattagaacatgtccttatgtttagactatgaaagaaaacacttatttcaatttgtaggtgtatttttctgtttcagttggcatatcatcatgaggatgtgaattccacaggaaggcccatgtgatcttattgctcccttagatcttccacattttttacagtcttattccttgccgaggggagtcctgctccagtagtggtctcagaaggggcaaataccatggatgttggcaggcctgtgcttgtgcagaatgcaccaaggacaagactggatgcagggacatgggggacgatggggattggattggggtactgtattgcagctgcagtagctgaacctgaatgactcgtggttgctgtggagggcgattctggatttggcttcggtgcaatggaggttgaggggcttcaacagtgatgctgttttagcaatggagacgatccattccctgtcagcttcaaaatcaagttacccaatggctgatctcacccaactcttcatgacagctactcaagaagggaaaagatcagaatcgcaaggccagattcttagggtggaatgctatagcttaatgccctaatctttatatgcctcttcttatatctgcacttccatgggcaccgggcgacactaaattcacaagataccccctccacctcaaggtgtaagaccatagcttccatcgctctttacgttatgtaatatatttgtagtatgctaatttgattcaccataatccttaccattcatactattatgcttgtttttctctcttcagtaatcgtcgaaaatggttcattgttcatagctcaagccaacttaattttaacgcaaaaatgtagcagtacttaaagtttcatctgtaatttatcaatggataagtgagttagaaatagtatttatcat

SEQ ID NO: 6919 - DNA, 5206 bp, Zea Mays
gtggtgcacggttctgcctttgttccgcgcccctgcgtccggaaatctcgccgcgcccctgcgtccggaaatctcgccgcgcccctacgcaatcacctcctcctctcccctcactacgccgccacctcctcctctccccctcactgcgtcgccctcctctcccactcactgcgtcgtcccctggatcctcgccccagcctctccaaccgcctccgcgctgtcccctggatctcgcgtcgcgcgtctgcagcacgcccgccacacacgccgcgattggagattggtggaaagcggtccgcggcttcaactccgacatctccggcgagctcgagcgcctcgctgcaacgacgggggcgacgctcagatccgacgtgccggacgcggccgccgtggatctgaacgacctcgagtccatggatctgtcggcggacgctgctccgctggagcacatggagccgttcgtgctggcatgcgcgcgggtgctgggcccgacgccgggccggacgcgtggcgtcgccgacggccgggtcgtcttctgggacggcaagcggtgggtcccattcgcgacggcctctccgcgctggacgcaggagctctgcggcgggcccaaggcctcgccgctggagtatctccccacgcccggcgatggcgccctgcacctcacgcccgtgctccgcccccacacccagcaggcaggcatggatctcgcagggcagggatctcgcggatcacgccgtgcggggatctcgcggatcacgccgggcggggatctcggccaagcctgatcagaagtttggggccctatcaaagcgattcgcagaagtggaggctgggggatcgaagcggaggtggtggagatgacggaggcgctgaagtccgtctggaatccggtgacacagaaaaagatcagagtttctccttctacttcgtcgggtgaagtcccggtggtggacaacacctcgacgctgatccctctggaagctgcggcaggcattgctggtgccgatgcaacccacatttggcattcccactccaatcgaagggtttttggtgtcgctgaacaggacactaggcttctgctctgcttactaatccattggtttcaagatgacagaagccgtcatcaaactgaatacttcttctaactgaatacttcttcccagctgacagatcagatcaaacttgacgtgtgttaggtatcagagaaaaaaaccaaggcatggtgcacttctaaagagcacatctgcagctgcccgctcgggctccgtttcgataagactagggacctgtacatcgccgacgcctacttcagcttgctcaaagttggccccgagggcaggctggagagttgctgtgaaaactctcaagtgagggaacatgatcatgtgcacgcaagatcctgatgactgttggcagaatcaagtcatagttaaataaacaggcccccacccgacggcgcgagcgaggcacgcggccctcccggcggggtggacgcggcccctggctgtgaggcgacgatggggctggaggctgcgatggcgctgggcgacccgccggcggactacgcatccatcgcgacggtggggctgttcgtggcattcatgtgcgtctgcatcgtcgtcgggcacctcctcgaggagaaccgctggatgaacgagtccatcaccatgctcttcatcgggctgggaactagagcagtcatcctgttcgcgtcgagcgagaagcattcacgtgtgctggtgttcagtgaggacctcttatttatttacctgctgccgctgatcatattcaatgcagggttccaagtgaagaagaaacagttctttcgaaacttcattactattacactgtttggtgcagttggcaccttgatctcttttactgtaatatcccttggcgctctaggactaatatcaaggcttaatatcggcgcacttgaactgggagactatcttgcacttggggcaatattctcggccacagactcggtttgtaccttgcaggtgttaagccaagatgagacaccattcttgtacagcctcgtgtttggtgaaggtgttgtcaatgacacaacttctgttgtgttgttcaatgcaatccagaactttgatcatggaaatatcagcggtgccaaattactgaacttcattggcagtttcctttatctgttcggctccagcaccattcttggagtagcttctggacttcttagtgcttataccattaagaagttgtactttggcaggcattcaaccgatcatgaagtttccattatgatgctaatggcttatttatcttacatgctagctgaattgctcgatttgagtggcattctcactgtgtttttctgtggtatcgtaatgtcacactatacttggcaaaatgtaacagaaagttcgagggtcacaaccaagcatgcctttgcaacattgtcgtttatcttcgagacttttctgtttctttatgttggtatggatgcattggatatagagaagtggaagattgtcggtcaaacttataggcatactctctccctctttctctctcttcattgctcaactagaagatctttcttctggatctgtattttctatcatgtgcagcccggtaaagtctatcgctttgagcagcaccattttagccttggtgctggtttcaagagctgcttttgttttcccactatcctttctatcaaatttgaccaaaaaactccaaatggaaagatatcttttaggcagcaggtaagtctttaacttagcaacatcttaacttcttatgttctcttgaaacagttgttatattccttacatgatattggtcatttaggttattgtttggtgggcgggtctcatgagaggtgttgtgtctattgtgttggcttacaataaggttaatcttgtgtttggtctatctggtttgagctttggtctggaattatgttactgcttttgtttcctctatccattccaaaacataggacattttttgttgtcgtaagtcaaaaattctctaactttgacagagtttatagaaaaacaaaccaacatcaacagccttcatttcttaatcttatatagaagttgcagtattttagtctaatagatggacatgttttaaattttgaggcattgaaacaatttgcatcatgaaggcgttcgacttaatgtttccaaggttctgtggcagtgcgaggcattttgggaggtggtgagcgcctcgcttggcaccttcattttcgtgatgatgctgtccttcaggctgcagtgccacacaagttcgtttggtgtaggtgctgcttgatttttggcggtgcatgccgggtgttcgacaatgtttctgaggttttgtggcagtgcgaggcattttgggagggacatcatcatgcccaacttgaagtcgtccgtgaccacaacagcgagcgcggtggagtacatggatgaagtattgaaggcgttgtcgccaggtagtaccttcttcccactcatgacactacctcgtagacaacacaagtctagatgttgctggtgcagctgttcaacacgggcaaggtgctgttttccaatgtggtcgtcgacggcggcatgttcgtcttggccctcctcacctaccgcagcttcttcgcggcgccatcattctccctgtccgtctgattttctatcaggttgctcgatcgtcgtcaatataatccgtgtcaacaaattttaatcttggttcataagtaaagaacagaaaaggaaaacctagatgtctataattatacgtacatcaaatctaatgattttaggtacatattttctgtttgccattgcaaaatctaatcacgtgaattttatagttccaatcggggctatgtctatgtactcttatttttgtccagaacccttatgtaaggggaagtggaaagaaatggattggcacactgctggatggatcttcctcaatacgtttatcgaccgccgccgccgacgacggaggagcagcacctctcgtctgtccaccgctgaccgctcgtttgtcagcctagcaccggggtgcatgaacgcccagtatatgctacagcaccgccgcccctggccctgccgcctgcgccggtcgttgccctgtgcactccgcgggcctcgggaatggccaaccaggacatttatcggtttgcccaccctctcctctcttctcttctctcccgcccgctctccctctctcccttctctccggcttccgattgggtattgtttattggcttctggctttaattaattactgtatttgcatgttcaggtatgttgttcatccatctcgtatgatgaagtgttttatgctcttttccaattattgttgcaagtagcaaaattagaacatgtccttatgtttagactatgaaagaaaacacttatttcaatttgtaggtgtatttttctgtttcagttggcatatcatcatgaggatgtgaattccacaggaaggcccatgtgatcttattgctcccttagatcttccacattttttacagtcttattccttgccgaggggagtcctgctccagtagtggtctcagaaggggcaaataccatggatgttggcaggcctgtgcttgtgcagaatgcaccaaggacaagactggatgcagggacatgggggacgatggggattggattgggggcgattctggatttggcttcggtgcaatggaggttgaggtgaacaggggcttcaacagtgatgctgttttagcaatggagacgatccattccctgtcagcttcaaaatcaagttacccaatggctgatctcacccaactcttcatgacagctactcaagaagggaaaagatcagaatcgcaaggccagattcttagggtggaatgctatagcttaatgccctaatctttatatgcctcttcttatatctgcacttccatgggcaccgggcgacactaaattcacaagataccccctccacctcaaggtgtaagaccatagcttccatcgctctttacgttatgtaatatatttgtagtatgctaatttgattcaccataatccttaccattcatactattatgcttgtttttctctcttcagtaatcgtcgaaaatggttcattgttcatagctcaagccaacttaattttaacgcaaaaatgtagcagtacttaaagtttcatctgtaatttatcaatggataagtgagttagaaatagtatttatcat

SEQ ID NO: 6920 - DNA, 5413 bp, Zea Mays
gtggtgcacggttctgcctttgttccgcgcccctgcgtccggaaatctcgccgcgcccctgcgtccggaaatctcgccgcgcccctacgcaatcacctcctcctctcccctcactacgccgccacctcctcctctccccctcactgcgtcgccctcctctcccactcactgcgtcgtcccctggatcctcgccccagcctctccaaccgcctccgcgctgtcccctggatctcgcgtcgcgcgtctgcagcacgcccgccacacacgccgcgattggagattggtggaaagcggtccgcggcttcaactccgacatctccggcgagctcgagcgcctcgctgcaacgacgggggcgacgctcagatccgacgtgccggacgcggccgccgtggatctgaacgacctcgagtccatggatctgtcggcggacgctgctccgctggagcacatggagccgttcgtgctggcatgcgcgcgggtgctgggcccgacgccgggccggacgcgtggcgtcgccgacggccgggtcgtcttctgggacggcaagcggtgggtcccattcgcgacggcctctccgcgctggacgcaggagctctgcggcgggcccaaggcctcgccgctggagtatctccccacgcccggcgatggcgccctgcacctcacgcccgtgctccgcccccacacccagcaggcaggcatggatctcgcagggcagggatctcgcggatcacgccgtgcggggatctcgcggatcacgccgggcggggatctcggccaagcctgatcagaagtttggggccctatcaaagcgattcgcagaagtggaggctgggggatcgaagcggaggtggtggagatgacggaggcgctgaagtccgtctggaatccggtgacacagaaaaagatcagagtttctccttctacttcgtcgggtgaagtcccggtggtggacaacacctcgacgctgatccctctggaagctgcggcaggcattgctggtgccgatgcaacccacatttggcattcccactccaatcgaagggtttttggtgtcgctgaacaggacactaggcttctgctctgcttactaatccattggtttcaagatgacagaagccgtcatcaaactgaatacttcttctaactgaatacttcttcccagctgacagatcagatcaaacttgacgtgtgttaggtatcagagaaaaaaaccaaggcatggtgcacttctaaagagcacatctgcagctgcccgctcgggctccgtttcgataagactagggacctgtacatcgccgacgcctacttcagcttgctcaaagttggccccgagggcaggctggagagttgctgtgaaaactctcaagtgagggaacatgatcatgtgcacgcaagatcctgatgactgttggcagaatcaagtcatagttaaataaacaggcccccacccgacggcgcgagcgaggcacgcggccctcccggcggggtggacgcggcccctggctgtgaggcgacgatggggctggaggctgcgatggcgctgggcgacccgccggcggactacgcatccatcgcgacggtggggctgttcgtggcattcatgtgcgtctgcatcgtcgtcgggcacctcctcgaggagaaccgctggatgaacgagtccatcaccatgctcttcatcggctttgggaccttgatgttgcaatgctgtatgttggggattgcaggggctgggaactagagcagtcatcctgttcgcgtcgagcgagaagcattcacgtgtgctggtgttcagtgaggacctcttatttatttacctgctgccgctgatcatattcaatgcagggttccaagtgaagaagaaacagttctttcgaaacttcattactattacactgtttggtgcagttggcaccttgatctcttttactgtaatatcccttggcgctctaggactaatatcaaggcttaatatcggcgcacttgaactgggagactatcttgcacttggggcaatattctcggccacagactcggtttgtaccttgcaggtgttaagccaagatgagacaccattcttgtacagcctcgtgtttggtgaaggtgttgtcaatgacacaacttctgttgtgttgttcaatgcaatccagaactttgatcatggaaatatcagcggtgccaaattactgaacttcattggcagtttcctttatctgttcggctccagcaccattcttggagtagcttctggacttcttagtgcttataccattaagaagttgtactttggcaggcattcaaccgatcatgaagtttccattatgatgctaatggcttatttatcttacatgctagctgaaaaagttcgagggtcacaaccaagcatgcctttgcaacattgtcgtttatcttcgagacttttctgtttctttatgttggtatggatgcattggatatagagaagtggaagattgtcggtcaaacttataggcatactctctccctctttctctctcttcattgctcaactagaagatctttcttctggatctgtattttctatcatgtgcagcccggtaaagtctatcgctttgagcagcaccattttagccttggtgctggtttcaagagctgcttttgttttcccactatcctttctatcaaatttgaccaaaaaactccaaatggaaagatatcttttaggcagcaggtaagtctttaacttagcaacatcttaacttcttatgttctcttgaaacagttgttatattccttacatgatattggtcatttaggttattgtttggtgggcgggtctcatgagaggtgttgtgtctattgtgttggcttacaataaggttaatcttgtgtttggtctatctggtttgagctttggtctggaattatgttactgcttttgtttcctctatccattccaaaacataggacattttttgttgtcgtaagtcaaaaattctctaactttgacagagtttatagaaaaacaaaccaacatcaacagccttcatttcttaatcttatatagaagttgcagtattttagtctaatagatggacatgttttaaattttgaggcattgaaacaatttgcatcatgaaggcgttcgacttaatgtttccaaggttctgtggcagtgcgaggcattttgggaggtggtgagcgcctcgcttggcaccttcattttcgtgatgatgctgtccttcaggctgcagtgccacacaagttcgtttggtgtaggtgctgcttgatttttggcggtgcatgccgggtgttcgacaatgtttctgaggttttgtggcagtgcgaggcattttgggagggacatcatcatgcccaacttgaagtcgtccgtgaccacaacagcgagcgcggtggagtacatggatgaagtattgaaggcgttgtcgccaggtagtaccttcttcccactcatgacactacctcgtagacaacacaagtctagatgttgctggtgcagctgttcaacacgggcaaggtgctgttttccaatgtggtcgtcgacggcggcatgttcgtcttggccctcctcacctaccgcagcttcttcgcggcgccatcattctccctgtccgtctgattttctatcaggttgctcgatcgtcgtcaatataatccgtgtcaacaaattttaatcttggttcataagtaaagaacagaaaaggaaaacctagatgtctataattatacgtacatcaaatctaatgattttaggtacatattttctgtttgccattgcaaaatctaatcacgtgaattttatagttccaatcggggctatgtctatgtactcttatttttgtccagaacccttatgtaaggggaagtggaaagaaatggattggcacactgctggatggatcttcctcaatacgtttatcgagtaaataagcttgcattgttttggataattacatcatgtaaccgattttgacatttttttattaatcaccggcaacttacccaatttgctgtaataataaaataaaaggctacactatactacacactttcttgccatacattaaatctgacggtcattttttttattcctgacgacgcccgcagccgccgccgccgacgacggaggagcagcacctctcgtctgtccaccgctgaccgctcgtttgtcagcctagcaccggggtgcatgaacgcccagtatatgctacagcaccgccgcccctggccctgccgcctgcgccggtcgttgccctgtgcactccgcgggcctcgggaatggccaaccaggacatttatcggtttgcccaccctctcctctcttctcttctctcccgcccgctctccctctctcccttctctccggcttccgattgggtattgtttattggcttctggctttaattaattactgtatttgcatgttcaggtatgttgttcatccatctcgtatgatgaagtgttttatgctcttttccaattattgttgcaagtagcaaaattagaacatgtccttatgtttagactatgaaagaaaacacttatttcaatttgtaggtgtatttttctgtttcagttggcatatcatcatgaggatgtgaattccacaggaaggcccatgtgatcttattgctcccttagatcttccacattttttacagtcttattccttgccgaggggagtcctgctccagtagtggtctcagaaggggcaaataccatggatgttggcaggcctgtgcttgtgcagaatgcaccaaggacaagactggatgcagggacatgggggacgatggggattggattggggtactgtattgcagctgcagtagctgaacctgaatgactcgtggttgctgtggagggcgattctggatttggcttcggtgcaatggaggttgaggtgaacaggggcttcaacagtgatgctgttttagcaatggagacgatccattccctgtcagcttcaaaatcaagttacccaatggctgatctcacccaactcttcatgacagctactcaagaagggaaaagatcagaatcgcaaggccagattcttagggtggaatgctatagcttaatgccctaatctttatatgcctcttcttatatctgcacttccatgggcaccgggcgacactaaattcacaagataccccctccacctcaaggtgtaagaccatagcttccatcgctctttacgttatgtaatatatttgtagtatgctaatttgattcaccataatccttaccattcatactattatgcttgtttttctctcttcagtaatcgtcgaaaatggttcattgttcatagctcaagccaacttaattttaacgcaaaaatgtagcagtacttaaagtttcatctgtaatttatcaatggataagtgagttagaaatagtatttatcat

SEQ ID NO: 6921 - DNA, 4952 bp, Zea Mays
gtggtgcacggttctgcctttgttccgcgcccctgcgtccggaaatctcgccgcgcccctgcgtccggaaatctcgccgcgcccctacgcaatcacctcctcctctcccctcactacgccgccacctcctcctctccccctcactgcgtcgccctcctctcccactcactgcgtcgtcccctggatcctcgccccagcctctccaaccgcctccgcgctgtcccctggatctcgcgtcgcgcgtctgcagcacgcccgccacacacgccgcgattggagattggtggaaagcggtccgcggcttcaactccgacatctccggcgagctcgagcgcctcgctgcaacgacgggggcgacgctcagatccgacgtgccggacgcggccgccgtggatctgaacgacctcgagtccatggatctgtcggcggacgctgctccgctggagcacatggagccgttcgtgctggcatgcgcgcgggtgctgggcccgacgccgggccggacgcgtggcgtcgccgacggccgggtcgtcttctgggacggcaagcggtgggtcccattcgcgacggcctctccgcgctggacgcaggagctctgcggcgggcccaaggcctcgccgctggagtatctccccacgcccggcgatggcgccctgcacctcacgcccgtgctccgcccccacacccagcaggcaggcatggatctcgcagggcagggatctcgcggatcacgccgtgcggggatctcgcggatcacgccgggcggggatctcggccaagcctgatcagaagtttggggccctatcaaagcgattcgcagaagtggaggctgggggatcgaagcggaggtggtggagatgacggaggcgctgaagtccgtctggaatccggtgacacagaaaaagatcagagtttctccttctacttcgtcgggtgaagtcccggtggtggacaacacctcgacgctgatccctctggaagctgcggcaggcattgctggtgccgatgcaacccacatttggcattcccactccaatcgaagggtttttggtgtcgctgaacaggacactaggcttctgctctgcttactaatccattggtttcaagatgacagaagccgtcatcaaactgaatacttcttctaactgaatacttcttcccagctgacagatcagatcaaacttgacgtgtgttaggtatcagagaaaaaaaccaaggcatggtgcacttctaaagagcacatctgcagctgcccgctcgggctccgtttcgataagactagggacctgtacatcgccgacgcctacttcagcttgctcaaagttggccccgagggcaggctggagagttgctgtgaaaactctcaagtgagggaacatgatcatgtgcacgcaagatcctgatgactgttggcagaatcaagtcatagttaaataaacaggcccccacccgacggcgcgagcgaggcacgcggccctcccggcggggtggacgcggcccctggctgtgaggcgacgatggggctggaggctgcgatggcgctgggcgacccgccggcggactacgcatccatcgcgacggtggggctgttcgtggcattcatgtgcgtctgcatcgtcgtcgggcacctcctcgaggagaaccgctggatgaacgagtccatcaccatgctcttcatcgggctgggaactagagcagtcatcctgttcgcgtcgagcgagaagcattcacgtgtgctggtgttcagtgaggacctcttatttatttacctgctgccgctgatcatattcaatgcagggttccaagtgaagaagaaacagttctttcgaaacttcattactattacactgtttggtgcagttggcaccttgatctcttttactgtaatatcccttggcgctctaggactaatatcaaggcttaatatcggcgcacttgaactgggagactatcttgcacttggggcaatattctcggccacagactcggtttgtaccttgcaggtgttaagccaagatgagacaccattcttgtacagcctcgtgtttggtgaaggtgttgtcaatgacacaacttctgttgtgttgttcaatgcaatccagaactttgatcatggaaatatcagcggtgccaaattactgaacttcattggcagtttcctttatctgttcggctccagcaccattcttggagtagcttctggacttcttagtgcttataccattaagaagttgtactttggcaggcattcaaccgatcatgaagtttccattatgatgctaatggcttatttatcttacatgctagctgaaaaagttcgagggtcacaaccaagcatgcctttgcaacattgtcgtttatcttcgagacttttctgtttctttatgttggtatggatgcattggatatagagaagtggaagattgtcggtcaaacttataggcatactctctccctctttctctctcttcattgctcaactagaagatctttcttctggatctgtattttctatcatgtgcagcccggtaaagtctatcgctttgagcagcaccattttagccttggtgctggtttcaagagctgcttttgttttcccactatcctttctatcaaatttgaccaaaaaactccaaatggaaagatatcttttaggcagcaggtaagtctttaacttagcaacatcttaacttcttatgttctcttgaaacagttgttatattccttacatgatattggtcatttaggttattgtttggtgggcgggtctcatgagaggtgttgtgtctattgtgttggcttacaataaggttaatcttgtgtttggtctatctggtttgagctttggtctggaattatgttactgcttttgtttcctctatccattccaaaacataggacattttttgttgtcgtaagtcaaaaattctctaactttgacagagtttatagaaaaacaaaccaacatcaacagccttcatttcttaatcttatatagaagttgcagtattttagtctaatagatggacatgttttaaattttgaggcattgaaacaatttgcatcatgaaggcgttcgacttaatgtttccaaggttctgtggcagtgcgaggcattttgggaggtggtgagcgcctcgcttggcaccttcattttcgtgatgatgctgtccttcaggctgcagtgccacacaagttcgtttggtgtaggtgctgcttgatttttggcggtgcatgccgggtgttcgacaatgtttctgaggttttgtggcagtgcgaggcattttgggagggacatcatcatgcccaacttgaagtcgtccgtgaccacaacagcgagcgcggtggagtacatggatgaagtattgaaggcgttgtcgccaggtagtaccttcttcccactcatgacactacctcgtagacaacacaagtctagatgttgctggtgcagctgttcaacacgggcaaggtgctgttttccaatgtggtcgtcgacggcggcatgttcgtcttggccctcctcacctaccgcagcttcttcgcggcgccatcattctccctgtccgtctgattttctatcaggttgctcgatcgtcgtcaatataatccgtgtcaacaaattttaatcttggttcataagtaaagaacagaaaaggaaaacctagatgtctataattatacgtacatcaaatctaatgattttaggtacatattttctgtttgccattgcaaaatctaatcacgtgaattttatagttccaatcggggctatgtctatgtactcttatttttgtccagaacccttatgtaaggggaagtggaaagaaatggattggcacactgctggatggatcttcctcaatacgtttatcgagtaaataagcttgcattgttttggataattacatcatgtaaccgattttgacatttttttattaatcaccggcaacttacccaatttgctgtaataataaaataaaaggctacactatactacacactttcttgccatacattaaatctgacggtcattttttttattcctgacgacgcccgcagccgccgccgccgacgacggaggagcagcacctctcgtctgtccaccgctgaccgctcgtttgtcagcctagcaccggggtgcatgaacgcccagtatatgctacagcaccgccgcccctggccctgccgcctgcgccggtcgttgccctgtgcactccgcgggcctcgggaatggccaaccaggacatttatcgtcttattccttgccgaggggagtcctgctccagtagtggtctcagaaggggcaaataccatggatgttggcaggcctgtgcttgtgcagaatgcaccaaggacaagactggatgcagggacatgggggacgatggggattggattgggggcgattctggatttggcttcggtgcaatggaggttgaggtgaacaggggcttcaacagtgatgctgttttagcaatggagacgatccattccctgtcagcttcaaaatcaagttacccaatggctgatctcacccaactcttcatgacagctactcaagaagggaaaagatcagaatcgcaaggccagattcttagggtggaatgctatagcttaatgccctaatctttatatgcctcttcttatatctgcacttccatgggcaccgggcgacactaaattcacaagataccccctccacctcaaggtgtaagaccatagcttccatcgctctttacgttatgtaatatatttgtagtatgctaatttgattcaccataatccttaccattcatactattatgcttgtttttctctcttcagtaatcgtcgaaaatggttcattgttcatagctcaagccaacttaattttaacgcaaaaatgtagcagtacttaaagtttcatctgtaatttatcaatggataagtgagttagaaatagtatttatcat

SEQ ID NO: 6922 - DNA, 4895 bp, Zea Mays
gtggtgcacggttctgcctttgttccgcgcccctgcgtccggaaatctcgccgcgcccctgcgtccggaaatctcgccgcgcccctacgcaatcacctcctcctctcccctcactacgccgccacctcctcctctccccctcactgcgtcgccctcctctcccactcactgcgtcgtcccctggatcctcgccccagcctctccaaccgcctccgcgctgtcccctggatctcgcgtcgcgcgtctgcagcacgcccgccacacacgccgcgattggagattggtggaaagcggtccgcggcttcaactccgacatctccggcgagctcgagcgcctcgctgcaacgacgggggcgacgctcagatccgacgtgccggacgcggccgccgtggatctgaacgacctcgagtccatggatctgtcggcggacgctgctccgctggagcacatggagccgttcgtgctggcatgcgcgcgggtgctgggcccgacgccgggccggacgcgtggcgtcgccgacggccgggtcgtcttctgggacggcaagcggtgggtcccattcgcgacggcctctccgcgctggacgcaggagctctgcggcgggcccaaggcctcgccgctggagtatctccccacgcccggcgatggcgccctgcacctcacgcccgtgctccgcccccacacccagcaggcaggcatggatctcgcagggcagggatctcgcggatcacgccgtgcggggatctcgcggatcacgccgggcggggatctcggccaagcctgatcagaagtttggggccctatcaaagcgattcgcagaagtggaggctgggggatcgaagcggaggtggtggagatgacggaggcgctgaagtccgtctggaatccggtgacacagaaaaagatcagagtttctccttctacttcgtcgggtgaagtcccggtggtggacaacacctcgacgctgatccctctggaagctgcggcaggcattgctggtgccgatgcaacccacatttggcattcccactccaatcgaagggtttttggtgtcgctgaacaggacactaggcttctgctctgcttactaatccattggtttcaagatgacagaagccgtcatcaaactgaatacttcttctaactgaatacttcttcccagctgacagatcagatcaaacttgacgtgtgttaggtatcagagaaaaaaaccaaggcatggtgcacttctaaagagcacatctgcagctgcccgctcgggctccgtttcgataagactagggacctgtacatcgccgacgcctacttcagcttgctcaaagttggccccgagggcaggctggagagttgctgtgaaaactctcaagtgagggaacatgatcatgtgcacgcaagatcctgatgactgttggcagaatcaagtcatagttaaataaacaggcccccacccgacggcgcgagcgaggcacgcggccctcccggcggggtggacgcggcccctggctgtgaggcgacgatggggctggaggctgcgatggcgctgggcgacccgccggcggactacgcatccatcgcgacggtggggctgttcgtggcattcatgtgcgtctgcatcgtcgtcgggcacctcctcgaggagaaccgctggatgaacgagtccatcaccatgctcttcatcggctttgggaccttgatgttgcaatgctgtatgttggggattgcaggggctgggaactagagcagtcatcctgttcgcgtcgagcgagaagcattcacgtgtgctggtgttcagtgaggacctcttatttatttacctgctgccgctgatcatattcaatgcagggttccaagtgaagaagaaacagttctttcgaaacttcattactattacactgtttggtgcagttggcaccttgatctcttttactgtaatatcccttggcgctctaggactaatatcaaggcttaatatcggcgcacttgaactgggagactatcttgcacttggggcaatattctcggccacagactcggtttgtaccttgcaggtgttaagccaagatgagacaccattcttgtacagcctcgtgtttggtgaaggtgttgtcaatgacacaacttctgttgtgttgttcaatgcaatccagaactttgatcatggaaatatcagcggtgccaaattactgaacttcattggcagtttcctttatctgttcggctccagcaccattcttggagtagcttctggacttcttagtgcttataccattaagaagttgtactttggcaggcattcaaccgatcatgaagtttccattatgatgctaatggcttatttatcttacatgctagctgaattgctcgatttgagtggcattctcactgtgtttttctgtggtatcgtaatgtcacactatacttggcaaaatgtaacagaaagttcgagggtcacaaccaagcatgcctttgcaacattgtcgtttatcttcgagacttttctgtttctttatgttggtatggatgcattggatatagagaagtggaagattgtcggtcaaacttatagcccggtaaagtctatcgctttgagcagcaccattttagccttggtgctggtttcaagagctgcttttgttttcccactatcctttctatcaaatttgaccaaaaaactccaaatggaaagatatcttttaggcagcaggtaagtctttaacttagcaacatcttaacttcttatgttctcttgaaacagttgttatattccttacatgatattggtcatttaggttattgtttggtgggcgggtctcatgagaggtgttgtgtctattgtgttggcttacaataaggttaatcttgtgtttggtctatctggtttgagctttggtctggaattatgttactgcttttgtttcctctatccattccaaaacataggacattttttgttgtcgtaagtcaaaaattctctaactttgacagagtttatagaaaaacaaaccaacatcaacagccttcatttcttaatcttatatagaagttgcagtattttagtctaatagatggacatgttttaaattttgaggcattgaaacaatttgcatcatgaaggcgttcgacttaatgtttccaaggttctgtggcagtgcgaggcattttgggaggtggtgagcgcctcgcttggcaccttcattttcgtgatgatgctgtccttcaggctgcagtgccacacaagttcgtttggtgtaggtgctgcttgatttttggcggtgcatgccgggtgttcgacaatgtttctgaggttttgtggcagtgcgaggcattttgggagggacatcatcatgcccaacttgaagtcgtccgtgaccacaacagcgagcgcggtggagtacatggatgaagtattgaaggcgttgtcgccaggtagtaccttcttcccactcatgacactacctcgtagacaacacaagtctagatgttgctggtgcagctgttcaacacgggcaaggtgctgttttccaatgtggtcgtcgacggcggcatgttcgtcttggccctcctcacctaccgcagcttcttcgcggcgccatcattctccctgtccgtctgattttctatcaggttgctcgatcgtcgtcaatataatccgtgtcaacaaattttaatcttggttcataagtaaagaacagaaaaggaaaacctagatgtctataattatacgtacatcaaatctaatgattttaggtacatattttctgtttgccattgcaaaatctaatcacgtgaattttatagttccaatcggggctatgtctatgtactcttatttttgtccagaacccttatgtaaggggaagtggaaagaaatggattggcacactgctggatggatcttcctcaatacgtttatcgaccgccgccgccgacgacggaggagcagcacctctcgtctgtccaccgctgaccgctcgtttgtcagcctagcaccggggtgcatgaacgcccagtatatgctacagcaccgccgcccctggccctgccgcctgcgccggtcgttgccctgtgcactccgcgggcctcgggaatggccaaccaggacatttatcgttggcatatcatcatgaggatgtgaattccacaggaaggcccatgtgatcttattgctcccttagatcttccacattttttacagtcttattccttgccgaggggagtcctgctccagtagtggtctcagaaggggcaaataccatggatgttggcaggcctgtgcttgtgcagaatgcaccaaggacaagactggatgcagggacatgggggacgatggggattggattgggggcgattctggatttggcttcggtgcaatggaggttgaggtgaacaggggcttcaacagtgatgctgttttagcaatggagacgatccattccctgtcagcttcaaaatcaagttacccaatggctgatctcacccaactcttcatgacagctactcaagaagggaaaagatcagaatcgcaaggccagattcttagggtggaatgctatagcttaatgccctaatctttatatgcctcttcttatatctgcacttccatgggcaccgggcgacactaaattcacaagataccccctccacctcaaggtgtaagaccatagcttccatcgctctttacgttatgtaatatatttgtagtatgctaatttgattcaccataatccttaccattcatactattatgcttgtttttctctcttcagtaatcgtcgaaaatggttcattgttcatagctcaagccaacttaattttaacgcaaaaatgtagcagtacttaaagtttcatctgtaatttatcaatggataagtgagttagaaatagtatttatcat

SEQ ID NO: 6923 - DNA, 3436 bp, Zea Mays
atgagcccggcacatttaagcaattacgggccggaccgtgggccgaaggctagactcatggatcggtccgatacaacccaaaattcaaacaatacggatcttttcagacttgggccggaccggacgcccaaatatacacctatatcgacgaccgatcaacccaccaccgcaccgcaccggcagcacgaccacccggttgcctccggaccccgggcgaaacggtctcgtactcgtcctggtcgtccatcggagtatcggaccatcgccctacggccctaccctttcccagccaagcacactgcacatcgccacccaccagcaccccagtgtatacgtcggctgtgtcgcatgcctcgctcactcgtcgtcggcgacctcgccgtaccggagatggcgcatccgtacatgaagaaggacgacgacgacgaatcgagtattcaccattctttgggatcgagaaggggtctgttctgcaggaggcacgagctttccatgatccacagcttgatgtgagacgatgttcgcaagtcatcatcaagctattatatttacttaatcaaggagagacattcaccaaggttgaggccacggaagtcttctttgcagtaacaaagttattccagtctagtgatgctggtcttaggaggctagtgtacttaatgatcaaagaactttctccatcgtcagatgaggtcatcatagtcacaagctcattgatgaaggacatgaatagcaagacagatatgtaccgtgccaatgctattagagttctttgtagaataattgatggtaccctactaactcaaattgagagatatttgaagcaagctattgttgacaagaacccagtggttgctagtgcttctcttgttagtggcatccacctggcccaggcaaacccagaaattgtgaaaagatggagcaacgaagttcaggaagctgtgcaatcaagagctccacttgtccagtttcatggccttgctcttcttcaccagattagacagaatgatcgtttagctgtaagcaaactagtttcaagtttgacaaggggatctgtccgttctcctcttgcacaatgtcttctgattcgttacacaagccaggttatgtgtgagtcaagcatgaacactcaaaatggtgaccgtccattttttgattttctggaatcatccctcagacataaagcagaaatggtggctttggaagctgcacggaagataacagagatggatgttacaagccgtgaattggcaccagcaattactttgttacagttatacttgagttcatccaagcctgtgcttcgatttgctgctgtccggactctcaataaggttgctaggacacgacctctggcggtgacaaactgcaatgtggacttggagagtttgttgtcagaccagaacaggagtatagcgaccctggcaattactactcttcttaaaactggcaatgaatcaagtgtggatcgtctcattaaacaaattacccttttcatgtctgacatagcagatgaattcaagatagttgttgttgaagctatacggtctttgtgcctgaagttcccactaaaatatcgctcaatgttgaattttttgagcaacagcttgagggaagaagggggctttgagtataaaaaagccatagtggattccatagttactttggtcagtgaaataccagatgccaaagaaattggcctgcttcatctttgtgaattcatcgaagactgtgaattcacatatctttctagtcagattttgcactttttgggaaatgaaggaccaaggacatcagatccaagcaggtacattcgctacatatacaaccgtgtgatattggaaaatgccactgttcgtgctagtgctgtcagcacgctggcaaagtttggtgccctggttgatacgctcaagcctcagatctttgttctcttgcaacgatgcctgtttgatactgaagatgaggttcgtgatcgtgctacactctatctccaaacccttagcggtgaagttgccattggtaatgatgagaaggatgtgaaagacttcctatttggatcttttgatgtgccattagccaacctggaagcaagcctaagaacttatgaaccttcagaggagccatttgacatatctttggtgtcaagagaagtcaggtcgctaccacctaaagagaaggcagcccctggcaagaggccacctgctggtgctgccgccgccgccgcccctgtttcaactgttgatgcttatcagaaaatgctttcgttcattcccgagttctctgggtttggaaggctcttcaagtcctctgaacccatggagctgacagaggcagaaactgaatatgctgttagtgtggttaaacacatttatgacggctacattgtattgcagtacaattgtgcaaacactatagaagaacaactgctagaagatgtcactgtttgcgttgatgcctcagatgctgaggagttttcagagatttgttcaaagcctcttgcaagcttgccgtataattcacctgggcaagtttttgttgcttttgaaaagccagagcgtgtacctgttgttgggaagtttttaaatttgttgaagtttacagttaaagaggttgacacaactacgggggaagctgatgaggatggtgtggaggatgaataccagttagaggactttgaaattgtttcagctgattatatgctgagggttgttgtctccaacttcaggaacgcctgggaaaatatggacccagatagtgagcgtgtcgatgagtatggactcggggttagagaaagtttggctgaggctgtcaatgctgtcattaatatccttggaatgcagccgtgtgagggcactgaggttgtaccgaaaaatgcaagatcgcacacctgccttctatctggtgtatttattggcaacatgaaggtcctagttaggttgtcatttggactgagcgggcccaacgaagtggcaatgaaattagctgtgagatcagatgaccctgaagtcagtgataagattcatgagattgtcgccagcggataaagtgcaagacatacaaatcttctgccaaaagtgtagagcgggtagatagcctttatacttcgatgcttacagccttgtctcttcgtggacatctcagattatcagttagcatattctataaatttttttgctgtacaaataacatcaggtattatctgatgtttattcaagtactgatttcatggaatattgggaattggaatgtactgtagcctccgtggtttccttttgatttgtgctgaactgtatcccacctttcttgagaggaaaactcgtggaatctatctaccttatttccgatccgttacgataccttattttcgacccgaccttatttttgacccgttacgataccttatttccgtcccgttacgaccggccgaaatagaatg

SEQ ID NO: 6924 - DNA, 5033 bp, Zea Mays
atgagcccggcacatttaagcaattacgggccggaccgtgggccgaaggctagactcatggatcggtccgatacaacccaaaattcaaacaatacggatcttttcagacttgggccggaccggacgcccaaatatacacctatatcgacgaccgatcaacccaccaccgcaccgcaccggcagcacgaccacccggttgcctccggaccccgggcgaaacggtctcgtactcgtcctggtcgtccatcggagtatcggaccatcgccctacggccctaccctttcccagccaagcacactgcacatcgccacccaccagcaccccagtgtatacgtcggctgtgtcgcatgcctcgctcactcgtcgtcggcgacctcgccgtaccggagatggcgcatccgtacatgaagaaggacgacgacgacgaatcgagtattcaccattctttgggatcgagaaggggtctgttctgcaggaggcacgagctttccatgatccacagcttgatgtgagacgatgttcgcaagtcatcatcaagctattatatttacttaatcaaggagagacattcaccaaggttgaggccacggaagtcttctttgcagtaacaaagttattccagtctagtgatgctggtcttaggaggctagtgtacttaatgatcaaagaactttctccatcgtcagatgaggtcatcatagtcacaagctcattgatgaaggacatgaatagcaagacagatatgtaccgtgccaatgctattagagttctttgtagaataattgatggtaccctactaactcaaattgagagatatttgaagcaagctattgttgacaagaacccagtggttgctagtgcttctcttgttagtggcatccacctggcccaggcaaacccagaaattgtgaaaagatggagcaacgaagttcaggaagctgtgcaatcaagagctccacttgtccagtttcatggccttgctcttcttcaccaggtatacttgttccattgagccagccattggtttcctagatgctaaacccaccagacggtcagtcaccctttgattagcgtttagttggtgtggacaataaattatatggtttaaacagtttgcactgtagcagtaaatatgcatacaaacactatagttacatactaaatttttgaatgttactcgagacatgcacacagttgcacaatatatcatagacaattagacagacataatgacatagatagtagacttgcagttcttggttctcgcatagttaaatgataagctgttattacgtaataacattacatttgtgtcggggatcagatacccgggccccagggggccacaagtcagaagaggagtagggagggacctgcctgggcgggaccgccttcggaagacccccgcgccctgagcccaggggtcgggcgaggtgaagcacggtcggagggccagaacgaatcgacagggaaccactcaagtggattccgcgtccggtcataagactgctctcgccatcaatgctccgcacaccacattaattgtgcctggcactgagccgcggcgttgagccgatccgcctaccactcatgacctacgagtccgaggcctgagccccactcataacctatgggccctaggcctgagcccccgactccctacggagcacacaagacgatggaagaaagctagaaggacagactaaaggttcggcgcgagaagaggcgaacaggaggagtaatgatggcgttcagactcccgtcgcaagcacgcttccccaacatatttaagatgagcacgagtcatatgaggacaaatatcaacgaggattttaccaagagaaaaccattccattttaccagcgtagcagttccttccgattgaagatatctgtaaccgcccctgcggcccccttcttgatctataaaaggaaggtcggcccgacgaagaagagagaccgaatccgagaagcacacttgagacatagacccttcagcacacacacatagagacttggcaccccttcctctctagcccacttgtaacccctactgtgagcaacaaggtgtcggtagcgcgagccatcgaagacgggaagtagggtcgttttgttcaaaccagtataaatcttgcgtccattgagcacatcatccggagccaaaacgtgcatacacaaatttactcgttggtgctggttcggaacactgacaatcattgttattaaaacgtcgcttaaacgtcgtttaaacgacaaaatgtgattaagagttgaaacatccgaacgttttaccaaaatggagtagaacgtctgtttcacgcatttaaacgttggttaaatgtcctctgagcgttttaaggcgttttacttgcgtttaggacgttctactcgtcgtgggcttttcctttcctgggccaaaagatggaaaaaccctaagttcctttggttccattctactgtatatgtaaaattatatgatagtttcagtaaacggtcaggttttatagtgtgcatttggataatgtgtactatgctctagtttctcttcgctttttatacttaatcttcatttgatttctccccaacttgcagattagacagaatgatcgtttagctgtaagcaaactagtttcaagtttgacaaggggatctgtccgttctcctcttgcacaatgtcttctgattcgttacacaagccaggttatgtgtgagtcaagcatgaacactcaaaatggtgaccgtccattttttgattttctggaatcatccctcagacataaagcagaaatggtggctttggaagctgcacggaagataacagagatggatgttacaagccgtgaattggcaccagcaattactttgttacagttatacttgagttcatccaagcctgtgcttcgatttgctgctgtccggactctcaataaggttgctaggacacgacctctggcggtgacaaactgcaatgtggacttggagagtttgttgtcagaccagaacaggagtatagcgaccctggcaattactactcttcttaaaactggcaatgaatcaagtgtggatcgtctcattaaacaaattacccttttcatgtctgacatagcagatgaattcaagatagttgttgttgaagctatacggtctttgtgcctgaagttcccactaaaatatcgctcaatgttgaattttttgagcaacagcttgagggaagaagggggctttgagtataaaaaagccatagtggattccatagttactttggtcagtgaaataccagatgccaaagaaattggcctgcttcatctttgtgaattcatcgaagactgtgaattcacatatctttctagtcagattttgcactttttgggaaatgaaggaccaaggacatcagatccaagcaggtacattcgctacatatacaaccgtgtgatattggaaaatgccactgttcgtgctagtgctgtcagcacgctggcaaagtttggtgccctggttgatacgctcaagcctcagatctttgttctcttgcaacgatgcctgtttgatactgaagatgaggttcgtgatcgtgctacactctatctccaaacccttagcggtgaagttgccattggtaatgatgagaaggatgtgaaagacttcctatttggatcttttgatgtgccattagccaacctggaagcaagcctaagaacttatgaaccttcagaggagccatttgacatatctttggtgtcaagagaagtcaggtcgctaccacctaaagagaaggcagcccctggcaagaggccacctgctggtgctgccgccgccgccgcccctgtttcaactgttgatgcttatcagaaaatgctttcgttcattcccgagttctctgggtttggaaggctcttcaagtcctctgaacccatggagctgacagaggcagaaactgaatatgctgttagtgtggttaaacacatttatgacggctacattgtattgcagtacaattgtgcaaacactatagaagaacaactgctagaagatgtcactgtttgcgttgatgcctcagatgctgaggagttttcagagatttgttcaaagcctcttgcaagcttgccgtataattcacctgggcaagtttttgttgcttttgaaaagccagagcgtgtacctgttgttgggaagtttttaaatttgttgaagtttacagttaaagaggttgacacaactacgggggaagctgatgaggatggtgtggaggatgaataccagttagaggactttgaaattgtttcagctgattatatgctgagggttgttgtctccaacttcaggaacgcctgggaaaatatggacccagatagtgagcgtgtcgatgagtatggactcggggttagagaaagtttggctgaggctgtcaatgctgtcattaatatccttggaatgcagccgtgtgagggcactgaggttgtaccgaaaaatgcaagatcgcacacctgccttctatctggtgtatttattggcaacatgaaggtcctagttaggttgtcatttggactgagcgggcccaacgaagtggcaatgaaattagctgtgagatcagatgaccctgaagtcagtgataagattcatgagattgtcgccagcggataaagtgcaagacatacaaatcttctgccaaaagtgtagagcgggtagatagcctttatacttcgatgcttacagccttgtctcttcgtggacatctcagattatcagttagcatattctataaatttttttgctgtacaaataacatcaggtattatctgatgtttattcaagtactgatttcatggaatattgggaattggaatgtactgtagcctccgtggtttccttttgatttgtgctgaactgtatcccacctttcttgagaggaaaactcgtggaatctatctaccttatttccgatccgttacgataccttattttcgacccgaccttatttttgacccgttacgataccttatttccgtcccgttacgaccggccgaaatagaatg

SEQ ID NO: 6925 - DNA, 3348 bp, Zea Mays
ccaggttgcctttggtgcaatctatgctcaggtaaagaagaaggcgtcgaggcggatctccaggagttctgggacttcaacgagttcgaggattaggctagcgaccacccccagtcagttgcctgtggttttgggtgtagatatatgcaagttggctattctctcctcatggcccacgtgggtagattggatggagaaagacggaccactgttcaaactgcctcagagcttttatgagaacttctctagtgttttctagagctgaaggcgcaaagatggaacacaagtgcttcagtgaaatttgatttctgcagctaacttaaatgcatcgatgttgtctctgcatttttcaaagctcacattagttattcagtgaacccagattattttttaacatcattaaaatcaaaaggattccactagaaacgttgcatgtgaaaatttcctgctttatttcgtgtctgcaaaggtacgtaccactgattccaccataaatcttctccacgtttggttttaggtactaatttttagtccctctaatttagtcctaaattatcaaacacaatgactaaaagagagattatctctattttagtcaatattcttgacaatttagggattaaaattaaggcttagaaaccgaacgccccctaactctgctgttgtttattatttgtaagaattattgatagtttgtagcaatttaagtgtattatttatgagaattattgacggtttctagcaatttcaagatgcaaattctgcttgcgaagctgactcgtgtgctctgtatttgtggatcttctgcactgtacacacatttgtcaccatgctagatggcactgatgatagtacggaaatcagttcataaagtgttgtcgttgtctcaaaggggaaaatagaacccaagagaagatggcagatgaacacattttgggacatgtctgtgacagaaaatctgtcaaccagcctagctccaatggccgacagcgtcccattaggtactgaggctaaaaatggaaaacaaatgccaaggaggggggagggcagcggctctcgtcctggaaatgtggcatggcggtgcggtggagcactggaggttgggcaatgtgacgctttgaagcctacttccctttcctccgtctctgtggtttggtttcaaccccttcgcttcttccgcagaagaacaaggagaaaagggaggggttcgtcacgaggaggaggaggaggaggaggtgcgtcgttccaatcgaaccccggcgcacaatctagaggccggggtggatcatcatcctcaccaagacagaactccatccccgttaaggtgttaaacattaatcatggccacaccgccagacggggcgcccgctggacctgatgacacgtcgccgccgccttcttccaactcgtcgacgccgcctccttccgactcatcgacgccgccacccaagtcctccggctcgggctcgccgtcgccatcgccacccgcaccgtcgttgtcgccgccaccaccggcgtcgccgcaggatagcacggcgccagcggccagaggctcgccggccgcgccgtcgagggactccccgtcaccaccggctccaaagcgcagcgacagtgactccgataatagtggcagcagcaagagcggaagcggaagcggaagcagaagcagaagcagcgggtcgacgcaggtggatgtcatcctggccggcgtggtgattggggtcctggcatttagcctgctgatgtgcatcgccgcgtgcgtgtgctgcgccaagaagaagaggaggaagaagcccccgcacatgaacatgccgtactacaccgacgagcacgggaacgtcttctacgcgaacagcatgcccaagtggcagagcagcgcgatggaccacggctggcacgcgccgtactcgcccgcaagcggggacatgagcggctcgcacgggccggggctgggccagatgccgccctcgccgggcatgccgtcgctgggcttctccaagagctcgttctcgtacgaggagctagccgcggcgacgggcggcttctcatcgacgaacctgctggggcagggcgggttcgggtacgtgtacaagggcgtgctcgcgggcagcggcaaggaggtggccgtgaagcagctcaaggccgggagcgggcagggcgagcgcgagttccaggccgaggtggagatcatcagccgagtccaccaccgccacctcgtctccctcgtaggctactgtatcgccggctcctcccagcgcctgcttgtctacgagttcgtgcccaacaacaccctcgagcaccacctccacgggaagggtgtgccggtgatggcctggccggcgaggcttgccatcgccctcggctccgccaagggcttggcttacctgcacgaagattgccaccccaggatcatccaccgtgacatcaaggcagccaacatccttctggacgagaatttcgaggctaaggtcgcggatttcggacttgccaagctgaccacagacaccaacacgcacgtctccacgcgtgtcatgggaactttcgggtatttggccccggagtacgcgtcgagcggcaagctcaccgacaagtcggacgtgttctccttcggcgtcatgctcctggagctcattaccggcaggagaccggttgatcccacgaactacatggaggacagcctggtcgactgggccaggcccctcttggcgcgcgcgctgtccgaagacaacttcgacgagctgctcgacccgcggctggagaacagggtcgaccggctggagctggagcggatgtgctcctctgccgcggcggccgtccgccactcagccaagcggcggcccaagatgaaacagatcgtccgtgctctggaaggggacgcgtcgctggacgacctgaacgagggggtgaagccagggcagagcatgatgttcagctccggatcggagtacgacggggccaactacgcggccaacatcagcaagttcaggaaggtggccttcgagagcagcgagttcagcaacgactacagcgggacaagcgagtacggcgccgactccggggaagcggcgacccagcggcagcaacatcgctgacctcctcgtccgagatgcgtgtgtggtgtacaatatttataccaaggggtcgatgtcgactgtcggatactatcagagatacccaaccctcgatcgtgacagctttagtacatgtaatgatgctcataaaatgtcatgtaacgtacgtatttgtgtgtgacatgttgctgcttgcttgactggcgaatttcgctgcttagttgtgcaaattttgctggcgggtgtccaaatgcgccgagggattaggaactttccg

SEQ ID NO: 6926 - DNA, 3598 bp, Zea Mays
agcgccgccgccgcctgcatgtgggacccacccgccaagccgcccctctcctgtttatcttctctgaatcgtctcccctgcctaagtcgcccacgacgcatgaggatcggcaacaacttccaccggccacccctattcaaacgcacttgtctacccccacttctttgtaccgcagccgttcctcctctcgcctcgcagcaacacgctcttgccgtcacgtggtgcctcggccttgtagccgtgtctaatctccgtcgagcagggaaccagcgctaagctcgccgcgatgtcgccttgccaagtcgccgtcgtccatcgcgatggagttctttatcgccgttcacattttgtcctcgccgtccgagcttcgcgttgaggttttgggtgtagatatatgcaagttggctattctctcctcatggcccacgtgggtagattggatggagaaagacggaccactgttcaaactgcctcagagcttttatgagaacttctctagtgttttctagagctgaaggcgcaaagatggaacacaagtgcttcagtgaaatttgatttctgcagctaacttaaatgcatcgatgttgtctctgcatttttcaaagctcacattagttattcagtgaacccagattattttttaacatcattaaaatcaaaaggattccactagaaacgttgcatgtgaaaatttcctgctttatttcgtgtctgcaaaggtacgtaccactgattccaccataaatcttctccacgtttggttttaggtactaatttttagtccctctaatttagtcctaaattatcaaacacaatgactaaaagagagattatctctattttagtcaatattcttgacaatttagggattaaaattaaggcttagaaaccgaacgccccctaactctgctgttgtttattatttgtaagaattattgatagtttgtagcaatttaagtgtattatttatgagaattattgacggtttctagcaatttcaagatgcaaattctgcttgcgaagctgactcgtgtgctctgtatttgtggatcttctgcactgtacacacatttgtcaccatgctagatggcactgatgatagtacggaaatcagttcataaagtgttgtcgttgtctcaaaggggaaaatagaacccaagagaagatggcagatgaacacattttgggacatgtctgtgacagaaaatctgtcaaccagcctagctccaatggccgacagcgtcccattaggtactgaggctaaaaatggaaaacaaatgccaaggaggggggagggcagcggctctcgtcctggaaatgtggcatggcggtgcggtggagcactggaggttgggcaatgtgacgctttgaagcctacttccctttcctccgtctctgtggtttggtttcaaccccttcgcttcttccgcagaagaacaaggagaaaagggaggggttcgtcacgaggaggaggaggaggaggaggtgcgtcgttccaatcgaaccccggcgcacaatctagaggccggggtggatcatcatcctcaccaagacagaactccatccccgttaaggtgttaaacattaatcatggccacaccgccagacggggcgcccgctggacctgatgacacgtcgccgccgccttcttccaactcgtcgacgccgcctccttccgactcatcgacgccgccacccaagtcctccggctcgggctcgccgtcgccatcgccacccgcaccgtcgttgtcgccgccaccaccggcgtcgccgcaggatagcacggcgccagcggccagaggctcgccggccgcgccgtcgagggactccccgtcaccaccggctccaaagcgcagcgacagtgactccgataatagtggcagcagcaagagcggaagcggaagcggaagcagaagcagaagcagcgggtcgacgcaggtggatgtcatcctggccggcgtggtgattggggtcctggcatttagcctgctgatgtgcatcgccgcgtgcgtgtgctgcgccaagaagaagaggaggaagaagcccccgcacatgaacatgccgtactacaccgacgagcacgggaacgtcttctacgcgaacagcatgcccaagtggcagagcagcgcgatggaccacggctggcacgcgccgtactcgcccgcaagcggggacatgagcggctcgcacgggccggggctgggccagatgccgccctcgccgggcatgccgtcgctgggcttctccaagagctcgttctcgtacgaggagctagccgcggcgacgggcggcttctcatcgacgaacctgctggggcagggcgggttcgggtacgtgtacaagggcgtgctcgcgggcagcggcaaggaggtggccgtgaagcagctcaaggccgggagcgggcagggcgagcgcgagttccaggccgaggtggagatcatcagccgagtccaccaccgccacctcgtctccctcgtaggctactgtatcgccggctcctcccagcgcctgcttgtctacgagttcgtgcccaacaacaccctcgagcaccacctccacgggaagggtgtgccggtgatggcctggccggcgaggcttgccatcgccctcggctccgccaagggcttggcttacctgcacgaagattgccaccccaggatcatccaccgtgacatcaaggcagccaacatccttctggacgagaatttcgaggctaaggtcgcggatttcggacttgccaagctgaccacagacaccaacacgcacgtctccacgcgtgtcatgggaactttcgggtatttggccccggagtacgcgtcgagcggcaagctcaccgacaagtcggacgtgttctccttcggcgtcatgctcctggagctcattaccggcaggagaccggttgatcccacgaactacatggaggacagcctggtcgactgggccaggcccctcttggcgcgcgcgctgtccgaagacaacttcgacgagctgctcgacccgcggctggagaacagggtcgaccggctggagctggagcggatgtgctcctctgccgcggcggccgtccgccactcagccaagcggcggcccaagatgaaacagatcgtccgtgctctggaaggggacgcgtcgctggacgacctgaacgagggggtgaagccagggcagagcatgatgttcagctccggatcggagtacgacggggccaactacgcggccaacatcagcaagttcaggaaggtggccttcgagagcagcgagttcagcaacgactacagcgggacaagcgagtacggcgccgactccggggaagcggcgacccagcggcagcaacatcgctgacctcctcgtccgagatgcgtgtgtggtgtacaatatttataccaaggggtcgatgtcgactgtcggatactatcagagatacccaaccctcgatcgtgacagctttagtacatgtaatgatgctcataaaatgtcatgtaacgtacgtatttgtgtgtgacatgttgctgcttgcttgactggcgaatttcgctgcttagttgtgcaaattttgctggcgggtgtccaaatgcgccgagggattaggaactttccg

SEQ ID NO: 6927 - DNA, 3710 bp, Zea Mays
agcgccgccgccgcctgcatgtgggacccacccgccaagccgcccctctcctgtttatcttctctgaatcgtctcccctgcctaagtcgcccacgacgcatgaggatcggcaacaacttccaccggccacccctattcaaacgcacttgtctacccccacttctttgtaccgcagccgttcctcctctcgcctcgcagcaacacgctcttgccgtcacgtggtgcctcggccttgtagccgtgtctaatctccgtcgagcagggaaccagcgctaagctcgccgcgatgtcgccttgccaagtcgccgtcgtccatcgcgatggagttctttatcgccgttcacattttgtcctcgccgtccgagcttcgcgttgagatcgtgagctgttcccgagcttcgaggaatcgatgatcaaacttcgacgatcaagtggacatgttcttcgagttctacaaagttaaagatcctgagcatctgtttggtgaaggttttgggtgtagatatatgcaagttggctattctctcctcatggcccacgtgggtagattggatggagaaagacggaccactgttcaaactgcctcagagcttttatgagaacttctctagtgttttctagagctgaaggcgcaaagatggaacacaagtgcttcagtgaaatttgatttctgcagctaacttaaatgcatcgatgttgtctctgcatttttcaaagctcacattagttattcagtgaacccagattattttttaacatcattaaaatcaaaaggattccactagaaacgttgcatgtgaaaatttcctgctttatttcgtgtctgcaaaggtacgtaccactgattccaccataaatcttctccacgtttggttttaggtactaatttttagtccctctaatttagtcctaaattatcaaacacaatgactaaaagagagattatctctattttagtcaatattcttgacaatttagggattaaaattaaggcttagaaaccgaacgccccctaactctgctgttgtttattatttgtaagaattattgatagtttgtagcaatttaagtgtattatttatgagaattattgacggtttctagcaatttcaagatgcaaattctgcttgcgaagctgactcgtgtgctctgtatttgtggatcttctgcactgtacacacatttgtcaccatgctagatggcactgatgatagtacggaaatcagttcataaagtgttgtcgttgtctcaaaggggaaaatagaacccaagagaagatggcagatgaacacattttgggacatgtctgtgacagaaaatctgtcaaccagcctagctccaatggccgacagcgtcccattaggtactgaggctaaaaatggaaaacaaatgccaaggaggggggagggcagcggctctcgtcctggaaatgtggcatggcggtgcggtggagcactggaggttgggcaatgtgacgctttgaagcctacttccctttcctccgtctctgtggtttggtttcaaccccttcgcttcttccgcagaagaacaaggagaaaagggaggggttcgtcacgaggaggaggaggaggaggaggtgcgtcgttccaatcgaaccccggcgcacaatctagaggccggggtggatcatcatcctcaccaagacagaactccatccccgttaaggtgttaaacattaatcatggccacaccgccagacggggcgcccgctggacctgatgacacgtcgccgccgccttcttccaactcgtcgacgccgcctccttccgactcatcgacgccgccacccaagtcctccggctcgggctcgccgtcgccatcgccacccgcaccgtcgttgtcgccgccaccaccggcgtcgccgcaggatagcacggcgccagcggccagaggctcgccggccgcgccgtcgagggactccccgtcaccaccggctccaaagcgcagcgacagtgactccgataatagtggcagcagcaagagcggaagcggaagcggaagcagaagcagaagcagcgggtcgacgcaggtggatgtcatcctggccggcgtggtgattggggtcctggcatttagcctgctgatgtgcatcgccgcgtgcgtgtgctgcgccaagaagaagaggaggaagaagcccccgcacatgaacatgccgtactacaccgacgagcacgggaacgtcttctacgcgaacagcatgcccaagtggcagagcagcgcgatggaccacggctggcacgcgccgtactcgcccgcaagcggggacatgagcggctcgcacgggccggggctgggccagatgccgccctcgccgggcatgccgtcgctgggcttctccaagagctcgttctcgtacgaggagctagccgcggcgacgggcggcttctcatcgacgaacctgctggggcagggcgggttcgggtacgtgtacaagggcgtgctcgcgggcagcggcaaggaggtggccgtgaagcagctcaaggccgggagcgggcagggcgagcgcgagttccaggccgaggtggagatcatcagccgagtccaccaccgccacctcgtctccctcgtaggctactgtatcgccggctcctcccagcgcctgcttgtctacgagttcgtgcccaacaacaccctcgagcaccacctccacgggaagggtgtgccggtgatggcctggccggcgaggcttgccatcgccctcggctccgccaagggcttggcttacctgcacgaagattgccaccccaggatcatccaccgtgacatcaaggcagccaacatccttctggacgagaatttcgaggctaaggtcgcggatttcggacttgccaagctgaccacagacaccaacacgcacgtctccacgcgtgtcatgggaactttcgggtatttggccccggagtacgcgtcgagcggcaagctcaccgacaagtcggacgtgttctccttcggcgtcatgctcctggagctcattaccggcaggagaccggttgatcccacgaactacatggaggacagcctggtcgactgggccaggcccctcttggcgcgcgcgctgtccgaagacaacttcgacgagctgctcgacccgcggctggagaacagggtcgaccggctggagctggagcggatgtgctcctctgccgcggcggccgtccgccactcagccaagcggcggcccaagatgaaacagatcgtccgtgctctggaaggggacgcgtcgctggacgacctgaacgagggggtgaagccagggcagagcatgatgttcagctccggatcggagtacgacggggccaactacgcggccaacatcagcaagttcaggaaggtggccttcgagagcagcgagttcagcaacgactacagcgggacaagcgagtacggcgccgactccggggaagcggcgacccagcggcagcaacatcgctgacctcctcgtccgagatgcgtgtgtggtgtacaatatttataccaaggggtcgatgtcgactgtcggatactatcagagatacccaaccctcgatcgtgacagctttagtacatgtaatgatgctcataaaatgtcatgtaacgtacgtatttgtgtgtgacatgttgctgcttgcttgactggcgaatttcgctgcttagttgtgcaaattttgctggcgggtgtccaaatgcgccgagggattaggaactttccg

SEQ ID NO: 6928 - DNA, 2554 bp, Zea Mays
cctactctctcgtatatcatcattccggactcgatctctccttgtgtggccacatatccagcgcaacatacgtatctctgccacacttagttggaagaatttatttggaattggcaccttgaatatttgttggattcttcgtctgctatcttactgcaaggttgagaaggccttcagggaaggtacggcacagcaaaatgcacatagtatttttgtgtcccttgctttaaaacttttggaacagcgagttcatgtcgcatgcaaagaaattattacgttggaaaaacagaacaaacttcttgaggaagaggagaaagaaaagcgtgaagaacaagagcgcaggttgaagaggagaacaagagagagagaaaagaagaacaggagaaaagaaaggctgaaagaaaaggaaaataataaagggaaaaaactagttgaatcaaagtcacgaaatgatattctatcttcagctccaagcaactccacaacatctatcaatgattattcgacaaatactctggactcaagagattcagttaaggaagatgaagatagtgctgaagttgtgaatctgtgctctcctgacagctgtatgaatcaatcttcatgtacaaaaattaatggagaaaacagtgtccacttcaatgcagtaacagaattttctccaatggacagtagtgacctttgtacatcagatcaatccaagtcttcgagacggggtccaaggtcaagggaggattttcctcaagatcagtcctgttggtatgatgactgcggagatgagtctggaagaattggtgaattacaatggaagtcaagggaaaggacaagaagtattaatagaagtcgcaacgcagcatccacctcaaacaacaggacaagagagaggcaatcatacaattcttgcagctgcggccatctggaagactatggagtcatggacagctgtttcttgccaacagctagatctggcaaagagacgaagatagcaagaaaatcaggagttgagaaacctagggtgcagtaccacagatgctatacattggatagctttatagtgtcaaaaggaaaccgtgctggttctacacagaaaaatgctatcccaaagcaaatatgggagcctatggatgctcgaaggaagactaaattacacaatacagttcatgattcaggttcagttaacgatgttgattcactgaaacatgtggtttttgataacagtggatctcaaaattttggagtaggatgtgaatcacagcctcaggcttctgaaagttccagggatgaatgtaattcagatcaaccatgtgcaaatggtgggagaaatcaaactatttcatgtgctagtagtactcttatggtgaaccaacaaaactgttgcgcaggaaatgatgaaggctccaggcatgatgaagagctgatgatgaactctgctggctctgatagctcctcgtcatgcatgagcgagggagatagggaaagcagctccagcagtacaacctcttcaagcgctcaaaatccggaatcatcttctgagtctgaggaatcacccgagagaataaatagcacagtaggtacacaatcatcaagagctgctgcttcacggtctttgcttgaagcatgtgcaggtaatggtttcagagaataccaacccaaggcaaccggcctagctcacaatgacatgtttgggtacaatgtatcccctgtccaggaccagctgctgcattaccaaagcatgtatccacctcaacatcggccaataacaatggggtttcatgacggttcttgggctgcaccaacgaatggaaactttcagtatgctcgaccatcccacttatattctagtccactcgtattcggaatacctgggaaccattttattgattatccttacatggctcccgccttcagccatatacctccagagcctattcacaaggccgcatccagctttagagccatgcctctgtcactgccttttcaaaacggacatcggcaggctgctagtcttactcagagagacatgaatctagaaaggcgccctgcaaagttgactaagccgacaggcaaggatcccccagaaaacaagaacaagtcgggcctaaaggatctcccagaagacaagagcaaatcatgggatgcggatgcatccttctcgttgttccaattcaacttgccaatagcttcgcctgtaacaccatcatcaaaagataagagcggagagctggccgcaaggacgccactggctcaggtgcaagctcagctttgctcgagggaacaagcagatgtcaaggagtatagcctgttctcctcgaaagataatggcatattttcgtttatgtagataaaagaaaaactgtgacaaacctgctacccttcgtttctggtgtctcttgctgcacttcgtgaatgctttgtgttctccggagcaaaataaaggatgttgccattttcttcatgctgtctgtatcttcgttttacatttgtgtctgttaccgtgtgtgctaaaagctagtaatctgcaatgctgctgagttgaattttttttcacgtagaa

SEQ ID NO: 6929 - DNA, 3183 bp, Zea Mays
cttctttgccgcttccagattttcttgctattggtgctggctggttggtgtttttgcagctgcagccagcagtgctgcagcagcaatctcaactaaccagagcaaagaatgcttgaatagtagtatatgtcattacacatagggtttgatagcaagagattttgccgagagtgtcgaaggaacgttatccgcgaattcaaggagctgaaggaactaaagcgcatgcgaagggaacctcactgcaccagttggttttgtgttgcagatactgcgtttcagtgtgaggtgtttgaggatgctgtcatagttgattggcgccagtgtttatcagagccagatgaatcttatgaccactttgaatgggctattggaacagatgaaggagaatccgatatttttggctttgaaaatgttggaatgaatgcacaagtccacagaaatggaatcgatcttgatcagtttgaggactacttcataacactgcgagcttggaggcttgatggccagttcacagagctgtgtgtaaaagcacatgcattgaagggtcaatcatgtgtccaccacaggctagtggttggtgatggctttgtgactatgacaaagggtgaaagtattagaagtttctttgagcatgctgaagaggccgaggaagaggatgaagatgatgacatggacagggatggaaatgattttgatggtgatggtgcccatccacagaagcatgccaagagccctgaactggcaagagaatttcttttggatgctgctgctgtgatattcaaagaacaggttgagaaggccttcagggaaggtacggcacagcaaaatgcacatagtatttttgtgtcccttgctttaaaacttttggaacagcgagttcatgtcgcatgcaaagaaattattacgttggaaaaacagaacaaacttcttgaggaagaggagaaagaaaagcgtgaagaacaagagcgcaggttgaagaggagaacaagagagagagaaaagaagaacaggagaaaagaaaggctgaaagaaaaggaaaataataaagggaaaaaactagttgaatcaaagtcacgaaatgatattctatcttcagctccaagcaactccacaacatctatcaatgattattcgacaaatactctggactcaagagattcagttaaggaagatgaagatagtgctgaagttgtgaatctgtgctctcctgacagctgtatgaatcaatcttcatgtacaaaaattaatggagaaaacagtgtccacttcaatgcagtaacagaattttctccaatggacagtagtgacctttgtacatcagatcaatccaagtcttcgagacggggtccaaggtcaagggaggattttcctcaagatcagtcctgttggtatgatgactgcggagatgagtctggaagaattggtgaattacaatggaagtcaagggaaaggacaagaagtattaatagaagtcgcaacgcagcatccacctcaaacaacaggacaagagagaggcaatcatacaattcttgcagctgcggccatctggaagactatggagtcatggacagctgtttcttgccaacagctagatctggcaaagagacgaagatagcaagaaaatcaggagttgagaaacctagggtgcagtaccacagatgctatacattggatagctttatagtgtcaaaaggaaaccgtgctggttctacacagaaaaatgctatcccaaagcaaatatgggagcctatggatgctcgaaggaagactaaattacacaatacagttcatgattcaggttcagttaacgatgttgattcactgaaacatgtggtttttgataacagtggatctcaaaattttggagtaggatgtgaatcacagcctcaggcttctgaaagttccagggatgaatgtaattcagatcaaccatgtgcaaatggtgggagaaatcaaactatttcatgtgctagtagtactcttatggtgaaccaacaaaactgttgcgcaggaaatgatgaaggctccaggcatgatgaagagctgatgatgaactctgctggctctgatagctcctcgtcatgcatgagcgagggagatagggaaagcagctccagcagtacaacctcttcaagcgctcaaaatccggaatcatcttctgagtctgaggaatcacccgagagaataaatagcacagtaggtacacaatcatcaagagctgctgcttcacggtctttgcttgaagcatgtgcaggtaatggtttcagagaataccaacccaaggcaaccggcctagctcacaatgacatgtttgggtacaatgtatcccctgtccaggaccagctgctgcattaccaaagcatgtatccacctcaacatcggccaataacaatggggtttcatgacggttcttgggctgcaccaacgaatggaaactttcagtatgctcgaccatcccacttatattctagtccactcgtattcggaatacctgggaaccattttattgattatccttacatggctcccgccttcagccatatacctccagagcctattcacaaggccgcatccagctttagagccatgcctctgtcactgccttttcaaaacggacatcggcaggctgctagtcttactcagagagacatgaatctagaaaggcgccctgcaaagttgactaagccgacaggcaaggatcccccagaaaacaagaacaagtcgggcctaaaggatctcccagaagacaagagcaaatcatgggatgcggatgcatccttctcgttgttccaattcaacttgccaatagcttcgcctgtaacaccatcatcaaaagataagagcggagagctggccgcaaggacgccactggctcaggtgcaagctcagctttgctcgagggaacaagcagatgtcaaggagtatagcctgttctcctcgaaagataatggcatattttcgtttatgtagataaaagaaaaactgtgacaaacctgctacccttcgtttctggtgtctcttgctgcacttcgtgaatgctttgtgttctccggagcaaaataaaggatgttgccattttcttcatgctgtctgtatcttcgttttacatttgtgtctgttaccgtgtgtgctaaaagctagtaatctgcaatgctgctgagttgaattttttttcacgtagaa

SEQ ID NO: 6930 - DNA, 1070 bp, Zea Mays
ctgctctacttctccgttattctcgttcttattctctgtggagtgatcggagttgctaacaccctcacatggacgcgccccctgctcgtgatctccccaggaccgagcgcccctccccaactctcctacaccctcaagtcgagtgggctctctccatgggtgaagcttaggcgccgatgctctccttctctggttcgacatgtcagcttggtgccctctctcccatgcccgatcctgaggtccctgcctcgacctccacatcggcctccatggcgctcttctccctgggcacccagacgtgtgcgcccccttccctgctcttgccgcggcgagctccttccctccaagcaccagccctggacgccaggccgcaggccatagttcccgtgcacttgtccgcagccagaaaaactccccgtgggctctggaagtgcccagctcgcgccggagcgtggcgaggcttgactaacgcccagccatggtggctgtaggctgagcagacccctctgctccagccatggcgcggacctcctctggtccgagctcgagcagtgaactctccgtggcgccttcccctgcaatttttccccttcctcccctctacttctgtggcgctcagcactcctgccacaggacgccgagcaccctccccacagatcgctttttccagctgcgccggacactctgtgatttggccgcgtcgcgtccaggacttccatggctgcctccctggcgtacctcgcgcagcagccgcgacgccagttcgcgcagccacgtgaatctcctttgcgtcacgccctcggcgtgctcgacataatgccgcagcaagcctgcagcagcagccccggatcccctccgcatcgagagcagccgcgtcgtcgatccgtgcaaccccgacgtctccgtgtcttgcttcgccgtcaatctgcgcagtccccgtcgcgatgccgtcgaaacccgcgccccttgtcattgtcgcgcttcgcgcgtcgtttctcgacagaaagccaaaccaacatgcacgcatgcacaacaccaatcggatttcggccaggaccgagagatgatga

SEQ ID NO: 6931 - DNA, 1305 bp, Zea Mays
ctgctctacttctccgttattctcgttcttattctctgtggagtgatcggagttgctaacaccctcacatggacgcgccccctgctcgtgatctccccaggaccgagcgcccctccccaactctcctacaccctcaagtcgagtgggctctctccatgggtgaagcttaggcgccgatgctctccttctctggttcgacatgtcagcttggtgccctctctcccatgcccgatcctgaggtccctgcctcgacctccacatcggcctccatggcgctcttctccctgggcacccagacgtgtgcgcccccttccctgctcttgccgcggcgagctccttccctccaagcaccagccctggacgccaggccgcaggccatagttcccgtgcacttgtccgcagccagaaaaactccccgtgggctctggaagtgcccagctcgcgccggagcgtggcgaggcttgactaacgcccagccatggtggctgtaggctgagcagacccctctgctccagccatggcgcggacctcctctggtccgagctcgagcagtgaactctccgtggcgccttcccctgcaatttttccccttcctcccctctacttctgtggcgctcagcactcctgccacaggacgccgagcaccctccccacagatcgctttttccagctgcgccggacactctgtgatttggccgcgtcgcgtccaggacttccatggctgcctccctggcgtacctcgcgcagcagccgcgacgccagttcgcgcagccacgtgaatctcctttgcgtcacgccctcggcgtgctcgacataatgccgcagcaagcctgcagcagcagccccggatcccctccgcatcgagagcagccgcgtcgtcgatccgtgcaaccccgacgtctccgtgtcttgcttcgccgtcaatctgcgcagtccccgtcgcgatgccgtcgaaacccgcgccccttgtcattgtcgcgcttcgcgcgtcgtttctcgacagaaagccaaaccaacatgcacgcatgcacaacaccaatcggatttcggccaggttgttcgatttagaaaaattgtgttttttgttttatttacgattcaatcgatggcgtgaatatgtgtgtgaaaatataattgtatgaatgaacgcgtgtagagaagaaactgaagtagaaaagaactcggacatttttatattttgataggaaaattatgcgatgcgttgtttgatgtgaaaaactaagttacaaaatgtggattatgttttgggaaatgcatcgatatgtgtttatgtgaaaagtataa

SEQ ID NO: 6932 - DNA, 912 bp, Zea Mays
ctagctaattttagccactaactattttctctagtgcattcaaacaccctctttttcagttttaactgcttatacctgcactcatttacatccgtccaaccatactcacgagaaggaagtgagcctagctcaactggttaggttggaggtgtggtcgtacacccaaccaaccaggttcaagtcttctccagcttgaatttagtatcgctggtaggtgaatcagctcctccagaaatgcttcagaagttgacatatctggctatcagacaccatcctcagattaagcgtgttgacaccgttcgagcatacacctttggggtgctttactttgttgaggttgacattgagcttccagaggacttgccacttaaggaggcacacgccattggagaatctctccaaatcaagattgaggagctacctgaagttgagcgagcattcgttcacctagatttcgaatgtgaccataagccggagcattcaattctcaacaagcttcccagcagccagccttgatccgaacgaatcctgtgtggtagattgtcgtgcagaatctgctgcagttcttgcattggcgtcttgtgctgtatgacaaaactaagagttcaattagttttgtggcggtgagtttaagatcaggcgcatctaagactacgagagatgaaggtgccgaatgcagagatttctcgagtgtggaaccctttgtggttctgttggtatggtcttcgttttgagcgaaattaagcattttgctgttggcatcatggcatgtgattggcggcgatctagctgtgtgctatcgactacggtgatgtttagacatggtttcgagaaagagagtagatccttgatttctttaagcaaatctcagtgcctttttattttagggctagtttgatatcagtttctaag

SEQ ID NO: 6933 - DNA, 1629 bp, Zea Mays
gaagttggaatacttagtattatgtaggattgaaacatggatattatacagtaccagcctgtttctaattgcagtatctatatggagtacgacgttctggatctgcctagtggctagtgcctattattcgccacccttttactgaatatcttgaaggatagcagatttttttccttctcctgaatgaaatagaattctgcgctcatagagaaaacaggggagagagagtactatgagaaacaatttgccacattgaggtcctttgaggaagttgactcactagaagaatccaatgaaatcaacgaggatgaggagcttgcggagcaaatccagagtgaatttgctatgaagatatcaaattatgcaaacattgttctcttagcgttgaaggtatacgctacaataaaaagtggatcaattgctatagctgcctcaacactggattcactgcttgatctcatggctggtggtatcctttggttcacacatctgtcaatgaagagcatcaatgtctacaagtaccccattggcaaactgagggtacagcctgtaggcattatcatcttcgctgctgtcatggccactttaggcttccaagtatttattcaggctgttgaaaagctggtagtgaatgaggctccagataaactgaaccaagtgcaattattgtggctatattcaatcatgatctttgcaacaatagtgaaattaggtctgtggctctactgccgaacgtctggtaacaagattgtccgtgcttatgctaaggatcactatttcgatgttgtcacaaatgttgtgggtttggctgctgctgtccttggtgatagattctactggtggattgacccaattggtgcaattgttcttgcagtgtacacgatttcaaactggtctggaacagtgtgggaaaatgcagtatcgctggtaggtgaatcagctcctccagaaatgcttcagaagttgacatatctggctatcagacaccatcctcagattaagcgtgttgacaccgttcgagcatacacctttggggtgctttactttgttgaggttgacattgagcttccagaggacttgccacttaaggaggcacacgccattggagaatctctccaaatcaagattgaggagctacctgaagttgagcgagcattcgttcacctagatttcgaatgtgaccataagccggagcattcaattctcaacaagcttcccagcagccagccttgatccgaacgaatcctgtgtggtagattgtcgtgcagaatctgctgcagttcttgcattggcgtcttgtgctgtatgacaaaactaagagttcaattagttttgtggcggtgagtttaagatcaggcgcatctaagactacgagagatgaaggtgccgaatgcagagatttctcgagtgtggaaccctttgtggttctgttggtatggtcttcgttttgagcgaaattaagcattttgctgttggcatcatggcatgtgattggcggcgatctagctgtgtgctatcgactacggtgatgtttagacatggtttcgagaaagagagtagatccttgatttctttaagcaaatctcagtgcctttttattttagggctagtttgatatcagtttctaag

SEQ ID NO: 6934 - DNA, 2568 bp, Zea Mays
tggtaattgtgcatcaaagctggcgttactatcgggcactttatctacagactatcctggtgatatgattgatgtgcttttgaacctagattctggagttgtcgtagattattcgatgcttctgtggatgacccggacacttattcttgatcctccgcagacttttctgggttcctaggatttcccttacttttatgattgaacagctcgtgacttcactatcacttggtgcttcttgtgtgcatgtttctttgtaaaatagatagcttatattctctacatatttggtggaggaattaccttttcggcgtgtttgtgactttgttctctggtcatggctctggccttctaggcatgcaaacgagttttacagataccacgtagcaggcagtgtcctggcctcctggcctcctggccctggggcacctttctctccctgaaactaaagggagagagagtactatgagaaacaatttgccacattgaggtcctttgaggaagttgactcactagaagaatccaatgaaatcaacgaggatgaggagcttgcggagcaaatccagagtgaatttgctatgaagatatcaaattatgcaaacattgttctcttagcgttgaaggtatacgctacaataaaaagtggatcaattgctatagctgcctcaacactggattcactgcttgatctcatggctggtggtatcctttggttcacacatctgtcaatgaagagcatcaatgtctacaagtaccccattggcaaactgagggtacagcctgtaggcattatcatcttcgctgctgtcatggccactttaggcttccaagtatttattcaggctgttgaaaagctggtagtgaatgaggctccagataaactgaaccaagtgcaattattgtggctatattcaatcatgatctttgcaacaatagtgaaattaggtctgtggctctactgccgaacgtctggtaacaagattgtccgtgcttatgctaaggttaataacttgttccatttctcaacttggcatgaatgttttttacttaatttgaatatagtttatcaaatatttgtgatggtttggtttccacaggatcactatttcgatgttgtcacaaatgttgtgggtttggctgctgctgtccttggtgatagattctactggtggattgacccaattggtgcaattgttcttgcagtgtacacgatttcaaactggtctggaacagtgtgggaaaatgcaggtttgtgttacttagggggtgtttgaatgcagctaatagttagttagctaaaaatatactattagaattagctagctaataaatagttagctaaactagtagctaatttactaaaaatagctaatagctgaactattagcgagtgtttagatgtctctagctaattttagccactaactattttctctagtgcattcaaacaccctctttttcagttttaactgcttatacctgcactcatttacatccgtccaaccatactcacgagaaggaagtgagcctagctcaactggttaggttggaggtgtggtcgtacacccaaccaaccaggttcaagtcttctccagcttgaatttaggtgcctactttctctattttctctttgttgataatgaaaaaccacctactttctcttagctactataaatggattatttttaaccttgaagtggtgctaccgttacaaataaaagttacttgagccaaatgcttgctctggaatcacttcggactatcacctagagcagttgccacatgcagcaccaagattacttgcacgttacaaattggctaggactgacagacaaccttgttattgctatcctccatgtagtatcgctggtaggtgaatcagctcctccagaaatgcttcagaagttgacatatctggctatcagacaccatcctcagattaagcgtgttgacaccgttcgagcatacacctttggggtgctttactttgttgaggttgacattgagcttccagaggacttgccacttaaggaggcacacgccattggagaatctctccaaatcaagattgaggagctacctgaagttgagcgagcattcgttcacctagatttcgaatgtgaccataagccggagcattcaattctcaacaagcttcccagcagccagccttgatccgaacgaatcctgtgtggtagattgtcgtgcagaatctgctgcagttcttgcattggcgtcttgtgctgtatgacaaaactaagagttcaattagttttgtggcggtgagtttaagatcaggcgcatctaagactacgagagatgaaggtgccgaatgcagagatttctcgagtgtggaaccctttgtggttctgttggtatggtcttcgttttgagcgaaattaagcattttgctgttggcatcatggcatgtgattggcggcgatctagctgtgtgctatcgactacggtgatgtttagacatggtttcgagaaagagagtagatccttgatttctttaagcaaatctcagtgcctttttattttagggctagtttgatatcagtttctaag

SEQ ID NO: 6935 - DNA, 1110 bp, Zea Mays
ctattcctcggagagggagaagccgccgccgcagcaatcacagcagcccggagaaagcccaggtccgacaagatgcagatcttcgtgaagacgctgacagggaagaccatcaccctcgaggtcgagagcagcgacaccatcgacaatgtcaaggccaagatccaggacaaggaagggatcccgccggaccagcagcggctgatctttgccgggaagcagctggaggatggccgcacccttgcggactataacatccaaaaggagtctacgcttcacctcgtgcttaggctccgcggtggcatgcagatctttgtgaagacgctgacagggaagaccatcaccctcgaggtcgagagcagcgacaccatcgacaatgtcaaggccaagatccaggacaaggaagggatcccgccggaccagcagcggctgatctttgccgggaagcagctggaggatggccgcacccttgcggactataacatccaaaaggagtctacgctccacctcgtgctcaggctccgcggtggcatcattgagccctcgctgcaggcgctcgctcgcaagtacaaccaggacaagatgatctgccgcaaggtagaagtggtggagggtgtttttgcaaaaaatacagggcagcgagatggctgttggatccagaatgaattgtcgcaatttaatatatgtaccatgtacaccaaaggtgacacagatgctatgcacggctgcaccctagggctgtcaactgccgcaagaagaagtgtggtcacagcaaccagctgagggccaagaagaagatcaagaactgaggtgttgctgctagtcagtttcatggacaatgttgtttggttgttgaaccgtgtttgtttacgaactgtatttttgtttggttgttgaaccgtgtttgtttaccgaacatattggccttatgttatgttttaccatgttgtcgatgacacaatactatatgacgatagcaactatgctattgtagttttggtcattgttcacctgatatgtgccatatttcggtacaatttcgttagtgggcatcccgaactgtttcctttctactcattccattttaaattattgaacttttatttagcaata

SEQ ID NO: 6936 - DNA, 1115 bp, Zea Mays
ctattcctcggagagggagaagccgccgccgcagcaatcacagcagcccggagaaagcccaggtccgacaagatgcagatcttcgtgaagacgctgacagggaagaccatcaccctcgaggtcgagagcagcgacaccatcgacaatgtcaaggccaagatccaggacaaggaagggatcccgccggaccagcagcggctgatctttgccgggaagcagctggaggatggccgcacccttgcggactataacatccaaaaggagtctacgcttcacctcgtgcttaggctccgcggtggcatgcagatctttgtgaagacgctgacagggaagaccatcaccctcgaggtcgagagcagcgacaccatcgacaatgtcaaggccaagatccaggacaaggaagggatcccgccggaccagcagcggctgatctttgccgggaagcagctggaggatggccgcacccttgcggactataacatccaaaaggagtctacgctccacctcgtgctcaggctccgcggtggcatcattgagccctcgctgcaggcgctcgctcgcaagtacaaccaggacaagatgatctgccgcaactcagggtagaagtggtggagggtgtttttgcaaaaaatacagggcagcgagatggctgttggatccagaatgaattgtcgcaatttaatatatgtaccatgtacaccaaaggtgacacagatgctatgcacggctgcaccctagggctgtcaactgccgcaagaagaagtgtggtcacagcaaccagctgagggccaagaagaagatcaagaactgaggtgttgctgctagtcagtttcatggacaatgttgtttggttgttgaaccgtgtttgtttacgaactgtatttttgtttggttgttgaaccgtgtttgtttaccgaacatattggccttatgttatgttttaccatgttgtcgatgacacaatactatatgacgatagcaactatgctattgtagttttggtcattgttcacctgatatgtgccatatttcggtacaatttcgttagtgggcatcccgaactgtttcctttctactcattccattttaaattattgaacttttatttagcaata

SEQ ID NO: 6937 - DNA, 2174 bp, Zea Mays
ccttcagatccaagaaaaggcgcgcgctccctgtgaccacctcacgaactccgtggctataagactcgccgggccataacactgaactgatcgagtcacatgctagcgtgcgtgtgcgtgtgcaacggctataccacctgcgcgacccaccgcgagcgcccgcagctaagctagctctcgctcgcgcgctctgggagaggagagatcaatggcgtcccgtggcagcatgacctgtagtcttcagctcgccgtcctcgtttccgccgccatcgcgctcgggttcggcgtccgggccggcgaggcgcagctgtccagcgagtactacggccagacgtgccccgtcgtgcaccgggtcgcgcggcgggtgctgaagaaggcgcacgaggccgacgtccgcatctacgccagcctcacccgcctccatttccacgactgcttcgtgcaaggctgcgacggctccatcctgctggacaacagctcgagcatcgtgtcggagaagttcgccacgcccaacaacaactcggcgcgcgggtaccccgtggtcgacgccgtcaaggcggcgctggaggaggcttgcccaggcgttgtctcctgcgctgacatactggccatcgccgccaagatctcggtcgaactggtgagtttttctacctatcgatccaccgttggtcatccccagtctactgtctccatccgcagaagaacataattctacctcagtacagtaggctcgatgtcaccgttaatgagttgatctcgacggaacgccattgtacaacagcaagcaaacaaactgtcggactggcattgtaccttctaccttgccttgaccgggaggcagtagctgtagctctagcctctaggcctggagacctggagcaatagtccgaacaaaactcccgtcggtgcaaaataattgaactagtagctagtatggccattagagagatctacgagaagatgacaaaactgcacgccttttttttaagattaaaattaaaagcatgcagaaacagatagatatcctagtacagtatgacgtgcatattcacacacgtcaacgtcacgtcacgtcggctgccatcagcaggacgttcgagggtcataggcgcccgtcagtgtcctctccgtgccacgctttaatccaacacggccacatgacgcgtggtccctcccttttcaccatgcgcgcagtccggcgggccaaggtggcgcgtgcctctcggccggcgcgacggcaccacggccaacatcaccgccgccaacaacctcccgagccccttcgacaacctcactacgctccagcagaagttcggcgccgtcggcctcgacgacaccgacctcgtcgcgctctcaggggcgcacacgttcgggcgcgtgcagtgccagttcgtgacggcgcggctgtacaacttcagcgggacgaaccggccggacccgacgctggacagggggtaccgggcgttcctctccctgcggtgcccgagggccggcaacgcgtcggcgctcaacgacctcgacccgaccacgccggacaccttcgacaacaattactacaccaacatcgaggcgcgccgtgggacgctgcagtccgaccaggagctgctgtcgacgcccggcgcgcccacggcgccgatcgtcggacggttcgccgccagccagaaggagttcttcaggagcttcgccaggtccatggtcaacatggggaacatccaggtgctgacggggagtcagggtgagatcaggaagaactgtaggatggtcaacggaagctagacccgtcgacggcacaagttactggtgaactgaaagcagttctgctgtatgtacgatgcctcaaacatgttgatgggataatggtgcgccgatcgatttatttgtcaaggagatccaataaattggttttttgcatttttttttcaacaaatatatacatgtactaaaggtccgtttgacagagccattcagctctagtttcactagaaagtagtattttttagagctgaagtcatttcacgaatcgttatcttagagctagagttatttcttttatcttagagccagagttatttcgccgtattaaagtgtcagagccgatgaagctactattcatggtttattctttacaattagtgttgtaattagactaaatttaatattgtcagcattcaaac

SEQ ID NO: 6938 - DNA, 293 bp, Zea Mays
cgcaagatcggtagcgattttctggtccaagcaatttatcgaacacttggggagtatcgtgatgctagcctcgtcttcacctgattcttgggatttattgatgacacacggatgacgacgatcaggagggtgacatatatagagctgtattcgcgacgcgatgacgaacgacgctaaccggcggaattgacgacgcaattgggaattaaaaccgagtgagccgagagggcgtaccggcgagcaggaaaccacgtgagtacaagatatggaaaacgacgggctcgacaacacgc

SEQ ID NO: 6939 - DNA, 2981 bp, Zea Mays
ctggaacaaaagttgttcttggtacagactacagagcgtagagcgagtgggtatcggacacttctctggcaattgcagattatctccgaatctgtatgaactgactgccgcggtccattccgtctgaagaccctcctcctacctaattatttttctctgtcgtgacgtgaaatgccagcgcgcagcttcttgatccgttccggctgatcccgtggaccggacttggggttgggggaggccctctgtctccatggatgaggcagcagggctgctgttgcaagaagagggtggaggtggggaccaagaagctctcctccttccacttccacaggatgttggcctttacacaggtgatggatctgttgatgtcaaagggcgccctgcgttaaagggcactacaggcaattggaaagcatgctttttcatcctagggaatgaatgttgtgaaaggctggcctactacggaattgcaaaaaacctagttacttatttgaaagtgaagcttcatctaggcaacctcgaggctgcaagacatgttaccacttggcaagggacatgctatctcactccccttgttggaggcatcttagcagactctcgttgggggaaatactggactattgctgttttctcatcggtttactttattgtaagtacaaagatattgtcacccaagtaataaccatattttagtagaatatgcatcccatggtgacttagaaaataaaataaaatctttgtggcgtatgctacttaatattttttggatagcctttattaaaaaagaacatgtatgctattagattccataattagtgttagattcagactaacttaaatatttcattttcttatattttttatcatgtgaaaaaatgtctacccttgccttaaacactatttaaatcaagtgtataacctcttttttctttactaaagggcctggctattttaacgctttctgcatcagtcccagcgttgcaaccaccttcatgtttaaggacagtttgtccagaagcaagcttacttcagtatggcatattttttggtggcctctatatgattgccctagggactggaggtatcaaaccttgtgtctcctcctttggagctgatcaatttgatgacactgaccaagcagagagagctaagaagggttcattcttcaattggttctacttctgtataaatataggttcattcatatcaggcactatgatagtgtggatacaagataacactggttggggaataggctttgcgattcctactatattcatggcattagctatttcattcttcttctcagcttcaaataagtacagattccaaaaacctggtgggagtccactcacaagagtgtgccaggtggttatagcagcatttcgtaagtggcacattgaagtgccacatgatacatctctcctatatgaagttgatggccaaacttcagcaattgaaggaagccggaagctggagcacacaaatgagctcgagttccttgatagagctgctgttatctcatctgctgatctgaagagtgaatcctttaccgacccatggaagctttgcacagttacccaggtggaagaattgaagatcctaataagaatgtttcccatttgggctactactatcatattcagtgctgtttatgcccaaaactcttccatgttcatagagcagggcatggttcttgacaagcgcattgggtctttcaacattcctcctgcatctctctccacttttgatgtaatcagcgtcatcatgtgggtcccactctatgaccgcatcctggtgccactagctagaaaattcactggaagggagaagggtttttctgagctacagcggatgggaattggattagtcctgtccattctcgcgatggtatctgcagctctagttgagttgaagcgtttagagattgccaggtctgaaggtctcattcatgagaaggctgctgttccaatgagcattctttggcaaataccacaatatttcttggtgggcgctgctgaggtgtttacttgtattggtcaagttgagttcttttacgatcaggccccagatgccatgaggagtttatgtagtgcacttgcacttattacagtctcactgggaaactatataagctccatcatactgacattggtgtcgtacattacaactcagggaggagatcctggatggatccctgacaatctgaatgaaggccatctcgaccggttcttttggttaattgcagggataagctttgtaaatttgatagtttatatgggttgtgctgtcagatacagatataagaaagcctcttgattatatttatgtgaactcttgtaatgtgatttcccattcccgatatcatacttatcaaatacaatgcactgtacagatttctgaaatcctgcgattcatctgactgctttctattgcaaaacctactgtagtttattagatgcagaataaagtttcttgtgattactttgtttgtgaaatacaccaggggcagtagagttattgccttgttctgtgaaaaagcttccaattgttcgttcaaagtaggccattgtgctactcgtttgcttgaaatatagccaccctgttccgccttttgaattgtggttgccttaatttctttcatggtgatactccatattacacatggatccaagtaaaaacattgcaaaacagctttcgctgccaaacttaacaccacaaattccattctccttacttgcatgatctgttactaacaacgagcagcaaaaggaaagacatcgactttgctacttcagcaaacagatgggatgtgcaacgtttagtgaagcctatattcatgtaggtttgcgtagcagatattcgtcaggtcgtgagtccctcgcctttcttttgcatttgacaaaagaaacagctggagcatgtgcatcagtgcatgctcatctgcaaaggaacaagcgaaatgagtgtttagagttcca

SEQ ID NO: 6940 - DNA, 1823 bp, Zea Mays
atttacctattggttgtcaattaaagaaagattggataaatgttcacatatagcttttctgctatgacataagcaacttcataattgttgtgagcatttactggcatgatagttcattgaaaacatgcatgatgcgtcaattgcagacctacttgtgtttctctacctgccaattatgaatcttttatccttcttaagcaatcattcctgcagatattctgtgccaagtgctaatgactttttaatgtgcattcaatgaaggggatgtcggcattgacactttcagcatcagttccttctttccagccccctcaatgtgttgggtctatttgtccacaaccgaccttatcacagtatcttttatactttgttggattatacatgattgctctgggagctggtggtataaagccgtgtgtttcatcctttggggctgaccaatttgatgatactgatccagttgagaaagcaaagaaaggagctttcttcaattggttttatttctgcataaatattggttctttgatctctggcacagttcttatttgggtacaagagaattgtggatacagcattggctttgggatccctacttttttcattgccttggctattggaagcttttttataggttcagatatatataggtttcagataccgggaggaagcccacttacaagagcatgccaggtagttgtggcagccactcacaagcgaaaaacagatttgccggttgacagttctcttctctatgagctagatggtaagacttcagctattgaggggagtcatattcatttatactgcacttttgttctgacattgcatgcttttaagcttgtgtcttggaacttcctggacacagcaaccttttttcagaactatgaaagtttccttgacaaagcggcagtcattttgtggaatgaatgtgatggtcctcgcaattcatggagactttgcacagtcacacaagttgaagagcttaaaatactactgaggatgtttccaatctgggcaacaggaattgtgttcttcaccgtatgtgctcaaaactcatcgatgttcatagaacaggggatgaccctcgataaccaaattggtccattcaagattccagcagcaactctgtcgtccctagatgttatcagtgttgtcgtttgggttccaatttatgagaggttagttgtgcccatagccaggagattcagtgggaaagagagaggtttctcagaacttcaacggatggggatcggtctatttgtgtctacagtcgcagtggcagttgcagcgctagtcgagatcaatcgtctacaggtggcagtggcagaggacctggttcatcagaaggtacctgttcctatgagcatcctttggcaagcgcctcagtatttgctggtcggtgtgggcgaggtgttcacatcaattggtcaagctgagtttttctacaatcagtcaccagatgccatgagaagcttatgctcagctttcgctctcgttaccgtgtcacttggaagttatctcagctcattcatcttaagcctggtgtcatatttcacaactcggaatgggcaattggggtggatccctgataacttgaacgaaggccatcttgaccgctttttctggctgatagccggtctcagctcactaaatttccttgtttttatatattacgctcaacaatacaagtgcaagatagcttctgttgcttaaagttccttctccactttgcaatttacttgtacagcaaagctcaatgtacaatttgtttatgctgaaatactacagtgcgtacataatctcatgtgtcgtgtactgtgtac

SEQ ID NO: 6941 - DNA, 2258 bp, Zea Mays
catattagttggaccaacatcaattgccggcaataaaaaaaacatcaattgccgaagaagcaatcactgatcactcttcaaggttcgaagctttcccttacttctggagagaaaagcctccacggaccacggcttcagaagctgctttcatggagtcgtcgctggtggaggagcggcggcaaaacctgctggtgcgcgcgacggagcctgaggtgatgggtcagttgactttagaggttttcctattttaaagcataacacagggaactggagagcatgttcattgattcttggaactgaagtttgtgaacgtttggcctactatggaatctcaaaaagtttggtcacttacctttcaacaagactacatgaaggaaacgtttctgctgccaggaacttcacaacctggcaaggaacttgttatcttacaccacttattggagcaaccttagcagattcgtactggggaaagtacaggactattgctgttttctccactatttactttcttgggatgtcggcattgacactttcagcatcagttccttctttccagccccctcaatgtgttgggtctatttgtccacaaccgaccttatcacagtatcttttatactttgttggattatacatgattgctctgggagctggtggtataaagccgtgtgtttcatcctttggggctgaccaatttgatgatactgatccagttgagaaagcaaagaaaggagctttcttcaattggttttatttctgcataaatattggttctttgatctctggcacagttcttatttgggtacaagagaattgtggatacagcattggctttgggatccctacttttttcattgccttggctattggaagcttttttataggttcagatatatataggtttcagataccgggaggaagcccacttacaagagcatgccaggtagttgtggcagccactcacaagcgaaaaacagatttgccggttgacagttctcttctctatgagctagatggtaagacttcagctattgaggggagtcgtaagctggagcacagtagtgaattcaggtatttttcttggttatcagtgacaattattttccctgtaagatatatccttttactcaacaaaggagaaaggcattgagaagttgtggtttaggttacatgtttggggaaaacaaatattcaaaaataaaagtttactgaaatgtatcaaatacagatattcatttatactgcacttttgttctgacattgcatgcttttaagcttgtgtcttggaacttcctggacacagcaaccttttttcagaactatgaaagtttccttgacaaagcggcagtcattttgtggaatgaatgtgatggtcctcgcaattcatggagactttgcacagtcacacaagttgaagagcttaaaatactactgaggatgtttccaatctgggcaacaggaattgtgttcttcaccgtatgtgctcaaaactcatcgatgttcatagaacaggggatgaccctcgataaccaaattggtccattcaagattccagcagcaactctgtcgtccctagatgttatcagtgttgtcgtttgggttccaatttatgagaggttagttgtgcccatagccaggagattcagtgggaaagagagaggtttctcagaacttcaacggatggggatcggtctatttgtgtctacagtcgcagtggcagttgcagcgctagtcgagatcaatcgtctacaggtggcagtggcagaggacctggttcatcagaaggtacctgttcctatgagcatcctttggcaagcgcctcagtatttgctggtcggtgtgggcgaggtgttcacatcaattggtcaagctgagtttttctacaatcagtcaccagatgccatgagaagcttatgctcagctttcgctctcgttaccgtgtcacttggaagttatctcagctcattcatcttaagcctggtgtcatatttcacaactcggaatgggcaattggggtggatccctgataacttgaacgaaggccatcttgaccgctttttctggctgatagccggtctcagctcactaaatttccttgtttttatatattacgctcaacaatacaagtgcaagatagcttctgttgcttaaagttccttctccactttgcaatttacttgtacagcaaagctcaatgtacaatttgtttatgctgaaatactacagtgcgtacataatctcatgtgtcgtgtactgtgtac

SEQ ID NO: 6942 - DNA, 2073 bp, Zea Mays
catattagttggaccaacatcaattgccggcaataaaaaaaacatcaattgccgaagaagcaatcactgatcactcttcaaggttcgaagctttcccttacttctggagagaaaagcctccacggaccacggcttcagaagctgctttcatggagtcgtcgctggtggaggagcggcggcaaaacctgctggtgcgcgcgacggagcctgaggatcttgccaggtacacaggtgatgggtcagttgactttagaggttttcctattttaaagcataacacagggaactggagagcatgttcattgattcttggaactgaagtttgtgaacgtttggcctactatggaatctcaaaaagtttggtcacttacctttcaacaagactacatgaaggaaacgtttctgctgccaggaacttcacaacctggcaaggaacttgttatcttacaccacttattggagcaaccttagcagattcgtactggggaaagtacaggactattgctgttttctccactatttactttcttgggatgtcggcattgacactttcagcatcagttccttctttccagccccctcaatgtgttgggtctatttgtccacaaccgaccttatcacagtatcttttatactttgttggattatacatgattgctctgggagctggtggtataaagccgtgtgtttcatcctttggggctgaccaatttgatgatactgatccagttgagaaagcaaagaaaggagctttcttcaattggttttatttctgcataaatattggttctttgatctctggcacagttcttatttgggtacaagagaattgtggatacagcattggctttgggatccctacttttttcattgccttggctattggaagcttttttataggttcagatatatataggtttcagataccgggaggaagcccacttacaagagcatgccaggtagttgtggcagccactcacaagcgaaaaacagatttgccggttgacagttctcttctctatgagctagatggtaagacttcagctattgaggggagtcgtaagctggagcacagtagtgaattcagcttgtgtcttggaacttcctggacacagcaaccttttttcagaactatgaaagtttccttgacaaagcggcagtcattttgtggaatgaatgtgatggtcctcgcaattcatggagactttgcacagtcacacaagttgaagagcttaaaatactactgaggatgtttccaatctgggcaacaggaattgtgttcttcaccgtatgtgctcaaaactcatcgatgttcatagaacaggggatgaccctcgataaccaaattggtccattcaagattccagcagcaactctgtcgtccctagatgttatcagtgttgtcgtttgggttccaatttatgagaggttagttgtgcccatagccaggagattcagtgggaaagagagaggtttctcagaacttcaacggatggggatcggtctatttgtgtctacagtcgcagtggcagttgcagcgctagtcgagatcaatcgtctacaggtggcagtggcagaggacctggttcatcagaaggtacctgttcctatgagcatcctttggcaagcgcctcagtatttgctggtcggtgtgggcgaggtgttcacatcaattggtcaagctgagtttttctacaatcagtcaccagatgccatgagaagcttatgctcagctttcgctctcgttaccgtgtcacttggaagttatctcagctcattcatcttaagcctggtgtcatatttcacaactcggaatgggcaattggggtggatccctgataacttgaacgaaggccatcttgaccgctttttctggctgatagccggtctcagctcactaaatttccttgtttttatatattacgctcaacaatacaagtgcaagatagcttctgttgcttaaagttccttctccactttgcaatttacttgtacagcaaagctcaatgtacaatttgtttatgctgaaatactacagtgcgtacataatctcatgtgtcgtgtactgtgtac

SEQ ID NO: 6943 - DNA, 2024 bp, Zea Mays
gaatcatattagttggaccaacatcaattgccggcaataaaaaaaacatcaattgccgaagaagcaatcactgatcactcttcaaggttcgaagctttcccttacttctggagagaaaagcctccacggaccacggcttcagaagctgctttcatggagtcgtcgctggtggaggagcggcggcaaaacctgctggtgcgcgcgacggagcctgaggatcttgccaggtacacaggtgatgggtcagttgactttagaggttttcctattttaaagcataacacagggaactggagagcatgttcattgattcttggaactgaagtttgtgaacgtttggcctactatggaatctcaaaaagtttggtcacttacctttcaacaagactacatgaaggaaacgtttctgctgccaggaacttcacaacctggcaaggaacttgttatcttacaccacttattggagcaaccttagcagattcgtactggggaaagtacaggactattgctgttttctccactatttactttcttgggatgtcggcattgacactttcagcatcagttccttctttccagccccctcaatgtgttgggtctatttgtccacaaccgaccttatcacagtatcttttatactttgttggattatacatgattgctctgggagctggtggtataaagccgtgtgtttcatcctttggggctgaccaatttgatgatactgatccagttgagaaagcaaagaaaggagctttcttcaattggttttatttctgcataaatattggttctttgatctctggcacagttcttatttgggtacaagagaattgtggatacagcattggctttgggatccctacttttttcattgccttggctattggaagcttttttataggttcagatatatataggtttcagataccgggaggaagcccacttacaagagcatgccaggtagttgtggcagccactcacaagcgaaaaacagatttgccggttgacagttctcttctctatgagctagatggtaagacttcagctattgaggggagtcgtaagctggagcacagtagtgaattcagtttccttgacaaagcggcagtcattttgtggaatgaatgtgatggtcctcgcaattcatggagactttgcacagtcacacaagttgaagagcttaaaatactactgaggatgtttccaatctgggcaacaggaattgtgttcttcaccgtatgtgctcaaaactcatcgatgttcatagaacaggggatgaccctcgataaccaaattggtccattcaagattccagcagcaactctgtcgtccctagatgttatcagtgttgtcgtttgggttccaatttatgagaggttagttgtgcccatagccaggagattcagtgggaaagagagaggtttctcagaacttcaacggatggggatcggtctatttgtgtctacagtcgcagtggcagttgcagcgctagtcgagatcaatcgtctacaggtggcagtggcagaggacctggttcatcagaaggtacctgttcctatgagcatcctttggcaagcgcctcagtatttgctggtcggtgtgggcgaggtgttcacatcaattggtcaagctgagtttttctacaatcagtcaccagatgccatgagaagcttatgctcagctttcgctctcgttaccgtgtcacttggaagttatctcagctcattcatcttaagcctggtgtcatatttcacaactcggaatgggcaattggggtggatccctgataacttgaacgaaggccatcttgaccgctttttctggctgatagccggtctcagctcactaaatttccttgtttttatatattacgctcaacaatacaagtgcaagatagcttctgttgcttaaagttccttctccactttgcaatttacttgtacagcaaagctcaatgtacaatttgtttatgctgaaatactacagtgcgtacataatctcatgtgtcgtgtactgtgtac

SEQ ID NO: 6944 - DNA, 1926 bp, Zea Mays
gcgaatcatattagttggaccaacatcaattgccggcaataaaaaaaacatcaattgccgaagaagcaatcactgatcactcttcaaggttcgaagctttcccttacttctggagagaaaagcctccacggaccacggcttcagaagctgctttcatggagtcgtcgctggtggaggagcggcggcaaaacctgctggtgcgcgcgacggagcctgaggaactgaagtttgtgaacgtttggcctactatggaatctcaaaaagtttggtcacttacctttcaacaagactacatgaaggaaacgtttctgctgccaggaacttcacaacctggcaaggaacttgttatcttacaccacttattggagcaaccttagcagattcgtactggggaaagtacaggactattgctgttttctccactatttactttcttgggatgtcggcattgacactttcagcatcagttccttctttccagccccctcaatgtgttgggtctatttgtccacaaccgaccttatcacagtatcttttatactttgttggattatacatgattgctctgggagctggtggtataaagccgtgtgtttcatcctttggggctgaccaatttgatgatactgatccagttgagaaagcaaagaaaggagctttcttcaattggttttatttctgcataaatattggttctttgatctctggcacagttcttatttgggtacaagagaattgtggatacagcattggctttgggatccctacttttttcattgccttggctattggaagcttttttataggttcagatatatataggtttcagataccgggaggaagcccacttacaagagcatgccaggtagttgtggcagccactcacaagcgaaaaacagatttgccggttgacagttctcttctctatgagctagatggtaagacttcagctattgaggggagtcgtaagctggagcacagtagtgaattcagtttccttgacaaagcggcagtcattttgtggaatgaatgtgatggtcctcgcaattcatggagactttgcacagtcacacaagttgaagagcttaaaatactactgaggatgtttccaatctgggcaacaggaattgtgttcttcaccgtatgtgctcaaaactcatcgatgttcatagaacaggggatgaccctcgataaccaaattggtccattcaagattccagcagcaactctgtcgtccctagatgttatcagtgttgtcgtttgggttccaatttatgagaggttagttgtgcccatagccaggagattcagtgggaaagagagaggtttctcagaacttcaacggatggggatcggtctatttgtgtctacagtcgcagtggcagttgcagcgctagtcgagatcaatcgtctacaggtggcagtggcagaggacctggttcatcagaaggtacctgttcctatgagcatcctttggcaagcgcctcagtatttgctggtcggtgtgggcgaggtgttcacatcaattggtcaagctgagtttttctacaatcagtcaccagatgccatgagaagcttatgctcagctttcgctctcgttaccgtgtcacttggaagttatctcagctcattcatcttaagcctggtgtcatatttcacaactcggaatgggcaattggggtggatccctgataacttgaacgaaggccatcttgaccgctttttctggctgatagccggtctcagctcactaaatttccttgtttttatatattacgctcaacaatacaagtgcaagatagcttctgttgcttaaagttccttctccactttgcaatttacttgtacagcaaagctcaatgtacaatttgtttatgctgaaatactacagtgcgtacataatctcatgtgtcgtgtactgtgtac

SEQ ID NO: 6945 - DNA, 2261 bp, Zea Mays
gcgaatcatattagttggaccaacatcaattgccggcaataaaaaaaacatcaattgccgaagaagcaatcactgatcactcttcaaggttcgaagctttcccttacttctggagagaaaagcctccacggaccacggcttcagaagctgctttcatggagtcgtcgctggtggaggagcggcggcaaaacctgctggtgcgcgcgacggagcctgaggaactgaagtttgtgaacgtttggcctactatggaatctcaaaaagtttggtcacttacctttcaacaagactacatgaaggaaacgtttctgctgccaggaacttcacaacctggcaaggaacttgttatcttacaccacttattggagcaaccttagcagattcgtactggggaaagtacaggactattgctgttttctccactatttactttcttgggatgtcggcattgacactttcagcatcagttccttctttccagccccctcaatgtgttgggtctatttgtccacaaccgaccttatcacagtatcttttatactttgttggattatacatgattgctctgggagctggtggtataaagccgtgtgtttcatcctttggggctgaccaatttgatgatactgatccagttgagaaagcaaagaaaggagctttcttcaattggttttatttctgcataaatattggttctttgatctctggcacagttcttatttgggtacaagagaattgtggatacagcattggctttgggatccctacttttttcattgccttggctattggaagcttttttataggttcagatatatataggtttcagataccgggaggaagcccacttacaagagcatgccaggtagttgtggcagccactcacaagcgaaaaacagatttgccggttgacagttctcttctctatgagctagatggtaagacttcagctattgaggggagtcgtaagctggagcacagtagtgaattcaggtatttttcttggttatcagtgacaattattttccctgtaagatatatccttttactcaacaaaggagaaaggcattgagaagttgtggtttaggttacatgtttggggaaaacaaatattcaaaaataaaagtttactgaaatgtatcaaatacagatattcatttatactgcacttttgttctgacattgcatgcttttaagcttgtgtcttggaacttcctggacacagcaaccttttttcagaactatgaaaggtaagcatacacaggatttgtacatatgcgcgaagactcacatgctgtcccagctgacacgtgctctttcctgaacagtttccttgacaaagcggcagtcattttgtggaatgaatgtgatggtcctcgcaattcatggagactttgcacagtcacacaagttgaagagcttaaaatactactgaggatgtttccaatctgggcaacaggaattgtgttcttcaccgtatgtgctcaaaactcatcgatgttcatagaacaggggatgaccctcgataaccaaattggtccattcaagattccagcagcaactctgtcgtccctagatgttatcagtgttgtcgtttgggttccaatttatgagaggttagttgtgcccatagccaggagattcagtgggaaagagagaggtttctcagaacttcaacggatggggatcggtctatttgtgtctacagtcgcagtggcagttgcagcgctagtcgagatcaatcgtctacaggtggcagtggcagaggacctggttcatcagaaggtacctgttcctatgagcatcctttggcaagcgcctcagtatttgctggtcggtgtgggcgaggtgttcacatcaattggtcaagctgagtttttctacaatcagtcaccagatgccatgagaagcttatgctcagctttcgctctcgttaccgtgtcacttggaagttatctcagctcattcatcttaagcctggtgtcatatttcacaactcggaatgggcaattggggtggatccctgataacttgaacgaaggccatcttgaccgctttttctggctgatagccggtctcagctcactaaatttccttgtttttatatattacgctcaacaatacaagtgcaagatagcttctgttgcttaaagttccttctccactttgcaatttacttgtacagcaaagctcaatgtacaatttgtttatgctgaaatactacagtgcgtacataatctcatgtgtcgtgtactgtgtac

SEQ ID NO: 6946 - DNA, 2279 bp, Zea Mays
ctgcttggcgaatcatattagttggaccaacatcaattgccggcaataaaaaaaacatcaattgccgaagaagcaatcactgatcactcttcaaggttcgaagctttcccttacttctggagagaaaagcctccacggaccacggcttcagaagctgctttcatggagtcgtcgctggtggaggagcggcggcaaaacctgctggtgcgcgcgacggagcctgaggtacacaggtgatgggtcagttgactttagaggttttcctattttaaagcataacacagggaactggagagcatgttcattgattcttggaactgaagtttgtgaacgtttggcctactatggaatctcaaaaagtttggtcacttacctttcaacaagactacatgaaggaaacgtttctgctgccaggaacttcacaacctggcaaggaacttgttatcttacaccacttattggagcaaccttagcagattcgtactggggaaagtacaggactattgctgttttctccactatttactttcttgggatgtcggcattgacactttcagcatcagttccttctttccagccccctcaatgtgttgggtctatttgtccacaaccgaccttatcacagtatcttttatactttgttggattatacatgattgctctgggagctggtggtataaagccgtgtgtttcatcctttggggctgaccaatttgatgatactgatccagttgagaaagcaaagaaaggagctttcttcaattggttttatttctgcataaatattggttctttgatctctggcacagttcttatttgggtacaagagaattgtggatacagcattggctttgggatccctacttttttcattgccttggctattggaagcttttttataggttcagatatatataggtttcagataccgggaggaagcccacttacaagagcatgccaggtagttgtggcagccactcacaagcgaaaaacagatttgccggttgacagttctcttctctatgagctagatggtaagacttcagctattgaggggagtcgtaagctggagcacagtagtgaattcaggtatttttcttggttatcagtgacaattattttccctgtaagatatatccttttactcaacaaaggagaaaggcattgagaagttgtggtttaggttacatgtttggggaaaacaaatattcaaaaataaaagtttactgaaatgtatcaaatacagatattcatttatactgcacttttgttctgacattgcatgcttttaagcttgtgtcttggaacttcctggacacagcaaccttttttcagaactatgaaagtttccttgacaaagcggcagtcattttgtggaatgaatgtgatggtcctcgcaattcatggagactttgcacagtcacacaagttgaagagcttaaaatactactgaggatgtttccaatctgggcaacaggaattgtgttcttcaccgtatgtgctcaaaactcatcgatgttcatagaacaggggatgaccctcgataaccaaattggtccattcaagattccagcagcaactctgtcgtccctagatgttatcagtgttgtcgtttgggttccaatttatgagaggttagttgtgcccatagccaggagattcagtgggaaagagagaggtttctcagaacttcaacggatggggatcggtctatttgtgtctacagtcgcagtggcagttgcagcgctagtcgagatcaatcgtctacaggtggcagtggcagaggacctggttcatcagaaggtacctgttcctatgagcatcctttggcaagcgcctcagtatttgctggtcggtgtgggcgaggtgttcacatcaattggtcaagctgagtttttctacaatcagtcaccagatgccatgagaagcttatgctcagctttcgctctcgttaccgtgtcacttggaagttatctcagctcattcatcttaagcctggtgtcatatttcacaactcggaatgggcaattggggtggatccctgataacttgaacgaaggccatcttgaccgctttttctggctgatagccggtctcagctcactaaatttccttgtttttatatattacgctcaacaatacaagtgcaagatagcttctgttgcttaaagttccttctccactttgcaatttacttgtacagcaaagctcaatgtacaatttgtttatgctgaaatactacagtgcgtacataatctcatgtgtcgtgtactgtgtac

SEQ ID NO: 6947 - DNA, 1086 bp, Zea Mays
ttgctgtcggtcccctgaactgagatcgatgcttcgagtgcaagaaaattatgctgccggtcgctaagctaggttgttgttgttggatcggcacgcaccggtagcgggtggagagcttcatcgagcaccaggacgcgtgcaactccagccggatgcgcggcgaggcggtggtggtggccgtgcccgtgcccgtgccgccgccgtcggcgctcccggtcatccgtcccgccgtcccgcggcatccgcccacggtggcagtagcaccgccgccgccgccggtgctccagctcctccccgcctccgcggcggcatcagcgccgcggactagtagcgccacgacgaccgcctctccgtccaccaccacaaccgcgtcccaccaccaagcaaaaccccacgcggcgacaacaacaaagctgcagctctccatcggccccatcgtcacggctgcggcggcggcggccgtcgactgcggcgaggacgagtccgaggcggaggagctgcggcgcgcggtggaggagaaggccgcggcggacgcggcgcgggagcgggcgcgcggggaggccgcggcggcggagcgcgcgctggacgaggcccgccgcgccaggcagcgtgcccgggccgacctcgagaaggcgtgcgcgctgcgggaccacgccgctcgcctgctcgggcaggtcacctgccacgcgtgccgccaccgctcgctcgccgtcgccgtggtcaggggtgccgccgagggccacgccgccggccccgcggtggcctgcgactccatcaggggaggaggcttaggagcaggcatctagctagctccaccactcgtgcatgccattgccatgcatagttcatgtgtgtagatcaagctaagctaattcgtaggccggacttgtgcatagtgtcgtgtggcgattactgcttgcaaccacgcacccactttggtttctagggtgctacaacttgcaactttggcctggtaaaggtatggtgaatgagatcatgcacgttaaaaacggagtgtgtattggatatgttctcacacttggtaagggaatgaatctaaaacactcggtaaaggtacagaagtag

SEQ ID NO: 6948 - DNA, 1375 bp, Zea Mays
agcgaaccttgtaaccttctagaaccctctattcccctccgtgtccgatgcctctcatcgccagaagaccttcccggtacgacgccaccgcaccacggaattaacacgagcactgcatcggtgaatctgcaagcccgcccgcccgtcgctcgccaccgccatgttcggcatcgtcttcccggaccacacctttcccctcgacgccaccgctttcgcgcaggtggcgcccaattcctgggtcctcgatctctccactctcgcgctcgccgccgcgccgcgctcggcagtcgtcttcctgctccccgctgccgtgacagcgctgccgcccggcaaggccgtctccgtctacttccaggccgccaccaaccgccccttcgcattcttaggtgcgctcgggcccacgcgcccctcggccagcttcccgcttccggaggccggcgacgagccggagcctgctgtgggccccgctaaactgggtgtcgccgtggaggacgcggccgcgttaccgccgccccctgacgagcagcgtgccgagcgtgtggcgctccgtgtcggcgagaacctgttcaacttcatgcaatcgttctgcggtgccgacggcggcaagctggtagtgcccacggacatcctggaccggtggttccgcaagttccaggagcgagccaagaaagatccagcgtacctcaagagcttcgacttttgagagcaaagatatcagagaacagaggggagaaagatccaaatatagttcaacaccataatactttcggaggttctctcaaggagaagatactgcaggcacaaggtcattttgcagataccatgtgggaagaatgttggatagcagtatagcagtgttttgtgtctcatctaggccctcctacattgcacacaatgttacgccgtgtcttaggggctgactgaatgaaggtgcatatgcagcttctctatctattgtagagaaggacaacgacaccaaaagcgaccagataggttagatggtggtgcttcaagtccttgcacccgaatgagaagtcttcttagaaacttttacaacaatacatcggatggttctgcttcgaatgtcagtattttgtggataatatctgggaatctcaggactaagatgaatgcgattgagttcttgtcgcactcctttgtgaaagagtagaatgagaaacctagtggatcttaaacccattgataaaagaaaaaaaggataacaactatggttagggaataaaagagggtttggggatagagggataaggcctcacgactttataagtcgacggattttccttttactagaaatttcattgttgtagtattgacatgtagaatgagactctctcgaagcatatttttatttccc

SEQ ID NO: 6949 - DNA, 1464 bp, Zea Mays
cgagttccgaaccatccagcgaaccttgtaaccttctagaaccctctattcccctccgtgtccgatgcctctcatcgccagaagaccttcccggtacgacgccaccgcaccacggaattaacacgagcactgcatcggtgaatctgcaagcccgcccgcccgtcgctcgccaccgccatgttcggcatcgtcttcccggaccacacctttcccctcgacgccaccgctttcgcgcaggtggcgcccaattcctgggtcctcgatctctccactctcgcgctcgccgccgcgccgcgctcggcagtcgtcttcctgctccccgctgccgtgacagcgctgccgcccggcaaggccgtctccgtctacttccaggccgccaccaaccgccccttcgcattcttaggtgcgctcgggcccacgcgcccctcggccagcttcccgcttccggaggccggcgacgagccggagcctgctgtgggccccgctaaactgggtgtcgccgtggaggacgcggccgcgttaccgccgccccctgacgagcagcgtgccgagcgtgtggcgctccgtgtcggcgagaacctgttcaacttcatgcaatcgttctgcggtgccgacggcggcaagctggtagtgcccacggacatcctggaccggtggttccgcaagttccaggagcgagccaagaaagatccagcgtacctcaagagcttcgacttttgagagcaaagatatcagagaacagaggggagaaagatccaaatatagttcaacaccataatactttcggaggttctctcaaggagaagatactgcaggcacaaggttacaaatgtctgatcctcgtggcggtggcactgttcatctatttatagtgtcagacttgtatacattcttgtcattttgcagataccatgtgggaagaatgttggatagcagtatagcagtgttttgtgtctcatctaggccctcctacattgcacacaatgttacgccgtgtcttaggggctgactgaatgaaggtgcatatgcagcttctctatctattgtagagaaggacaacgacaccaaaagcgaccagataggttagatggtggtgcttcaagtccttgcacccgaatgagaagtcttcttagaaacttttacaacaatacatcggatggttctgcttcgaatgtcagtattttgtggataatatctgggaatctcaggactaagatgaatgcgattgagttcttgtcgcactcctttgtgaaagagtagaatgagaaacctagtggatcttaaacccattgataaaagaaaaaaaggataacaactatggttagggaataaaagagggtttggggatagagggataaggcctcacgactttataagtcgacggattttccttttactagaaatttcattgttgtagtattgacatgtagaatgagactctctcgaagcatatttttatttccc

SEQ ID NO: 6950 - DNA, 795 bp, Zea Mays
cgagttccgaaccatccagcgaaccttgtaaccttctagaaccctctattcccctccgtgtccgatgcctctcatcgccagaagaccttcccggtacgacgccaccgcaccacggaattaacacgagcactgcatcggtgaatctgcaagcccgcccgcccgtcgctcgccaccgccatgttcggcatcgtcttcccggaccacacctttcccctcgacgccaccgctttcgcgcaggtggcgcccaattcctgggtcctcgatctctccactctcgcgctcgccgccgcgccgcgctcggcagtcgtcttcctgctccccgctgccgtgacagcgctgccgcccggcaaggccgtctccgtctacttccaggccgccaccaaccgccccttcgcattcttaggtgcgctcgggcccacgcgcccctcggccagcttcccgcttccggaggccggcgacgagccggagcctgctgtgggccccgctaaactgggtgtcgccgtggaggacgcggccgcgttaccgccgccccctgacgagcagcgtgccgagcgtgtggcgctccgtgtcggcgagaacctgttcaacttcatgcaatcgttctgcggtgccgacggcggcaagctggtagtgcccacggacatcctggaccggtggttccgcaagttccaggagcgagccaagaaagatccagcgtacctcaagagcttcgacttttgagagcaaagatcttcttttcttcgatggcctcatctatctgtcttcgaagttgagcagcctgaagcagtttctgct

SEQ ID NO: 6951 - DNA, 3649 bp, Zea Mays
ctcgctctttcacttgggccgcttctggatctgtacgcggacgcccacgcactgcttggccttcgtctccgcttctcttgcgctttcgactcctgctagctggcggggcggctcgcctctcgcgccacaatggaggtcgaggacgacgacaacacggcggcgccgagcgcgtggccgagttcatccaggcgtcgccacctcctccagttccttctccacgcctccatgaggctcgacctccggcccatcgtcaagtacgccgcgcttaccttcttcgctggacgcttcctcccggcactcccgaggaagatggggttctgcggcgcgcgaagcggccgaatagtcaggtcctggctcctcgagcccctgagggacagcaatctcgagctattcgcgctcgtcgcggtgtggattgccagcaagatccacgatcagaagccaatgtcagtgaagagcctcaaagccctgggtgatcgcatcatcgccgaccagcatttcatgtgccgtgattttgccagtgccgaattggtgttcttggaggtagtggaacacaacattggattttcaagcatttgtttcatatacctggaggagcttctcatgcatttcaggttctttggatttcttacaacctttctctgacccataaacagttgttaaccctgttaaaggcaacctacaaaacttcacagtgcgaataatattggagcttatacaaaattctctctctctcttttttttttggggggggggggatgggggcgagtcaccatttatgtacaagacatgtcatcaacaaacatgtgtagcaagtagtaactgatcgcaactgaaattttaccacattctgttttcgctcttaggaagcagactgtgtagctcttcatagcagcttttaccacaaaatatctttatgagaaatattaaactgggggcacattagtgggaataatctcatatcatttctcctatctacaatacatcttatttaccttgttatcacaagtgaatctgacaatatgaaaaactaagaaaataaatgggatgttggataatcagaaaattctcatagctatctttcttgttacagagataatagctctcctgcatgttagataaaaaaaacccctagacctctattgaatgacttgtttgattccatggttttacagtttcaccaatacaacaacaccaaagctttttagtcccaagcaagttggggtagactaagttgaaacccaatagagcccacgagtcaagattcaagcatatcgatagttgtttttcatacggtcctattcaaggctaaatctttaggtatattttatattctcatgtcttcttttactgtctcttctcatgtcaacttcggccttctcctgcctctcttcctaatttcctattactatcacgccttaggacaagcttttcttcactaagtgctacctctatcctatcatgtatatcgttgttctggactcgatcccttcttatatgactacaaatccaatgcaatgtagcattttcgcaactcgtatctgttgaatatgacgtcttttgtaggtcaacattctgcaccatacaacacaagatgtctaatcgctattctataaaacttgttttttagcttctgtggtatcctcttgtcacatagaacgtcatatgtttggcaccacttctttcaccctgctttgattttatggctaacatcttcatcaatatcactctctttgtagcattgatcctaaataccgaaaggtatccttcataggtactacttgacctgccaaactaatatctccttcctcatgtatagtagtgctgaagccacatatcatgtattcggttttaactttatcgagtctgaaacctttggactctagagtctcttgccacaactatgactgtctttcattaactagcactatatcgtcctaaaaaagcatacaccaaggatatctcattgtatgtctcttctgacctcatctatcaccaatacaacagtcagtgctcaaagttggcccctgatatagtcctattttaatcggtaagtcctatgtgtcctcatcacttgttcgatcactagtcacaacattgtcgtacatgcatgttcttaacgagtccaacatacttcgatgaaactttatgtttgtccaaagtccaccacataatgttgcttagtattttgttataagccttctccaagtcaatgaaaacaatctttaggtctgtcttctgctttctatgctgctccatcacttgctttattaagaaaatggtatccatggttgaccttgtgggcataaaattaaattggttcatagagatccacgttattccttagacgatgcttgaaaactctctcccatagtttcatagtatggctcatcaacttaattcctcggtaattgtcacaactttgaacatcttacttattcttgtagattgggactaatgtacttcacttgtcaggcatcttgtttgaccaaaagatatagttgaacttggttagtcatgttatagctatgtccccaaggcatctccaaccttgattggatgccattaggacgcatcgccttacccctttgattctttttaatacctctctaaccttagattcttatatcctacgcacaaagcgtctattggtgtcatcaaactaaaagtttgtatcccattctccttacaaactaatggccgttggaattattatcattaagtacttagcaagtgaatatttattaatattgctattaatattgccatagttgggcagttgtgtgaatgtattattgctgctagtcactagttcttgatttcttggcataaataacataactttatatttttctaattaattcactgctagggaaatatcaaaaataggcgaacttttggatctggatgtgtgcatggaaattttggacattctgtatgaaacggaagatacctcgttactttttaattgtccctgctcacttgctgcttccactcttgttgctgcatatgctatatcagttcctaagcaaacatgggagtttccaatccttccttgggtcaggtttgctacatcatacgatgaagaggaaatcatgaagattgttctgacaattctcctacatgtgcttaaactggatggtatcgaagagaagggcaagggacgttttgatgccagatgtttgtcgtgaatacatgcttttagaagacactgtagctagtttttgacaggcggttttgagattgagatgcccataatagttatgtgaactaaaactatatgatcaagggagtgcgcgtaagcgccttgcaatggaattctgtattggatgtattttgaagaaagatgcctgctaagtaatgccttcaggttggaattcaagtttgacataattatcaatgtaatgacatttaagctccttgagatctcaaatggaaggatgttgcattgccgccgcattgcttggtgcactctgtcagcttcaaattcttgggtggttttcccttcctttttatttagggggagagatctaggctagctagacagaaccgctctacactgccgcacctgttcaaaagctcaggtctactggcttcgtaggcagcgcgtcgctacttgcctgaccgtgtctaccgcaggcgcacctcccct

SEQ ID NO: 6952 - DNA, 2917 bp, Zea Mays
ctcgctctttcacttgggccgcttctggatctgtacgcggacgcccacgcactgcttggccttcgtctccgcttctcttgcgctttcgactcctgctagctggcggggcggctcgcctctcgcgccacaatggaggtcgaggacgacgacaacacggcggcgccgagcgcgtggccgagttcatccaggcgtcgccacctcctccagttccttctccacgcctccatgaggctcgacctccggcccatcgtcaagtacgccgcgcttaccttcttcgctggacgcttcctcccggcactcccgaggaagatggggttctgcggcgcgcgaagcggccgaatagtcaggtcctggctcctcgagcccctgagggacagcaatctcgagctattcgcgctcgtcgcggtgtggattgccagcaagatccacgatcagaagccaatgtcagtgaagagcctcaaagccctgggtgatcgcatcatcgccgaccagcatttcatgtgccgtgattttgccagtgccgaattggtgttcttggaggtaaatcctggctatgattattactgaaaaataggttaagttgacagggtcaactatgttatattccttttgtttgttgtgggattttaggtagtggaacacaacattggattttcaagcatttgtttcatatacctggaggagcttctcatgcatttcaggttctttggatttcttacaacctttctctgacccataaacagttgttaaccctgttaaaggcaacctacaaaacttcacagtgcgaataatattggagcttatacaaaattctctctctctcttttttttttggggggggggggatgggggcgagtcaccatttatgtacaagacatgtcatcaacaaacatgtgtagcaagtagtaactgatcgcaactgaaattttaccacattctgttttcgctcttaggaagcagactgtgtagctcttcatagcagcttttaccacaaaatatctttatgagaaatattaaactgggggcacattagtgggaataatctcatatcatttctcctatctacaatacatcttatttaccttgttatcacaagtgaatctgacaatatgaaaaactaagaaaataaatgggatgttggataatcagaaaattctcatagctatctttcttgttacagagataatagctctcctgcatgttagataaaaaaaacccctagacctctattgaatgacttgtttgattccatggttttacagtttcaccaatacaacaacaccaaagctttttagtcccaagcaagttggggtagactaagttgaaacccaatagagcccacgagtcaagattcaagcatatcgatagttgtttttcatacggtcctattcaaggctaaatctttaggtatattttatattctcatgtcttcttttactgtctcttctcatgtcaacttcggccttctcctgcctctcttcctaatttcctattactatcacgccttaggacaagcttttcttcactaagtgctacctctatcctatcatgtatatcgttgttctggactcgatcccttcttatatgactacaaatccaatgcaatgtagcattttcgcaactcgtatctgttgaatatgacgtcttttgtaggtcaacattctgcaccatacaacacaagatgtctaatcgctattctataaaacttgttttttagcttctgtggtatcctcttgtcacatagaacgtcatatgtttggcaccacttctttcaccctgctttgattttatggctaacatcttcatcaatatcactctctttgtagcattgatcctaaataccgaaaggtatccttcataggtactacttgacctgccaaactaatatctccttcctcatgtatagtagtgctgaagccacatatcatgtattcggttttaactttatcgagtctgaaacctttggactctagagtctcttgccacaactatgactgtctttcattaactagcactatatcgtcctaaaaaagcatacaccaaggatatctcattgtatgtctcttctgacctcatctatcaccaatacaacagtcagtgctcaaagttggcccctgatatagtcctattttaatcgggaaatatcaaaaataggcgaacttttggatctggatgtgtgcatggaaattttggacattctgtatgaaacggaagatacctcgttactttttaattgtccctgctcacttgctgcttccactcttgttgctgcatatgctatatcagttcctaagcaaacatgggagtttccaatccttccttgggtcaggtttgctacatcatacgatgaagaggaaatcatgaagattgttctgacaattctcctacatgtgcttaaactggatggtatcgaagagaagggcaagggacgttttgatgccagatgtttgtcgtgaatacatgcttttagaagacactgtagctagtttttgacaggcggttttgagattgagatgcccataatagttatgtgaactaaaactatatgatcaagggagtgcgcgtaagcgccttgcaatggaattctgtattggatgtattttgaagaaagatgcctgctaagtaatgccttcaggttggaattcaagtttgacataattatcaatgtaatgacatttaagctccttgagatctcaaatggaaggatgttgcattgccgccgcattgcttggtgcactctgtcagcttcaaattcttgggtggttttcccttcctttttatttagggggagagatctaggctagctagacagaaccgctctacactgccgcacctgttcaaaagctcaggtctactggcttcgtaggcagcgcgtcgctacttgcctgaccgtgtctaccgcaggcgcacctcccct

SEQ ID NO: 6953 - DNA, 589 bp, Zea Mays
ctgcgtcttgtttgcccgccccaacacctcggcagtcaggtccgagcgacgctccagcttccgctgcaggctcgacagctcatccctcttctccggagcatcaaccataccccgcactgtctcccgcagcacctccagggtttcactcggaaaatcctgcagggcctgagccatggctggcacagggtccgacacgatctcccgcaggatcctatgaggccgtgacgagtgcatccccccatggctggcgtcaaagctggcgccagcgctgagcgcggctgccatcctcgcggggagctccgtggggaagaaggacgaggtgccctccttgagctgcgccggggcgaaggcgacgctgccgtcccccatggggcggaagttgaaccggctgtggacggagccgttggtgccctccccggcggcgtagatgtcggtggagttgtgcgtgagggagcagctcgggttgtgcgagaacaccgagtaggagtaggacatgtcgtcggagttgatgctccgggtgcgccccgtgttggcgctgtaggtccgcctggggggcggcgcgacaggcgtggcaggcaccgcggcggct

SEQ ID NO: 6954 - DNA, 1623 bp, Zea Mays
actcccaactctcccacaagtcacacacatcccttgaattgaatcccttttcatccctctctcttttcaatgctcctatcccttcgctcccggaaacgaaatatctacgagtacattagcatctcaactcagtgcttttagatgggtggaagtggaagcacgcttaatccagcagcccccagttgtttactctttactgcaagctgtgggcactttctatcgtgcccttttccttagatggtggtagtagtggtggtggtacaaagacagcaaaagggatggaaaaaaaagctcaagcctatgtctgcctgtactaccaccacttgtgagatggagcagcgcggcatcactgtcctacatccatccctgcccctaccatatctctctctccacccttgggtacgctgagcacaaacaaggggcaattggtaaggagcacaaggcctgggctctgatgggagtggagtgaggcgctgcacgggattctctgcttctgcgtggtagagcaggtacggtgagacagcagagaaatcaagtgacgggtgaaaagattgttgccatcagtcagggatgaacagcaaggagatgtgccaagaaccgtgcgacgagctgtccgagatcagcagccaggaggcgtccaactcctccggcctggtaagcctcgacctcacgctcaccgtcgccgccgccgccgccgccgagtcgagcactaccgacaacagtaacagcggcggcacgccggccgacgcggcggcggtcgcccgcgagccgtcgcgcgtgttcacgtgcaactactgccagcgcaagttcttcagctcgcaggcgctgggcgggcaccagaacgcgcaccggcgggagcgcacgctggcccggcgcacgctgcggctcgacgcggcgggcccctacggctactacgccgacgtggcgtccctgccgctgtacggctccggcctgtaccccatcggcatccaggcgcacgcatcgatggcagcgcacccggagcagcagcagcggcacgaggacgccgccgagctgaggcccgcgcgggggctgctgagccccatgccattcctcgtggccgacgaggcggagatgagcttcggctggcccgggagcttcagaccagccaccgccgtcgctcctgcgccggcggggagcgccgtcctgaactcggctggcggcgtcgccgtgcatgcccgggaggagcccgatctgacgctcaggctgtgaagtgtgtgtgaactgatccgtcgactagactggttaatccgtcaggctttcattctctttaaattgatgatcggcccatggctgatgcagatcagaccgtggcggtctcttgcttgaccagattcttcctattgtttcgtgtgcgtgcaagaatttttgtacagcagttggatgtgcaagagctcgagatatctctctttattcaatgatcttggtatgctatcgcatgttcgtacgcgttccagctgtgaaacacaatgcgccatggctgtgaaacacaaccgtcgtcggcgcgacagccgccatcgctaccgggcgttcgcgaagccgcagcggcgagcgagaggttagtgcttgtccgcggccaacacagaaatcggcggcctttctgct

SEQ ID NO: 6955 - DNA, 1724 bp, Zea Mays
cgcatcgcaggcatgttacgcaagaacagctgcgacgcgcaatgggggggggcacaattctgacaaaaatctcatggcgctacctctggtcccctaccactcccaactctcccacaagtcacacacatcccttgaattgaatcccttttcatccctctctcttttcaatgctcctatcccttcgctcccggaaacgaaatatctacgagtacattagcatctcaactcagtgcttttagatgggtggaagtggaagcacgcttaatccagcagcccccagttgtttactctttactgcaagctgtgggcactttctatcgtgcccttttccttagatggtggtagtagtggtggtggtacaaagacagcaaaagggatggaaaaaaaagctcaagcctatgtctgcctgtactaccaccacttgtgagatggagcagcgcggcatcactgtcctacatccatccctgcccctaccatagtatctctctctccacccttgggtacgctgagcacaaacaaggggcaattggtaaggagcacaaggcctgggctctgatgggagtggagtgaggcgctgcacgggattctctgcttctgcgtggtagagcaggtacggtgagacagcagagaaatcaagtgacgggtgaaaagattgttgccatcagtcagggatgaacagcaaggagatgtgccaagaaccgtgcgacgagctgtccgagatcagcagccaggaggcgtccaactcctccggcctggtaagcctcgacctcacgctcaccgtcgccgccgccgccgccgccgagtcgagcactaccgacaacagtaacagcggcggcacgccggccgacgcggcggcggtcgcccgcgagccgtcgcgcgtgttcacgtgcaactactgccagcgcaagttcttcagctcgcaggcgctgggcgggcaccagaacgcgcaccggcgggagcgcacgctggcccggcgcacgctgcggctcgacgcggcgggcccctacggctactacgccgacgtggcgtccctgccgctgtacggctccggcctgtaccccatcggcatccaggcgcacgcatcgatggcagcgcacccggagcagcagcagcggcacgaggacgccgccgagctgaggcccgcgcgggggctgctgagccccatgccattcctcgtggccgacgaggcggagatgagcttcggctggcccgggagcttcagaccagccaccgccgtcgctcctgcgccggcggggagcgccgtcctgaactcggctggcggcgtcgccgtgcatgcccgggaggagcccgatctgacgctcaggctgtgaagtgtgtgtgaactgatccgtcgactagactggttaatccgtcaggctttcattctctttaaattgatgatcggcccatggctgatgcagatcagaccgtggcggtctcttgcttgaccagattcttcctattgtttcgtgtgcgtgcaagaatttttgtacagcagttggatgtgcaagagctcgagatatctctctttattcaatgatcttggtatgctatcgcatgttcgtacgcgttccagctgtgaaacacaatgcgccatggctgtgaaacacaaccgtcgtcggcgcgacagccgccatcgctaccgggcgttcgcgaagccgcagcggcgagcgagaggttagtgcttgtccgcggccaacacagaaatcggcggcctttctgct

SEQ ID NO: 6956 - DNA, 1162 bp, Zea Mays
atcgagtgcgtgagaggtgcaatttggaacactttgcaactggttctgtctgtgtacatgggttcaagggtgaaggataattctgagcaaggacagggtaatgatgctaggagtaaatgtactcaaagctctgtcgttgagcccacacaaccatcttcagggtctgttgtgcttaaccctatgatgccattttggcctgtgccccctcccatggctggcccagcaactactctgaatatgggagtggattactggggtactcctgcttctgtacccatgcatggtaaagttattgcagcaccgacatcagctccttcgtcaaattcacgtgatattgttctcagtgatccgactatacaggatgggagagaactgaagagacaaaaacggaagcaatcaaatagggaatcagctcgacgctcaagattgcgcaagcaggctgaatgggaggaagtagccaatcgtgcagatttgctaaagcaggaaaatagttcacttaaagaagaattgaaacaacttcaggagaagtgtgatggcttgacctcagaaaatacatctctacatgagaagcttaaagcgcttgaggatgagaaatcaaatggaaattggtacaaggattaaaggctgaaacttctctctctttctgactgctgatataatttggtggtaacctgataggacgacaactaaggaggtattcatatacggtattagacttttgtccgagggggtaaaattgtatcataggatttgacatggttgacggctacagattcttcgtccagttgtgctgctgtgctgtgttgtctttcttccctcttcgtgctagatcctacagaagtacaactatgtagaaacccccaggtggtgtttgaagcctggggggattagcgtgtggtattggtatagctgttgtagagctgctcactgagcttcttgacagaaactgaagcgtgctaaagcagtcgtgtgatttacgattcagacggattaattttacggatagtaatgtaactgcactcatgaatacaaatagccttttactgatttcgccctgtacggggaacggctttggaaaactgtggaagctgaacagtgtgtggtgttgctcatatgttagttgggaacgtattattcccatgtacaagatgcagcaactcag

SEQ ID NO: 6957 - DNA, 2736 bp, Zea Mays
aaagctttcttttaacatgataagctcacaaagttggttgggtattgctagggttatttgatgtccgattattagaaaaaaagaaaaacaggaaaaccacgctgtgtctctgcctccgttgtctgtccgacccggcgttgtgattgggggagtatgaagtgctcacaccatctcctctccattcacatcagcgctccacgcctgcgcccctgaattcccaaatcctgcgcgcctctgccccaaccccgctcgtcgactcctctctgccaaacacgtcggaggaatccttctccggaactcgtcttcgtcctgtctgtcgggctggcgtggagtggagatccatcaccacgtggataggtctcttcttctgctggttcaacgctgaatctgtccttcaatgccttcacaggctctacccctgaagaagttgcagagttagaagctattgccgcattttttgttgaagggaacatttttttgggtcatatccagattgaatacgaaacatgctcgtccttttgggactttaagagaataagaggcaaaaggaacataaggatagaggagagaaataaacaatggggaagggagatgtggctaccaggtcaaaatctcaaaaatcaccagcaatacagaatgagcagagtacacctgctaacccgcccacagcatatcctgattggtctcagttccaggcatactataatgctgctgggacagctccagtgaccccacctttttttcatccatctgtagctccaagccatcaggggcacccatatatgtggggtccacaggtatattctctctcttcaaccattttgcaagaataagtctagcagctagtgtaagtctgcaacatgaggtttaatgagttgatgttaggatgaacctgtcttctgctacttgtagtacgaggtacgattctggcagattttttaacatttgttcatatggtttgctagccatttatttattttaaggatactatcagctaccacaaccattgtaaaaaaactcggccggggagggtaagaccaccctcacggtattatattaatagaaggccgcgacaacggtcccgaccgagaaatccccgaaccccgtcctcccatcactaacgggcagggtcaaagctgcttactctgcaaaggcccacctaggcctgagggtggcgcacaaccgagctgtaacccgagagcggacgaggaacaatgaggggatttttttgtacagggccagggtattaccccatgacctggtgaaagggaccactgagccgtaatgcaaccattgtaactctggagataatccgtcatctaacatttgattattcaactggatagatgatgtctccttatgggacaccaccaccatatgcagcaatgtatgcacaaggtacaccatatcagcaggcaccaatgccaccgggttcacacccatacagtccttatcctatgcagttaccaaacgggacagttcaaactccaacatctggtgctggtggtacagcgacagataaatcaaataaaaataagcggaaggcttccctcaagagatcaaaaggaagcttaggtagtctggatgttgttgcagtaaaaaataacaagtcaccggcaaagccttcaacttcttcctccaatgaaggttcttcacaaagtgagagtggaagcgggagttcttctgaaggaagcagtacaaattcaaaaagtggttcaagggtgaaggataattctgagcaaggacagggtaatgatgctaggagtaaatgtactcaaagctctgtcgttgagcccacacaaccatcttcagggtctgttgtgcttaaccctatgatgccattttggcctgtgccccctcccatggctggcccagcaactactctgaatatgggagtggattactggggtactcctgcttctgtacccatgcatggtaaagttattgcagcaccgacatcagctccttcgtcaaattcacgtgatattgttctcagtgatccgactatacaggatgggagagaactgaagagacaaaaacggaagcaatcaaatagggaatcagctcgacgctcaagattgcgcaagcaggctgaatgggaggaagtagccaatcgtgcagatttgctaaagcaggaaaatagttcacttaaagaagaattgaaacaacttcaggagaagtgtgatggcttgacctcagaaaatacatctctacatgagaagcttaaagcgcttgaggatgagaaatcaaatggaaattggtacaaggattaaaggctgaaacttctctctctttctgactgctgatataatttggtggtaacctgataggacgacaactaaggagattcttcgtccagttgtgctgctgtgctgtgttgtctttcttccctcttcgtgctagatcctacagaagtacaactatgtagaaacccccaggtggtgtttgaagcctggggggattagcgtgtggtattggtatagctgttgtagagctgctcactgagcttcttgacagaaactgaagcgtgctaaagcagtcgtgtgatttacgattcagacggattaattttacggatagtaatgtaactgcactcatgaatacaaatagccttttactgatttcgccctgtacggggaacggctttggaaaactgtggaagctgaacagtgtgtggtgttgctcatatgttagttgggaacgtattattcccatgtacaagatgcagcaactcag

SEQ ID NO: 6958 - DNA, 2297 bp, Zea Mays
aaagctttcttttaacatgataagctcacaaagttggttgggtattgctagggttatttgatgtccgattattagaaaaaaagaaaaacaggaaaaccacgctgtgtctctgcctccgttgtctgtccgacccggcgttgtgattgggggagtatgaagtgctcacaccatctcctctccattcacatcagcgctccacgcctgcgcccctgaattcccaaatcctgcgcgcctctgccccaaccccgctcgtcgactcctctctgccaaacacgtcggaggaatccttctccggaactcgtcttcgtcctgtctgtcgggctggcgtggagtggagatccatcaccacgtggataggtctcttcttctgctggttcaacgctgaatctgtccttcaatgccttcacaggctctacccctgaagaagttgcagagttagaagctattgccgcattttttgttgaagggaacatttttttgggtcatatccagattgaatacgaaacatgctcgtccttttgggactttaagagaataagaggcaaaaggaacataaggatagaggagagaaataaacaatggggaagggagatgtggctaccaggtcaaaatctcaaaaatcaccagcaatacagaatgagcagagtacacctgctaacccgcccacagcatatcctgattggtctcagttccaggcatactataatgctgctgggacagctccagtgaccccacctttttttcatccatctgtagctccaagccatcaggggcacccatatatgtggggtccacagggccagggtattaccccatgacctggtgaaagggaccactgagccgtaatgcaaccattgtaactctggagataatccgtcatctaacatttgattattcaactggatagatgatgtctccttatgggacaccaccaccatatgcagcaatgtatgcacaaggtacaccatatcagcaggcaccaatgccaccgggttcacacccatacagtccttatcctatgcagttaccaaacgggacagttcaaactccaacatctggtgctggtggtacagcgacagataaatcaaataaaaataagcggaaggcttccctcaagagatcaaaaggaagcttaggtagtctggatgttgttgcagtaaaaaataacaagtcaccggcaaagccttcaacttcttcctccaatgaaggttcttcacaaagtgagagtggaagcgggagttcttctgaaggaagcagtacaaattcaaaaagtggttcaagggtgaaggataattctgagcaaggacagggtaatgatgctaggagtaaatgtactcaaagctctgtcgttgagcccacacaaccatcttcagggtctgttgtgcttaaccctatgatgccattttggcctgtgccccctcccatggctggcccagcaactactctgaatatgggagtggattactggggtactcctgcttctgtacccatgcatggtaaagttattgcagcaccgacatcagctccttcgtcaaattcacgtgatattgttctcagtgatccgactatacaggatgggagagaactgaagagacaaaaacggaagcaatcaaatagggaatcagctcgacgctcaagattgcgcaagcaggctgaatgggaggaagtagccaatcgtgcagatttgctaaagcaggaaaatagttcacttaaagaagaattgaaacaacttcaggagaagtgtgatggcttgacctcagaaaatacatctctacatgagaagcttaaagcgcttgaggatgagaaatcaaatggaaattggtacaaggattaaaggctgaaacttctctctctttctgactgctgatataatttggtggtaacctgataggacgacaactaaggagattcttcgtccagttgtgctgctgtgctgtgttgtctttcttccctcttcgtgctagatcctacagaagtacaactatgtagaaacccccaggtggtgtttgaagcctggggggattagcgtgtggtattggtatagctgttgtagagctgctcactgagcttcttgacagaaactgaagcgtgctaaagcagtcgtgtgatttacgattcagacggattaattttacggatagtaatgtaactgcactcatgaatacaaatagccttttactgatttcgccctgtacggggaacggctttggaaaactgtggaagctgaacagtgtgtggtgttgctcatatgttagttgggaacgtattattcccatgtacaagatgcagcaactcag

SEQ ID NO: 6959 - DNA, 2753 bp, Zea Mays
aaagctttcttttaacatgataagctcacaaagttggttgggtattgctagggttatttgatgtccgattattagaaaaaaagaaaaacaggaaaaccacgctgtgtctctgcctccgttgtctgtccgacccggcgttgtgattgggggagtatgaagtgctcacaccatctcctctccattcacatcagcgctccacgcctgcgcccctgaattcccaaatcctgcgcgcctctgccccaaccccgctcgtcgactcctctctgccaaacacgtcggaggaatccttctccggaactcgtcttcgtcctgtctgtcgggctggcgtggagtggagatccatcaccacgtggataggtctcttcttctgctggttcaacgctgaatctgtccttcaatgccttcacaggctctacccctgaagaagttgcagagttagaagctattgccgcattttttgttgaagggaacatttttttgggtcatatccagattgaatacgaaacatgctcgtccttttgggactttaagagaataagaggcaaaaggaacataaggatagaggagagaaataaacaatggggaagggagatgtggctaccaggtcaaaatctcaaaaatcaccagcaatacagaatgagcagagtacacctgctaacccgcccacagcatatcctgattggtctcagttccagctccaagccatcaggggcacccatatatgtggggtccacaggtatattctctctcttcaaccattttgcaagaataagtctagcagctagtgtaagtctgcaacatgaggtttaatgagttgatgttaggatgaacctgtcttctgctacttgtagtacgaggtacgattctggcagattttttaacatttgttcatatggtttgctagccatttatttattttaaggatactatcagctaccacaaccattgtaaaaaaactcggccggggagggtaagaccaccctcacggtattatattaatagaaggccgcgacaacggtcccgaccgagaaatccccgaaccccgtcctcccatcactaacgggcagggtcaaagctgcttactctgcaaaggcccacctaggcctgagggtggcgcacaaccgagctgtaacccgagagcggacgaggaacaatgaggggatttttttgtacagggccagggtattaccccatgacctggtgaaagggaccactgagccgtaatgcaaccattgtaactctggagataatccgtcatctaacatttgattattcaactggatagatgatgtctccttatgggacaccaccaccatatgcagcaatgtatgcacaaggtacaccatatcagcaggcaccaatgccaccgggttcacacccatacagtccttatcctatgcagttaccaaacgggacagttcaaactccaacatctggtgctggtggtacagcgacagataaatcaaataaaaataagcggaaggcttccctcaagagatcaaaaggaagcttaggtagtctggatgttgttgcagtaaaaaataacaagtcaccggcaaagccttcaacttcttcctccaatgaaggttcttcacaaagtgagagtggaagcgggagttcttctgaaggaagcagtacaaattcaaaaagtggttcaagggtgaaggataattctgagcaaggacagggtaatgatgctaggagtaaatgtactcaaagctctgtcgttgagcccacacaaccatcttcagggtctgttgtgcttaaccctatgatgccattttggcctgtgccccctcccatggctggcccagcaactactctgaatatgggagtggattactggggtactcctgcttctgtacccatgcatggtaaagttattgcagcaccgacatcagctccttcgtcaaattcacgtgatattgttctcagtgatccgactatacaggatgggagagaactgaagagacaaaaacggaagcaatcaaatagggaatcagctcgacgctcaagattgcgcaagcaggctgaatgggaggaagtagccaatcgtgcagatttgctaaagcaggaaaatagttcacttaaagaagaattgaaacaacttcaggagaagtgtgatggcttgacctcagaaaatacatctctacatgagaagcttaaagcgcttgaggatgagaaatcaaatggaaattggtacaaggattaaaggctgaaacttctctctctttctgactgctgatataatttggtggtaacctgataggacgacaactaaggaggtattcatatacggtattagacttttgtccgagggggtaaaattgtatcataggatttgacatggttgacggctacagattcttcgtccagttgtgctgctgtgctgtgttgtctttcttccctcttcgtgctagatcctacagaagtacaactatgtagaaacccccaggtggtgtttgaagcctggggggattagcgtgtggtattggtatagctgttgtagagctgctcactgagcttcttgacagaaactgaagcgtgctaaagcagtcgtgtgatttacgattcagacggattaattttacggatagtaatgtaactgcactcatgaatacaaatagccttttactgatttcgccctgtacggggaacggctttggaaaactgtggaagctgaacagtgtgtggtgttgctcatatgttagttgggaacgtattattcccatgtacaagatgcagcaactcag

SEQ ID NO: 6960 - DNA, 2386 bp, Zea Mays
aaagctttcttttaacatgataagctcacaaagttggttgggtattgctagggttatttgatgtccgattattagaaaaaaagaaaaacaggaaaaccacgctgtgtctctgcctccgttgtctgtccgacccggcgttgtgattgggggagtatgaagtgctcacaccatctcctctccattcacatcagcgctccacgcctgcgcccctgaattcccaaatcctgcgcgcctctgccccaaccccgctcgtcgactcctctctgccaaacacgtcggaggaatccttctccggaactcgtcttcgtcctgtctgtcgggctggcgtggagtggagatccatcaccacgtggataggtctcttcttctgctggttcaacgctgaatctgtccttcaatgccttcacaggctctacccctgaagaagttgcagagttagaagctattgccgcattttttgttgaagggaacatttttttgggtcatatccagattgaatacgaaacatgctcgtccttttgggactttaagagaataagaggcaaaaggaacataaggatagaggagagaaataaacaatggggaagggagatgtggctaccaggtcaaaatctcaaaaatcaccagcaatacagaatgagcagagtacacctgctaacccgcccacagcatatcctgattggtctcagttccaggcatactataatgctgctgggacagctccagtgaccccacctttttttcatccatctgtagctccaagccatcaggggcacccatatatgtggggtccacaggtatattctctctcttcaaccattttgcaagaataagtctagcagctagtgtaagtctgcaacatgaggtttaatgagttgatgttaggatgaacctgtcttctgctacttgtagtacgagatgatgtctccttatgggacaccaccaccatatgcagcaatgtatgcacaaggtacaccatatcagcaggcaccaatgccaccgggttcacacccatacagtccttatcctatgcagttaccaaacgggacagttcaaactccaacatctggtgctggtggtacagcgacagataaatcaaataaaaataagcggaaggcttccctcaagagatcaaaaggaagcttaggtagtctggatgttgttgcagtaaaaaataacaagtcaccggcaaagccttcaacttcttcctccaatgaaggttcttcacaaagtgagagtggaagcgggagttcttctgaaggaagcagtacaaattcaaaaagtggttcaagggtgaaggataattctgagcaaggacagggtaatgatgctaggagtaaatgtactcaaagctctgtcgttgagcccacacaaccatcttcagggtctgttgtgcttaaccctatgatgccattttggcctgtgccccctcccatggctggcccagcaactactctgaatatgggagtggattactggggtactcctgcttctgtacccatgcatggtaaagttattgcagcaccgacatcagctccttcgtcaaattcacgtgatattgttctcagtgatccgactatacaggatgggagagaactgaagagacaaaaacggaagcaatcaaatagggaatcagctcgacgctcaagattgcgcaagcaggctgaatgggaggaagtagccaatcgtgcagatttgctaaagcaggaaaatagttcacttaaagaagaattgaaacaacttcaggagaagtgtgatggcttgacctcagaaaatacatctctacatgagaagcttaaagcgcttgaggatgagaaatcaaatggaaattggtacaaggattaaaggctgaaacttctctctctttctgactgctgatataatttggtggtaacctgataggacgacaactaaggaggtattcatatacggtattagacttttgtccgagggggtaaaattgtatcataggatttgacatggttgacggctacagattcttcgtccagttgtgctgctgtgctgtgttgtctttcttccctcttcgtgctagatcctacagaagtacaactatgtagaaacccccaggtggtgtttgaagcctggggggattagcgtgtggtattggtatagctgttgtagagctgctcactgagcttcttgacagaaactgaagcgtgctaaagcagtcgtgtgatttacgattcagacggattaattttacggatagtaatgtaactgcactcatgaatacaaatagccttttactgatttcgccctgtacggggaacggctttggaaaactgtggaagctgaacagtgtgtggtgttgctcatatgttagttgggaacgtattattcccatgtacaagatgcagcaactcag

SEQ ID NO: 6961 - DNA, 1293 bp, Zea Mays
agatgcctttggtctactatattgtcccagatggcaaatgaattggccaggaggatgtgagcacattaacaattctggtgatggggaaaggtggagtgggaaagtcatccactgttaactccatcgttggggagagggttgcctctgtcagcgctttccagtctgagggtctgagaccaatgatgtgctcgcgcacaagggcagggttcactttgaacattatcgacactcctgggcttattgaaggtggatacattaatgagcaggccgttgacatcattaagagatttcttctaggcaagactatcgatgttctcctgtacgtggatcgtttggatgcgtatagaatggatacactggatgaacaggttataagagccatcaccaattcatttggaaaagatatttggcgaagatcattggttgtgttgacccatgcccaactctcaccacctgatggaatcgactataatgatttctttacaagaagatcagaggcacttttgcgatacatccactcaggagcaggaatcaacaaacgagaatatggggatttccccttgccaatagcattggtggagaacagtggaaggtgcaagactaatgagcatggggagaagatacttccggacggaactctgtgggttccaaacctgatgaaagaaattactgttgtcatctcaaacgggagcagtcccactcatgttgatcagaagttaattgatggtccaaaccctaacaatcgccgaaagttgttcataccacttatccttgctgtggagtacttcttggtggtaaaaggaatccggagggcgatccatgcagatatcgcaaacgggaaggtagatgactgggagcagcgttaccgggacctggtgggaagcagggacctcgtagagcagaaaggttctacctcccggaaccgcaaagcctaagttggtgtaccagaaaggattctattcgtgttgagacccacccactcgatctgctgctccttttcctaaatctgtgctgggggctttatagagttcgctggtactacttgaaaaaaaaatgctcctgttgtagttgataagattatgtttcccattttatgacgattggccgtcttcgcaattttgaagatgttatcgaatacgtgttattttattgttttaaattatatatggcatggaaacatcaagtgtggactggagtgctctgaacatcctcaaacgtcggttgataagatcaatgtgttgcagttcggccatataaaatttaaatcaaccgatcggttgataagatcaatgt

SEQ ID NO: 6962 - DNA, 1504 bp, Zea Mays
aagagcaaagaggccaagcaaggcccgagcctcggacccaaacccaaacatccatctcatcgatctccttatcccttcccgtcgcataaacccccgccgccgtgacctcgcagcgaccctgccctcgttctaggctttcattgcaggcctcgcgtctccagggcaagagaaaggagaggatggcgtcgccgataccgcgcgagtgggtcgggctgcagcagtttccggcggctacacagaccaagctgcacgaactcctcggcaaactcaaggaggaggatgtgagcacattaacaattctggtgatggggaaaggtggagtgggaaagtcatccactgttaactccatcgttggggagagggttgcctctgtcagcgctttccaggtcttgcttctacatgttctaagtttctgggttcactttgaacattatcgacactcctgggcttattgaaggtggatacattaatgagcaggccgttgacatcattaagagatttcttctaggcaagactatcgatgttctcctgtacgtggatcgtttggatgcgtatagaatggatacactggatgaacaggttataagagccatcaccaattcatttggaaaagatatttggcgaagatcattggttgtgttgacccatgcccaactctcaccacctgatggaatcgactataatgatttctttacaagaagatcagaggcacttttgcgatacatccactcaggagcaggaatcaacaaacgagaatatggggatttccccttgccaatagcattggtggagaacagtggaaggtgcaagactaatgagcatggggagaagatacttccggacggaactctgtgggttccaaacctgatgaaagaaattactgttgtcatctcaaacgggagcagtcccactcatgttgatcagaagttaattgatggtccaaaccctaacaatcgccgaaagttgttcataccacttatccttgctgtggagtacttcttggtggtaaaaggaatccggagggcgatccatgcagatatcgcaaacgggaaggtagatgactgggagcagcgttaccgggacctggtgggaagcagggacctcgtagagcagaaaggttctacctcccggaaccgcaaagcctaagttggtgtaccagaaaggattctattcgtgttgagacccacccactcgatctgctgctccttttcctaaatctgtgctgggggctttatagagttcgctggtactacttgaaaaaaaaatgctcctgttgtagttgataagattatgtttcccattttatgacgattggccgtcttcgcaattttgaagatgttatcgaatacgtgttattttattgttttaaattatatatggcatggaaacatcaagtgtggactggagtgctctgaacatcctcaaacgtcggttgataagatcaatgtgttgcagttcggccatataaaatttaaatcaaccgatcggttgataagatcaatgt

SEQ ID NO: 6963 - DNA, 1416 bp, Zea Mays
aagagcaaagaggccaagcaaggcccgagcctcggacccaaacccaaacatccatctcatcgatctccttatcccttcccgtcgcataaacccccgccgccgtgacctcgcagcgaccctgccctcgttctaggctttcattgcaggcctcgcgtctccagtggcagggcaagagaaaggagaggatggcgtcgccgataccgcgcgagtgggtcgggctgcagcagtttccggcggctacacagaccaagctgcacgaactcctcggcaaactcaaggaggagtctgagggtctgagaccaatgatgtgctcgcgcacaagggcagggttcactttgaacattatcgacactcctgggcttattgaaggtggatacattaatgagcaggccgttgacatcattaagagatttcttctaggcaagactatcgatgttctcctgtacgtggatcgtttggatgcgtatagaatggatacactggatgaacaggttataagagccatcaccaattcatttggaaaagatatttggcgaagatcattggttgtgttgacccatgcccaactctcaccacctgatggaatcgactataatgatttctttacaagaagatcagaggcacttttgcgatacatccactcaggagcaggaatcaacaaacgagaatatggggatttccccttgccaatagcattggtggagaacagtggaaggtgcaagactaatgagcatggggagaagatacttccggacggaactctgtgggttccaaacctgatgaaagaaattactgttgtcatctcaaacgggagcagtcccactcatgttgatcagaagttaattgatggtccaaaccctaacaatcgccgaaagttgttcataccacttatccttgctgtggagtacttcttggtggtaaaaggaatccggagggcgatccatgcagatatcgcaaacgggaaggtagatgactgggagcagcgttaccgggacctggtgggaagcagggacctcgtagagcagaaaggttctacctcccggaaccgcaaagcctaagttggtgtaccagaaaggattctattcgtgttgagacccacccactcgatctgctgctccttttcctaaatctgtgctgggggctttatagagttcgctggtactacttgaaaaaaaaatgctcctgttgtagttgataagattatgtttcccattttatgacgattggccgtcttcgcaattttgaagatgttatcgaatacgtgttattttattgttttaaattatatatggcatggaaacatcaagtgtggactggagtgctctgaacatcctcaaacgtcggttgataagatcaatgtgttgcagttcggccatataaaatttaaatcaaccgatcggttgataagatcaatgt

SEQ ID NO: 6964 - DNA, 4372 bp, Zea Mays
aaccatgaaacggttctctttcccgttccaactcccatccaaacgccaccatacagtgctccgttcagcgcctaccttttcttctgcccgtccaccgtgcgcgaggcgctctctcgtgtagctactagacgaccgccaccgccgtctggtcttcgtcgggtccttcgccgatcaacacccaccatttatcgggtgtacatgtgtacacccatgtcctacactgggtccgcccccgagccttctgatcctaacaggaaacctgactcgacaatgggctgcgtggacacaccaagaggaggagatttttttcaatgcgctgcggcaagtaggaaaaaactttgacaagattacacaccgtgttcagagtaaaaacaaggatcaggtcaggcattactattatcgtcttgttcggcgcatgaagaagctactgggtcctaggttctcacttgatgcaaaaaactccaaggataccattgctgctatgcttcgctggtggtctctgcttgagaaatttagctgcactgcatcaaagttgcatctcaaacctcggaggttcaaaacatttgtagaagcactggggaaacaactgctaaaggacagaaataagtccaggagaaagcgttcacgagtggatatgtgcctaccttctccatctccaattatcagcaaagctcctgggaatgagaatcctcctgtaaagttcctgtcagtagatgctcagaatggtagcagagtagcatctcctaaagggtcaattttcaagcaggttgcagaaccgatttctaacaagccagggacaactaaaggggaactctctgccacaagaaccgtgaaacaaaaaaggaaggcaggtggcgctgttgcatctgctgcatataagaaatgggagagagcagccatggctggtgtttctttagttgctgatgcagctgaggagctcgagcgcaacacgattaacccaggcattttttgtaatgttgatgcaagaacactgacttcattatcagaaagactttctagcattgatggcattagcacaaatcatatgaaggaagcagattcacaggcacctgtgaagctgaagctacagttatttccaataaatgaagctactcggaaggcattggagaaggatgaccataatcctcatctagagctcacattaagctctagaaagaaaatatcatctgtgctagaacatctaaaccgaaaatggggtaactcaaacatcgcatctggagagcttattctttttccatattgtgctaatcaagaggatttggctacatatcagaggtggacaacaagagatactgttgcagtagctgatgtgtttctttctgtgaatagcccgtctgttttccgtttaaggtatggttgggtttcccttgttgagcttggagcaggagtaagtgaaatatctttaacccattttgaggattgcatgataccagaagtcatccaagtcaaatcgccatcaggagataaggcttgtgttcaaagtgatggtactttcctcagtaactgcattcatgatcaatatccttgtagttcgatgttattgcatattgttagatgttgtattgtgtgcataatgatgtattgtgtgattgtccctgtattgagcctaggcccacttaccgctattattaatacatcacccgacactgatttagggttagagtttcaatttctatcatgatatctagctaggttagtgttccttcttccccaccccaaccccaaccaccactgtagcagtgccaccggcgtcgctcccgcgccgaccgccttctctcccctccctccatctcgttgcgcggctcggtgcggccccacgtagctcctcctgcgactccttccctcggctcggctccgcctcgcgcctgcaaccttttgagctctgccttctccaacaccgtcgcctcctttttcggtgcgggcttcctcggctcaatgggcgcgcccattgcgccgccgcgcgggcgtgctggcaggccgccgcctcgcgggcgtgtcttcgtcttcttcgccgcgggcgacgcattgctcgagctcgaggcctccgtcggcgcctttcccccgggaacctgctgcgccatggacgacaacgactttcctccgtgccgcgcggtgctgtggacccgcgctccctggccgatgtcgtcgtcgcctccctagccgatgcagccgctgcctctctagccgatgcagccgctgccgcagttctccggaagccgcaactgtcagccgccaccaccatctctgctcacgatggcgtggcgccccgcacccagcatctccacgtgcggcggcctcactccctctccagcggaggtgatcttcaccgagctcgccgcccctccctcaccgacccaggtggcgcggtcgcctcctccctcggagacgcagccgtcctccccagcggctccaccaccagtggcgcatccttcgacaccagcggcgcggcttggctgcctccttccccagcgctgcgccggtcctgcccagcagctccaccgacgccccctcagtgtttccctcattgtcacggccattctcggcaccggtgccctcgctgtcgcgcgtcccagccgacatcgcgtccgttctcggcccgcacctcctcttggtcgtgtcgccccgccccgttgtcgacactctccatggtcggtgttccctccctcatggcccgcctcccatgcagtgcctcgtctgtgcctccctgcgtgcccgcgctctccttccccagtatcgccacccgtgtcgccttggctcccttccccgccacgtcgaccccctacgccgccgcgccgaaccctacctccaccgtggtttatgtgcctccctatcgtttgcgcttctcacttcacaccggacatcttccccggggcacttttgtggccttgaatcgggtcatgaaccctgttctccgtgattgcgtcgagctccacccttaggcgggtcgccacgctactgggtcatttgtgttccctagcgtcacgattgtctccatgatgatcgagatcttaccttcttccccacccatgattgtcgtcagcatgctcaccactaccggccctagcaccccttcctgtggttctatgggggtgcccccgatgtctctctcatctttccccatatcatcgccaccaccacctcccactaattgggttgctgactccgacgtctctttccacaccattcgtgaccccagagcggtctctttacctcatcctcccagccccatcttccctttcttcttcactattggtaatggaccgactatgcctgtcacctcagtaggtgacatgatccttcttggccctttgtacctcaacaacatccttgttgccctcaacatcttccagaaccttctctcggcgtcatcttcttcggcgctcttccccgagccgtcctctgtccatagtgcgctcgccgaccccaactggagtgtgctacgcaggagtacgtggccttacaggcgaaccacatctgagatctggtgccacgactctctggcaccaatgtggtcaccggaaatggatcttcaagcataagttgaaggcagatggctctttggatcaaaacagggctcgctgggtcttgtggagcttcacccagtgtctcggggtggagtatgactgtaacaccctgtccattcccggactgacggtacttactcctgacagctctctaggatcatatattgtccccacagaccaacacgattcttttgtgcgcactttgtcctcactcatgcgcacccgagaaaactacctgacatggtttttaaagcggtaaggcgctccaaggcgttggaccaccgcctagacgcctaggcggcgcctaggcgacgcctaggcgaggtaggcgggcaaggcgcctaggcgtcagaccaccgcccggacgcctaggcgtcgcctaggcgacgccttaaaaacagtgctacctggtcggtcacccatcccaaattgctccaagccaaacacacttaacttgaaggttgtttcgagataggcttacgaaaaagaagatgcaccttgttgatatgagtactctattaagtcttaggccaggatatcaccatcccctggggctaggatatcataatccactcccttagaagactgatgtcctcgtcggtcaaccccaatccattaaccttccctcttaggcacatctgtgtatctagtgtcgtcatatgccatgccatgtgaccactccgggcccacatgcgccatgcgccatatactcgaacccctaactcacacatgcccgtgaaactcgcgagggtcggctctgataccacttgtaacaccccgtccattcccggaccggtggtacttactcctgacagctctctaggatc

SEQ ID NO: 6965 - DNA, 4453 bp, Zea Mays
agtcatatggctagtatccatatatttctgtgatccgtacctaaatggtaggattattttgcaatctgttacctattcagaacttgttttgttacatctggatcgagagagattgaatgagatcgcttcatatatctctgatccatagccaaatatgagtattttccaatccataacccattatatatttatatgtcattaacccatgctcttgtcttcaaccatgaaacggttctctttcccgttccaactcccatccaaacgccaccatacagtgctccgttcagcgcctaccttttcttctgcccgtccaccgtgcgcgaggcgctctctcgtgtagctactagacgaccgccaccgccgtctggtcttcgtcgggtccttcgccgatcaacacccaccatttatcgggtgtacatgtgtacacccatgtcctacactgggtccgcccccgagccttctgatcctaacaggaaacctgcaaaaaagcagactcgacaatgggctgcgtggacacaccaagaggaggagatttttttcaatgcgctgcggcaagtaggaaaaaactttgacaagattacacaccgtgttcagagtaaaaacaaggatcaggtcaggcattactattatcgtcttgttcggcgcatgaagaagctactgggtcctaggttctcacttgatgcaaaaaactccaaggataccattgctgctatgcttcgctggtggtctctgcttgagaaatttagctgcactgcatcaaagttgcatctcaaacctcggaggttcaaaacatttgtagaagcactggggaaacaactgctaaaggacagaaataagtccaggagaaagcgttcacgagtggatatgtgcctaccttctccatctccaattatcagcaaagctcctgggaatgagaatcctcctgttgcagaaccgatttctaacaagccagggacaactaaaggggaactctctgccacaagaaccgtgaaacaaaaaaggaaggcaggtggcgctgttgcatctgctgcatataagaaatgggagagagcagccatggctggtgtttctttagttgctgatgcagctgaggagctcgagcgcaacacgattaacccaggcattttttgtaatgttgatgcaagaacactgacttcattatcagaaagactttctagcattgatggcattagcacaaatcatatgaaggaagcagattcacaggcacctgtgaagctgaagctacagttatttccaataaatgaagctactcggaaggcattggagaaggatgaccataatcctcatctagagctcacattaagctctagaaagaaaatatcatctgtgctagaacatctaaaccgaaaatgggaggtggacaacaagagatactgttgcagtagctgatgtgtttctttctgtgaatagcccgtctgttttccgtttaaggtatggttgggtttcccttgttgagcttggagcaggagtaagtgaaatatctttaacccattttgaggattgcatgataccagaagtcatccaagtcaaatcgccatcaggagataaggcttgtgttcaaagtgatggtactttcctcagtaactgcattcatgatcaatatccttgtagttcgatgttattgcatattgttagatgttgtattgtgtgcataatgatgtattgtgtgattgtccctgtattgagcctaggcccacttaccgctattattaatacatcacccgacactgatttagggttagagtttcaatttctatcatgatatctagctaggttagtgttccttcttccccaccccaaccccaaccaccactgtagcagtgccaccggcgtcgctcccgcgccgaccgccttctctcccctccctccatctcgttgcgcggctcggtgcggccccacgtagctcctcctgcgactccttccctcggctcggctccgcctcgcgcctgcaaccttttgagctctgccttctccaacaccgtcgcctcctttttcggtgcgggcttcctcggctcaatgggcgcgcccattgcgccgccgcgcgggcgtgctggcaggccgccgcctcgcgggcgtgtcttcgtcttcttcgccgcgggcgacgcattgctcgagctcgaggcctccgtcggcgcctttcccccgggaacctgctgcgccatggacgacaacgactttcctccgtgccgcgcggtgctgtggacccgcgctccctggccgatgtcgtcgtcgcctccctagccgatgcagccgctgcctctctagccgatgcagccgctgccgcagttctccggaagccgcaactgtcagccgccaccaccatctctgctcacgatggcgtggcgccccgcacccagcatctccacgtgcggcggcctcactccctctccagcggaggtgatcttcaccgagctcgccgcccctccctcaccgacccaggtggcgcggtcgcctcctccctcggagacgcagccgtcctccccagcggctccaccaccagtggcgcatccttcgacaccagcggcgcggcttggctgcctccttccccagcgctgcgccggtcctgcccagcagctccaccgacgccccctcagtgtttccctcattgtcacggccattctcggcaccggtgccctcgctgtcgcgcgtcccagccgacatcgcgtccgttctcggcccgcacctcctcttggtcgtgtcgccccgccccgttgtcgacactctccatggtcggtgttccctccctcatggcccgcctcccatgcagtgcctcgtctgtgcctccctgcgtgcccgcgctctccttccccagtatcgccacccgtgtcgccttggctcccttccccgccacgtcgaccccctacgccgccgcgccgaaccctacctccaccgtggtttatgtgcctccctatcgtttgcgcttctcacttcacaccggacatcttccccggggcacttttgtggccttgaatcgggtcatgaaccctgttctccgtgattgcgtcgagctccacccttaggcgggtcgccacgctactgggtcatttgtgttccctagcgtcacgattgtctccatgatgatcgagatcttaccttcttccccacccatgattgtcgtcagcatgctcaccactaccggccctagcaccccttcctgtggttctatgggggtgcccccgatgtctctctcatctttccccatatcatcgccaccaccacctcccactaattgggttgctgactccgacgtctctttccacaccattcgtgaccccagagcggtctctttacctcatcctcccagccccatcttccctttcttcttcactattggtaatggaccgactatgcctgtcacctcagtaggtgacatgatccttcttggccctttgtacctcaacaacatccttgttgccctcaacatcttccagaaccttctctcggcgtcatcttcttcggcgctcttccccgagccgtcctctgtccatagtgcgctcgccgaccccaactggagtgtgctacgcaggagtacgtggccttacaggcgaaccacatctgagatctggtgccacgactctctggcaccaatgtggtcaccggaaatggatcttcaagcataagttgaaggcagatggctctttggatcaaaacagggctcgctgggtcttgtggagcttcacccagtgtctcggggtggagtatgactgtaacaccctgtccattcccggactgacggtacttactcctgacagctctctaggatcatatattgtccccacagaccaacacgattcttttgtgcgcactttgtcctcactcatgcgcacccgagaaaactacctgacatggtttttaaagcggtaaggcgctccaaggcgttggaccaccgcctagacgcctaggcggcgcctaggcgacgcctaggcgaggtaggcgggcaaggcgcctaggcgtcagaccaccgcccggacgcctaggcgtcgcctaggcgacgccttaaaaacagtgctacctggtcggtcacccatcccaaattgctccaagccaaacacacttaacttgaaggttgtttcgagataggcttacgaaaaagaagatgcaccttgttgatatgagtactctattaagtcttaggccaggatatcaccatcccctggggctaggatatcataatccactcccttagaagactgatgtcctcgtcggtcaaccccaatccattaaccttccctcttaggcacatctgtgtatctagtgtcgtcatatgccatgccatgtgaccactccgggcccacatgcgccatgcgccatatactcgaacccctaactcacacatgcccgtgaaactcgcgagggtcggctctgataccacttgtaacaccccgtccattcccggaccggtggtacttactcctgacagctctctaggatc

SEQ ID NO: 6966 - DNA, 4712 bp, Zea Mays
ataaaccctaaaccgccctattccccactcaatttcgccatggaaggcgacgaggcctcggcgccgcctcccccgccgtggatgcagaacaagtcggctgtggccatcaaggcctcgtcgggcccgctttccgccgcggccccccgcctctccgcctgctcccgtgcgctgccctcgtcccgcgacttccacttctacaacaacttcccggcattcaaatccccagtcggcgctgcagccaccaaggtcgacgcgtccctcggcgtgctcggcggggcttcgattctcccgacgcggcagcagctgttccccatgggcggcgacctcgacgacgcgcacgactggctcgtcgccctcaacaacgacctgctcgagcggttcggcgcctccacggacgagttcaaggccctacggcagaaggaggagacttcctggcggagggcggcgccgcaggctggggacgggttccaagtggattgcgagcgtgcggctggtggcgaacgcgtgcagttctgggttttgcctgatagcttttgctctgtgtctgatttcatagcaaaaaagcagactcgacaatgggctgcgtggacacaccaagaggaggagatttttttcaatgcgctgcggcaagtaggaaaagtaagaggcagtaaattctggatgcaatgctcttcttctatttgtaatctaattagcaaataataatcgattgatggataatcccatattgttttcccagaactttgacaagattacacaccgtgttcagagtaaaaacaaggatcaggtcaggcattactattatcgtcttgttcggcgcatgaagaagctactgggtcctaggttctcacttgatgcaaaaaactccaaggataccattgctgctatgcttcgctggtggtctctgcttgagaaatttagctgcactgcatcaaagttgcatctcaaacctcggaggttcaaaacatttgtagaagcactggggaaacaactgctaaaggacagaaataagtccaggagaaagcgttcacgagtggatatgtgcctaccttctccatctccaattatcagcaaagctcctgggaatgagaatcctcctgtaaagttcctgtcagtagatgctcagaatggtagcagagtagcatctcctaaagggtcaattttcaagcaggttgcagaaccgatttctaacaagccagggacaactaaaggggaactctctgccacaagaaccgtgaaacaaaaaaggaaggcaggtgggcacatattctctttccctttgttatgacctagccttgcctatcttttgtcaaaatctgtgtggttagagttttggtgaaattgtttttgattaattatcatgtagaggaccctctctagtggtgaatctttgttgcattaatgtggatagctggtgagctatgttttaggtggcgctgttgcatctgctgcatataagaaatgggagagagcagccatggctggtgtttctttagttgctgatgcagctgaggagctcgagcgcaacacgattaacccaggcattttttgtaatgttgatgcaagaacactgacttcattatcagaaagactttctagcattgatggcattagcacaaatcatatgaaggaagcagattcacaggcacctgtgaagctgaagctacagttatttccaataaatgaagctactcggaaggcattggagaaggtatggttgggtttcccttgttgagcttggagcaggagtaagtgaaatatctttaacccattttgaggattgcatgataccagaagtcatccaagtcaaatcgccatcaggagataaggcttgtgttcaaagtgatggtactttcctcagtaactgcattcatgatcaatatccttgtagttcgatgttattgcatattgttagatgttgtattgtgtgcataatgatgtattgtgtgattgtccctgtattgagcctaggcccacttaccgctattattaatacatcacccgacactgatttagggttagagtttcaatttctatcatgatatctagctaggttagtgttccttcttccccaccccaaccccaaccaccactgtagcagtgccaccggcgtcgctcccgcgccgaccgccttctctcccctccctccatctcgttgcgcggctcggtgcggccccacgtagctcctcctgcgactccttccctcggctcggctccgcctcgcgcctgcaaccttttgagctctgccttctccaacaccgtcgcctcctttttcggtgcgggcttcctcggctcaatgggcgcgcccattgcgccgccgcgcgggcgtgctggcaggccgccgcctcgcgggcgtgtcttcgtcttcttcgccgcgggcgacgcattgctcgagctcgaggcctccgtcggcgcctttcccccgggaacctgctgcgccatggacgacaacgactttcctccgtgccgcgcggtgctgtggacccgcgctccctggccgatgtcgtcgtcgcctccctagccgatgcagccgctgcctctctagccgatgcagccgctgccgcagttctccggaagccgcaactgtcagccgccaccaccatctctgctcacgatggcgtggcgccccgcacccagcatctccacgtgcggcggcctcactccctctccagcggaggtgatcttcaccgagctcgccgcccctccctcaccgacccaggtggcgcggtcgcctcctccctcggagacgcagccgtcctccccagcggctccaccaccagtggcgcatccttcgacaccagcggcgcggcttggctgcctccttccccagcgctgcgccggtcctgcccagcagctccaccgacgccccctcagtgtttccctcattgtcacggccattctcggcaccggtgccctcgctgtcgcgcgtcccagccgacatcgcgtccgttctcggcccgcacctcctcttggtcgtgtcgccccgccccgttgtcgacactctccatggtcggtgttccctccctcatggcccgcctcccatgcagtgcctcgtctgtgcctccctgcgtgcccgcgctctccttccccagtatcgccacccgtgtcgccttggctcccttccccgccacgtcgaccccctacgccgccgcgccgaaccctacctccaccgtggtttatgtgcctccctatcgtttgcgcttctcacttcacaccggacatcttccccggggcacttttgtggccttgaatcgggtcatgaaccctgttctccgtgattgcgtcgagctccacccttaggcgggtcgccacgctactgggtcatttgtgttccctagcgtcacgattgtctccatgatgatcgagatcttaccttcttccccacccatgattgtcgtcagcatgctcaccactaccggccctagcaccccttcctgtggttctatgggggtgcccccgatgtctctctcatctttccccatatcatcgccaccaccacctcccactaattgggttgctgactccgacgtctctttccacaccattcgtgaccccagagcggtctctttacctcatcctcccagccccatcttccctttcttcttcactattggtaatggaccgactatgcctgtcacctcagtaggtgacatgatccttcttggccctttgtacctcaacaacatccttgttgccctcaacatcttccagaaccttctctcggcgtcatcttcttcggcgctcttccccgagccgtcctctgtccatagtgcgctcgccgaccccaactggagtgtgctacgcaggagtacgtggccttacaggcgaaccacatctgagatctggtgccacgactctctggcaccaatgtggtcaccggaaatggatcttcaagcataagttgaaggcagatggctctttggatcaaaacagggctcgctgggtcttgtggagcttcacccagtgtctcggggtggagtatgactgtaacaccctgtccattcccggactgacggtacttactcctgacagctctctaggatcatatattgtccccacagaccaacacgattcttttgtgcgcactttgtcctcactcatgcgcacccgagaaaactacctgacatggtttttaaagcggtaaggcgctccaaggcgttggaccaccgcctagacgcctaggcggcgcctaggcgacgcctaggcgaggtaggcgggcaaggcgcctaggcgtcagaccaccgcccggacgcctaggcgtcgcctaggcgacgccttaaaaacagtgctacctggtcggtcacccatcccaaattgctccaagccaaacacacttaacttgaaggttgtttcgagataggcttacgaaaaagaagatgcaccttgttgatatgagtactctattaagtcttaggccaggatatcaccatcccctggggctaggatatcataatccactcccttagaagactgatgtcctcgtcggtcaaccccaatccattaaccttccctcttaggcacatctgtgtatctagtgtcgtcatatgccatgccatgtgaccactccgggcccacatgcgccatgcgccatatactcgaacccctaactcacacatgcccgtgaaactcgcgagggtcggctctgataccacttgtaacaccccgtccattcccggaccggtggtacttactcctgacagctctctaggatc

SEQ ID NO: 6967 - DNA, 2025 bp, Zea Mays
ctttgaatgtttggacgtctcacccagttggggagctttcttgtcactccttttatctttcttcttgtgagccctttccctttctttctgaagcttcagccaccagagcaatcgtcaattctgatttagaacagacgacgggatgcaatgcagtatttttgcaatatatgaattttgatatttacaaggacacaagaaatggttgtagcatttgcacagttcagacagtgatgcttcacaaagattgttcaattatcattgacttataattacacagttagccaaagaattgcattcagtttacaatcatgttgaacacattactttcttgacaacagttaagacctgcaacactgcacactctagaacaaaaactttcaatgaacacaaaaggtgtcagttgctattgctatacacggccaaaataatcctgaactcctttgccaacagaatagtggcacaaattacatcagaccagaaaaaaaaaagaaacataaatgcagtaccgacccacaggagcacagtagcaaagaaggaaccctaaaacagtaaaacaagatatgtaattcccattcaaactaatttgtctttccaacaacacaaaagggcgtcaaatactaatgctaccccgtgctaaggaacacaaaaagaacagcacaacatggcaaccgatccttttaccaaaatatgatattgtataaaaattaatttaaaattcaactaagaattgacatacacacacttagggatgaaagtggatatccaaattgtttagacaaatttaatattttaaaatagatatgtatgaaatttcatgatgatcttttcttatgttatcaaacacataattataattagaataaaatttgtataaattgttttatgcatttttcgctccttacagcaaaaaagatgaaaagaaaatatctgattccatatttttatatgtatccgaatttcatacctatcatttgagaaaatatatgatacaaataagatttaccttttattaatctttacaggctcaatggcaaaaacaaaaaatacaaatttgcatagaagattatatatcttatttattcgcaatcaaagaaaaataaataaatatccaaataagtatccattttcatcccccactatttacacagaaaattttgtgcaacatctaattaaacagtcacaaaagcacccatgcgtcatattctaaccatgcaaatttggccataacagatccctccagctcacgccgatgtaatgctagggcggctaaatgtgagatacaacagtgtcgaatcaaatttcttgtcctagcattctttcaatgttcctgataatcatgcaaccagtattcaaaaatcggtcttaatcaatctctaataggtgccatccaacttaaatttttaaatcgatctgaatggcatcgagtagctaagctacacaggtccagaattcgaaaatcggacttaattaatctggactagcggtcatccagcttaaaattttaaatcgatctgaatgtcatcgtgtagctaagctacacaggacgaatattcgaaaatcggactcaataaatctcgactagcggccatccaacttaaaattttaaatcgatctgaatgagatcgagtagctaagctacacagaattcagacacttccctctgactccgggctccgactcagggcttgttcggttattttcaatccatatggattggaggggattgatacggattgtgagagattttgacttaatagagattaaaacctccacaatccatatggattggggtagaaccgaacaagcaggttagctttcccagcacgtgcgatacccaaatcacacacgcacaacccacagatcctagcagcaacaaccaggaagaacaaacgatccggtgtgcgtgtgtaaatccgaaggttcaacaaaccttagcggtcgactccgcctcggccacggccactgggtttcccaagtacacaggcggcgggtaggggaagcacctcgacatgaccgacggtcgac

SEQ ID NO: 6968 - DNA, 70 bp, Zea Mays
atcttggttactttttagcttgatgcgaatgatgttacctgtaaaatgacaagtttgtgtgaataaaatc

SEQ ID NO: 6969 - DNA, 2010 bp, Zea Mays
gctaggatgggcagcggacaggtggttctcgtcggccgggtgacgccgggaagctcgatccagaaggagctggtgaaggaggccaagctctgcgccgccatggtcgtggtgcttggcgccaataagaagtactccttcggagggtcgtcctgcctggccaagtactgcgccaagaagctgccgccgacaaccaccgtcgtcgccatccaggacggcaaggccgtcttcgtccgggaggcgcccaggccgccacttggagcagagccaaagccggtgctccgcacggtgctgcacccgagcgtggggctggagcccaaggtgatcatcccgaacccgaaccggcgcgcgcggtccatgtccatggacttggacgccccatgctgcggtcacggcgccgcggacgcgccggcaagcaggtgcttggacgacgccaccaaaggcgacggcggcgtggcacccgagcagaggctcgggtggccgctgctccgccgcgcgcacgccgccgccgccgcctcagctgcccctgtacagacgcccggcggcaagaatcatgagccgcggaagcagtcggtggtgcactgggtgatgagcctgccccggcggtccgcgccgtcggagtccgccgagccgcatgccggggcggggctcgagtcggagctcaaggcaatgcttggcggcagtggcgcgcggtgccggtggttccgctacgaggagctctacgactccaccaaccacttctccgcagagaacctgatcgggaacggagggaacagcagggtgtacaggggcagcctcgcctgcggccggcaggtggcgatcaagttgtgcaaggcgtcggcggaggcgtccaaggacttcctccgggaggtggacatcatcaccaagctgcagcaccaccggatcgtccccttgatcggcgtctgcgtggaaggccgcaacctcatctccgtttaccgctacctccccaggggcagcctcgaggacaatctacacggggaaaggtcaaagccggcgctgtcgtgggagaaccggtacaaggctgcgctggggatcgcggaggctctgagctacctgcactccggcagcccgcggccggtgatccacagggacgtcaagtcgtccaacatcctcctcgcagaagagttcgagcctcagctatccgatttcgggctggccatctgggcgccgacgaatccgacgtccgtgacgcacagcgacgtcgtcggcacattcgggtacctggcgccggagtacttcatgtacgggaaggtgaccgacagggtggacgtgtacgcgttgggcgtcgtcctgctggagctcctgtccggccggaagtccatcagcagcgacgggtcgtcacccaagggccaggagagtctcgtcatgtgggcaactccggtgcttagcagcggcaacatctgtgacctgctggacccgaggctggacgtgaagcacgacgaggtggaggtcaggcggatggcctctgccgcgtcgctctgcctccggaggtcggctcgactcaggccgccgatatcgcagatactgagcatactacgaggagaaagcgcggcgagcatcgccgaccagggcgcgacggagccggactgcgtggacgacgaggcgtaccccgccgcgaacgtgaggtcgcacctgggcctcgcgcttctcgacgtggaggactcggagtccatctccagcacggagcacagcagcggcctcagcccgttggaggagtacctgcgagaacgttggagccgatcgtccagcttcgactgatgattcatgcccgcgctgcgattttgtttgtgggcatgtgttttagtttttttttccctctccgccggtaattcacatgtttatcgtatggtttggttaccggggccgtgtgtacagtggacagtcaaaaatcaccagagcgagccacatcttcggcgacaaagacgcgattggttgagcttgacctgcctcgcacctgccggccaggcaagttgcgtacaagtgacaagtcgc

SEQ ID NO: 6970 - DNA, 3235 bp, Zea Mays
aacctccaccaaggaattctttgcccaatgcgctcatcgtccccgtcacacctctgcccacgcaccatcgccgatcctattgcccactacaatttccccatttctctcacgtaagtaggccacaccatcgcgtcatctctgctccgcctccttcccgccggcttcccgccgtcctttcgctgccgctgccattaccgccactgccgcaccggctggccgcgctaaaacagcagccgcgcccgcgctacgctgaccggcgacggcggccggcaagactgcccgttcgtccggtcccttcactccaccttcgcgcaacggcacaaggcggcaagggaccggacggggccggcctcgtgctttttgtgcgtggttggagtggttgagcgagccgatggcgacgatcccgggcggcgtggcgccatgacggcagccatttcaatacgcgccccccagcagctgaaacctgacaagctaaccagattttaggtggttacccgtgccgtgtcgcctgcctcgcacacccctcgcccttcgcctcttttccaccctggacccaggatatagttcccgctctcgtcgcttgcgcttgtatcttcctcgtctcaggcctccccgccgcgcctttcggttcgggttcagcgaattcagccacgaagcgagcgggcggccggagggttcctggtaacggaactcgctcgctttccagtttccaggtcaggccaggcgacgaccgccgcctcggcagttttctattccagcgtcgcggttccgggtcagaaattggttgcaggctcgcagccagccagtagcccggcgagatcgtcttgtgacagcggcaagtccacggcggttagcaggttgagcgaaccagtggcctggctacttaccagcttgccgtgccatgtgcaactgcggttcttcctgctgatctcgggagctgcaagcccggctctcggccaccgttcgtgggcgtcatggcggcggaccacggggagggcgtcgggcggtgcatactggtggggctgcacatggacgccgtcggcagggacctgctccagtgggcgctccaccaggagacaagacgaacacactgaagctgatcaggacgctggacgactacctggcggaatacgaggctctctgcaaccagaaacaggtggttctcgtcggccgggtgacgccgggaagctcgatccagaaggagctggtgaaggaggccaagctctgcgccgccatggtcgtggtgcttggcgccaataagaagtactccttcggagggtcgtcctgcctggccaagtactgcgccaagaagctgccgccgacaaccaccgtcgtcgccatccaggacggcaaggccgtcttcgtccgggaggcgcccaggccgccacttggagcagagccaaagccggtgctccgcacggtgctgcacccgagcgtggggctggagcccaaggtgatcatcccgaacccgaaccggcgcgcgcggtccatgtccatggacttggacgccccatgctgcggtcacggcgccgcggacgcgccggcaagcaggtgcttggacgacgccaccaaaggcgacggcggcgtggcacccgagcagaggctcgggtggccgctgctccgccgcgcgcacgccgccgccgccgcctcagctgcccctgtacagacgcccggcggcaagaatcatgagccgcggaagcagtcggtggtgcactgggtgatgagcctgccccggcggtccgcgccgtcggagtccgccgagccgcatgccggggcggggctcgagtcggagctcaaggcaatgcttggcggcagtggcgcgcggtgccggtggttccgctacgaggagctctacgactccaccaaccacttctccgcagagaacctgatcgggaacggagggaacagcagggtgtacaggggcagcctcgcctgcggccggcaggtggcgatcaagttgtgcaaggcgtcggcggaggcgtccaaggacttcctccgggaggtggacatcatcaccaagctgcagcaccaccggatcgtccccttgatcggcgtctgcgtggaaggccgcaacctcatctccgtttaccgctacctccccaggggcagcctcgaggacaatgggaaaggtcaaagccggcgctgtcgtgggagaaccggtacaaggctgcgctggggatcgcggaggctctgagctacctgcactccggcagcccgcggccggtgatccacagggacgtcaagtcgtccaacatcctcctcgcagaagagttcgagcctcagctatccgatttcgggctggccatctgggcgccgacgaatccgacgtccgtgacgcacagcgacgtcgtcggcacattcgggtacctggcgccggagtacttcatgtacgggaaggtgaccgacagggtggacgtgtacgcgttgggcgtcgtcctgctggagctcctgtccggccggaagtccatcagcagcgacgggtcgtcacccaagggccaggagagtctcgtcatgtgggtaagagtgccgtccgtcctaccgatcatgcatctcatgtctctggcaattcatctgtgacgcagaggaaggagtaacaactgccttgtcgtgacaggcaactccggtgcttagcagcggcaacatctgtgacctgctggacccgaggctggacgtgaagcacgacgaggtggaggtcaggcggatggcctctgccgcgtcgctctgcctccggaggtcggctcgactcaggccgccgatatcgcagatactgagcatactacgaggagaaagcgcggcgagcatcgccgaccagggcgcgacggagccggactgcgtggacgacgaggcgtaccccgccgcgaacgtgaggtcgcacctgggcctcgcgcttctcgacgtggaggactcggagtccatctccagcacggagcacagcagcggcctcagcccgttggaggagtacctgcgagaacgttggagccgatcgtccagcttcgactgatgattcatgcccgcgctgcgattttgtttgtgggcatgtgttttagtttttttttccctctccgccggtaattcacatgtttatcgtatggtttggttaccggggccgtgtgtacagtggacagtcaaaaatcaccagagcgagccacatcttcggcgacaaagacgcgattggttgagcttgacctgcctcgcacctgccggccaggcaagttgcgtacaagtgacaagtcgc

SEQ ID NO: 6971 - DNA, 3187 bp, Zea Mays
aacctccaccaaggaattctttgcccaatgcgctcatcgtccccgtcacacctctgcccacgcaccatcgccgatcctattgcccactacaatttccccatttctctcacgtaagtaggccacaccatcgcgtcatctctgctccgcctccttcccgccggcttcccgccgtcctttcgctgccgctgccattaccgccactgccgcaccggctggccgcgctaaaacagcagccgcgcccgcgctacgctgaccggcgacggcggccggcaagactgcccgttcgtccggtcccttcactccaccttcgcgcaacggcacaaggcggcaagggaccggacggggccggcctcgtgctttttgtgcgtggttggagtggttgagcgagccgatggcgacgatcccgggcggcgtggcgccatgacggcagccatttcaatacgcgccccccagcagctgaaacctgacaagctaaccagattttaggtggttacccgtgccgtgtcgcctgcctcgcacacccctcgcccttcgcctcttttccaccctggacccaggatatagttcccgctctcgtcgcttgcgcttgtatcttcctcgtctcaggcctccccgccgcgcctttcggttcgggttcagcgaattcagccacgaagcgagcgggcggccggagggttcctggtaacggaactcgctcgctttccagtttccaggtcaggccaggcgacgaccgccgcctcggcagttttctattccagcgtcgcggttccgggtcagaaattggttgcaggctcgcagccagccagtagcccggcgagatcgtcttgtgacagcggcaagtccacggcggttagcaggttgagcgaaccagtggcctggctacttaccagcttgccgtgccatgtgcaactgcggttcttcctgctgatctcgggagctgcaagcccggctctcggccaccgttcgtgggcgtcatggcggcggaccacggggagggcgtcgggcggtgcatactggtggggctgcacatggacgccgtcggcagggacctgctccagtgggcgctccaccaggaggtcaggcggggcgaccgcatcgtcgccgtgcacatttaccgcaagtccgacaagacgaacacactgaagctgatcaggacgctggacgactacctggcggaatacgaggctctctgcaaccagaaacaggtggttctcgtcggccgggtgacgccgggaagctcgatccagaaggagctggtgaaggaggccaagctctgcgccgccatggtcgtggtgcttggcgccaataagaagtactccttcggagggtcgtcctgcctggccaagtactgcgccaagaagctgccgccgacaaccaccgtcgtcgccatccaggacggcaaggccgtcttcgtccgggaggcgcccaggccgccacttggagcagagccaaagccggtgctccgcacggtgctgcacccgagcgtggggctggagcccaaggtgatcatcccgaacccgaaccggcgcgcgcggtccatgtccatggacttggacgccccatgctgcggtcacggcgccgcggacgcgccggcaagcaggtgcttggacgacgccaccaaaggcgacggcggcgtggcacccgagcagaggctcgggtggccgctgctccgccgcgcgcacgccgccgccgccgcctcagctgcccctgtacagacgcccggcggcaagaatcatgagccgcggaagcagtcggtggtgcactgggtgatgagcctgccccggcggtccgcgccgtcggagtccgccgagccgcatgccggggcggggctcgagtcggagctcaaggcaatgcttggcggcagtggcgcgcggtgccggtggttccgctacgaggagctctacgactccaccaaccacttctccgcagagaacctgatcgggaacggagggaacagcagggtgtacaggggcagcctcgcctgcggccggcaggtggcgatcaagttgtgcaaggcgtcggcggaggcgtccaaggacttcctccgggaggtggacatcatcaccaagctgcagcaccaccggatcgtccccttgatcggcgtctgcgtggaaggccgcaacctcatctccgtttaccgctacctccccaggggcagcctcgaggacaatgggaaaggtcaaagccggcgctgtcgtgggagaaccggtacaaggctgcgctggggatcgcggaggctctgagctacctgcactccggcagcccgcggccggtgatccacagggacgtcaagtcgtccaacatcctcctcgcagaagagttcgagcctcagctatccgatttcgggctggccatctgggcgccgacgaatccgacgtccgtgacgcacagcgacgtcgtcggcacattcgggtacctggcgccggagtacttcatgtacgggaaggtgaccgacagggtggacgtgtacgcgttgggcgtcgtcctgctggagctcctgtccggccggaagtccatcagcagcgacgggtcgtcacccaagggccaggagagtctcgtcatgtgggcaactccggtgcttagcagcggcaacatctgtgacctgctggacccgaggctggacgtgaagcacgacgaggtggaggtcaggcggatggcctctgccgcgtcgctctgcctccggaggtcggctcgactcaggccgccgatatcgcagatactgagcatactacgaggagaaagcgcggcgagcatcgccgaccagggcgcgacggagccggactgcgtggacgacgaggcgtaccccgccgcgaacgtgaggtcgcacctgggcctcgcgcttctcgacgtggaggactcggagtccatctccagcacggagcacagcagcggcctcagcccgttggaggagtacctgcgagaacgttggagccgatcgtccagcttcgactgatgattcatgcccgcgctgcgattttgtttgtgggcatgtgttttagtttttttttccctctccgccggtaattcacatgtttatcgtatggtttggttaccggggccgtgtgtacagtggacagtcaaaaatcaccagagcgagccacatcttcggcgacaaagacgcgattggttgagcttgacctgcctcgcacctgccggccaggcaagttgcgtacaagtgacaagtcgc

SEQ ID NO: 6972 - DNA, 3194 bp, Zea Mays
aacctccaccaaggaattctttgcccaatgcgctcatcgtccccgtcacacctctgcccacgcaccatcgccgatcctattgcccactacaatttccccatttctctcacgtaagtaggccacaccatcgcgtcatctctgctccgcctccttcccgccggcttcccgccgtcctttcgctgccgctgccattaccgccactgccgcaccggctggccgcgctaaaacagcagccgcgcccgcgctacgctgaccggcgacggcggccggcaagactgcccgttcgtccggtcccttcactccaccttcgcgcaacggcacaaggcggcaagggaccggacggggccggcctcgtgctttttgtgcgtggttggagtggttgagcgagccgatggcgacgatcccgggcggcgtggcgccatgacggcagccatttcaatacgcgccccccagcagctgaaacctgacaagctaaccagattttaggtggttacccgtgccgtgtcgcctgcctcgcacacccctcgcccttcgcctcttttccaccctggacccaggatatagttcccgctctcgtcgcttgcgcttgtatcttcctcgtctcaggcctccccgccgcgcctttcggttcgggttcagcgaattcagccacgaagcgagcgggcggccggagggttcctggtaacggaactcgctcgctttccagtttccaggtcaggccaggcgacgaccgccgcctcggcagttttctattccagcgtcgcggttccgggtcagaaattggttgcaggctcgcagccagccagtagcccggcgagatcgtcttgtgacagcggcaagtccacggcggttagcaggttgagcgaaccagtggcctggctacttaccagcttgccgtgccatgtgcaactgcggttcttcctgctgatctcgggagctgcaagcccggctctcggccaccgttcgtgggcgtcatggcggcggaccacggggagggcgtcgggcggtgcatactggtggggctgcacatggacgccgtcggcagggacctgctccagtgggcgctccaccaggaggtcaggcggggcgaccgcatcgtcgccgtgcacatttaccgcaagtccgacaagacgaacacactgaagctgatcaggacgctggacgactacctggcggaatacgaggctctctgcaaccagaaacaggtggttctcgtcggccgggtgacgccgggaagctcgatccagaaggagctggtgaaggaggccaagctctgcgccgccatggtcgtggtgcttggcgccaataagaagtactccttcggagggtcgtcctgcctggccaagtactgcgccaagaagctgccgccgacaaccaccgtcgtcgccatccaggacggcaaggccgtcttcgtccgggaggcgcccaggccgccacttggagcagagccaaagccggtgctccgcacggtgctgcacccgagcgtggggctggagcccaaggtgatcatcccgaacccgaaccggcgcgcgcggtccatgtccatggacttggacgccccatgctgcggtcacggcgccgcggacgcgccggcaagcaggtgcttggacgacgccaccaaaggcgacggcggcgtggcacccgagcagaggctcgggtggccgctgctccgccgcgcgcacgccgccgccgccgcctcagctgcccctgtacagacgcccggcggcaagaatcatgagccgcggaagcagtcggtggtgcactgggtgatgagcctgccccggcggtccgcgccgtcggagtccgccgagccgcatgccggggcggggctcgagtcggagctcaaggcaatgcttggcggcagtggcgcgcggtgccggtggttccgctacgaggagctctacgactccaccaaccacttctccgcagagaacctgatcgggaacggagggaacagcagggtgtacaggggcagcctcgcctgcggccggcaggtggcgatcaagttgtgcaaggcgtcggcggaggcgtccaaggacttcctccgggaggtggacatcatcaccaagctgcagcaccaccggatcgtccccttgatcggcgtctgcgtggaaggccgcaacctcatctccgtttaccgctacctccccaggggcagcctcgaggacaatctacacggggaaaggtcaaagccggcgctgtcgtgggagaaccggtacaaggctgcgctggggatcgcggaggctctgagctacctgcactccggcagcccgcggccggtgatccacagggacgtcaagtcgtccaacatcctcctcgcagaagagttcgagcctcagctatccgatttcgggctggccatctgggcgccgacgaatccgacgtccgtgacgcacagcgacgtcgtcggcacattcgggtacctggcgccggagtacttcatgtacgggaaggtgaccgacagggtggacgtgtacgcgttgggcgtcgtcctgctggagctcctgtccggccggaagtccatcagcagcgacgggtcgtcacccaagggccaggagagtctcgtcatgtgggcaactccggtgcttagcagcggcaacatctgtgacctgctggacccgaggctggacgtgaagcacgacgaggtggaggtcaggcggatggcctctgccgcgtcgctctgcctccggaggtcggctcgactcaggccgccgatatcgcagatactgagcatactacgaggagaaagcgcggcgagcatcgccgaccagggcgcgacggagccggactgcgtggacgacgaggcgtaccccgccgcgaacgtgaggtcgcacctgggcctcgcgcttctcgacgtggaggactcggagtccatctccagcacggagcacagcagcggcctcagcccgttggaggagtacctgcgagaacgttggagccgatcgtccagcttcgactgatgattcatgcccgcgctgcgattttgtttgtgggcatgtgttttagtttttttttccctctccgccggtaattcacatgtttatcgtatggtttggttaccggggccgtgtgtacagtggacagtcaaaaatcaccagagcgagccacatcttcggcgacaaagacgcgattggttgagcttgacctgcctcgcacctgccggccaggcaagttgcgtacaagtgacaagtcgc

SEQ ID NO: 6973 - DNA, 2818 bp, Zea Mays
cacgggacacgacactccaggctccagcagatcggatgcacgcatcgcggagccacctccccacgtccggcgagtctctcctccgccttttggccgcctgccgtgcacccgcccacctcccatccctgcgcgccgcgcacgcgcggctcctcgtgctgctccacccttctcacccatccgcggcacacgctaacgtcaaactcatccaagcctacgctgcctgctccgcgctccccttggcgcacaccgtgctcgagtcctcctcccccgacggcaggagcagaaccaccaccgtctgcttcaacgtactcattcgcgcgctcaccgcctcctctctccaccgcgatgcgctcgtcctcttcgcctccatgcggccgcggggcccagcctgcttccccgaccattacacctacccgctcgcgctcaagtcgtgctcggcgtccaaggatctcctcctcggcctccagatccactccgccgtcgctaagctccgcctcgacaggaacgtctacgtggcacactccgcgatcagcatgtactcgcggtgcggccgcccggaggacgcttacagagtgttcgacggaatgccgcaccgggacgtcgtctcttggaatgctatgatcgcggggttcgcgcgtgtgggtctgttcgaccgtgctattgaggttttcaagcagtttgtggtgctgcagggttcaatgccagatgccggcaccatggcaggtatcttacccgctatggggaacgccaagccagatgacattaggtttgtgaggagagtgtttgacaatatgcagtttaaggaacttatatcttggaatgctatgctcgctgtatatgctaacaatgaatttcatgttaaggcagttgagctgttcatgctgatggaaaaggatgaggttgagccagattcaattactctagcaactgttcttcctccatgtggggagctatcagcattttcagtgggaaaacgtatccacgagattatcaagcgaaaaaatatgtgccctaacttgttgcttgaaaatgctctcatggacatgtatgcaagctgcggctgtttgaaggatgctagggaaatctttgatttgatgagtgcccgggatgtgatatcatggacttcaatcatatctgcttatggaaagcatggtcatggaagagaggctgttgatctttttgagaagatgctaggacaggggctggaaccagactctattgccttcgttgctgttctagcagcatgcagccatgctggacttttggctgatggaaagcactactttgattccatgacatccaggtatcatatcattccaaaagcagagcactacacttgcatggtggaccttctcggccgtgctggatgtataaacgaggcatatgattttatcacgacaatgctgattgagccaaatgaaagagtctggggagccttattacaagcttgtcgaattcactccaatatggacattggactcgtggcagcagacaatctgttcagcttagtacctgaacaaacaggatactatgtgctgttatctaatatgtatgctagagctgggagatgggcagatgttacctcggtgagaagtgtcatggtgaataagggtatcaagaaatttcctggtactagtattgttgagctaggggatcaggttcacacatttcatattggtgatagatgtcacccacaatctgaaatgatctaccataaactggatgagctattgggaaaaataagggggatgggttataacccagaggtagaggctacacttcatgatgtcgaagaagaagacaaggaagaccatctttctgttcacagtgagaaattagctattgcatttctccttttgaacactagtccaggtacaattatcagggtgactatgaatctcagaacctgtagcgactgtcatcttgctgcgaagctgatttcaataatcacctgtagagagattgtcctcaaagacaccaataggatccatcatatagtacaaggagtttgctcatgtggggattattggtagaggatgtacaattatcatatactgcattgattgaagcgtctacttggagagaaaagatttttgctcttttaagcatgatgcttgaatccacttttcctcaacttctgtccttcgattgaatggatgttagttttctggataacatttgtaacagaaattcagcatccatactcagctgcagaataaagaagagaacaatacctatctacgcttgagcatttggtttctttgtctagtattcgggctcttttgttccacaaaatcaatctaacagaaagactattagagatacgtgccaatcagtatcagttgtatatatttcttgaacttttgagaaacatgtacaaataaaaaggtgaaccccaggcactaagcgatacaagaacatttagcattcatttgttcttgataattttatgccattttccaactgaacaagaaccaatggaactatggaagtatggaacagagatattctggggcatgcaagagatcttagaagtaacagtcactgaaactataacctcatgatcaatgttctgaagttactggacattgtcagttaagcttattagttcagatagtcaaggaaggcaagcagtactatgagcggaagctggaaagaaaaatcaatcatgttatatgctgcagaaatctgagggagctgcgcaagcgtagcggccaccgggaggagtcgtcggtcgtcaaggagctccaagaaggcagcggtgattggagtggactgccttgggttttgacgtgcgagtgtgcgcaggaactccagt

SEQ ID NO: 6974 - DNA, 3250 bp, Zea Mays
gtcagctcgtggagctccagctttttttttcggtcctaatcatcggtgtctcgcgccgtcgacggtgaccacgggacacgacactccaggctccagcagatcggatgcacgcatcgcggagccacctccccacgtccggcgagtctctcctccgccttttggccgcctgccgtgcacccgcccacctcccatccctgcgcgccgcgcacgcgcggctcctcgtgctgctccacccttctcacccatccgcggcacacgctaacgtcaaactcatccaagcctacgctgcctgctccgcgctccccttggcgcacaccgtgctcgagtcctcctcccccgacggcaggagcagaaccaccaccgtctgcttcaacgtactcattcgcgcgctcaccgcctcctctctccaccgcgatgcgctcgtcctcttcgcctccatgcggccgcggggcccagcctgcttccccgaccattacacctacccgctcgcgctcaagtcgtgctcggcgtccaaggatctcctcctcggcctccagatccactccgccgtcgctaagctccgcctcgacaggaacgtctacgtggcacactccgcgatcagcatgtactcgcggtgcggccgcccggaggacgcttacagagtgttcgacggaatgccgcaccgggacgtcgtctcttggaatgctatgatcgcggggttcgcgcgtgtgggtctgttcgaccgtgctattgaggttttcaagcagtttgtggtgctgcagggttcaatgccagatgccggcaccatggcaggtatcttacccgctatggggaacgccaagccagatgacattaggtttgtgaggagagtgtttgacaatatgcagtttaaggaacttatatcttggaatgctatgctcgctgtatatgctaacaatgaatttcatgttaaggcagttgagctgttcatgctgatggaaaaggatgaggttgagccagattcaattactctagcaactgttcttcctccatgtggggagctatcagcattttcagtgggaaaacgtatccacgagattatcaagcgaaaaaatatgtgccctaacttgttgcttgaaaatgctctcatggacatgtatgcaagctgcggctgtttgaaggatgctagggaaatctttgatttgatgagtgcccgggatgtgatatcatggacttcaatcatatctgcttatggaaagcatggtcatggaagagaggctgttgatctttttgagaagatgctaggacaggggctggaaccagactctattgccttcgttgctgttctagcagcatgcagccatgctggacttttggctgatggaaagcactactttgattccatgacatccaggtatcatatcattccaaaagcagagcactacacttgcatggtggaccttctcggccgtgctggatgtataaacgaggcatatgattttatcacgacaatgctgattgagccaaatgaaagagtctggggagccttattacaagcttgtcgaattcactccaatatggacattggactcgtggcagcagacaatctgttcagcttagtacctgaacaaacaggatactatgtgctgttatctaatatgtatgctagagctgggagatgggcagatgttacctcggtgagaagtgtcatggtgaataagggtatcaagaaatttcctggtactagtattgttgagctaggggatcaggttcacacatttcatattggtgatagatgtcacccacaatctgaaatgatctaccataaactggatgagctattgggaaaaataagggggatgggttataacccagaggtagaggctacacttcatgatgtcgaagaagaagacaaggaagaccatctttctgttcacagtgagaaattagctattgcatttctccttttgaacactagtccaggtacaattatcagggtgactatgaatctcagaacctgtagcgactgtcatcttgctgcgaagctgatttcaataatcacctgtagagagattgtcctcaaagacaccaataggatccatcatatagtacaaggagtttgctcatgtggggattattggtagaggatgtacaattatcatatactgcattgattgaagcgtctacttggagagaaaagatttttgctcttttaagcatgatgcttgaatccacttttcctcaacttctgtccttcgattgaatggatgttagttttctggataacatttgtaacagaaattcagcatccatactcagctgcagaataaagaagagaacaatacctatctacgcttgagcatttggtttctttgtctagtattcgggctcttttgttccacaaaatcaatctaacagaaagactattagagatacgtgccaatcagtatcagttgtatatatttcttgaacttttgagaaacatgtacaaataaaaaggtgaaccccaggcactaagcgatacaagaacatttagcattcatttgttcttgataattttatgccattttccaactgaacaagaaccaatggaactatggaagtatggaacagagatattctggggcatgcaagagatcttagaagtaacagtcactgaaactataacctcatgatcaatgttctgaagttactggacattgtcagttaagcttattagttcagatagtcaaggaaggcaagcagtactatgagcggaagctggaaagaaaaatcaatcatgttatatgctgcagaaatctgaggcatgtgcttctctatctctccctactttgttgttataactgttgagtttgtgatccaaattccgtatatggaggccgtgttggcgagtggagcggaggcccgtcgccggaaggcttgggtcggagtgtatatattagtgaccctaattagggtttgctgctcgtcgtctttttactcctcttgtaagccgccgtctacggacgacgttctgtaaacactccacatatagtgaatgtttcgcctggctggtgcccatggtttttcccttcgcattgaagggttttccacgtaaatctatgtgtcgtgctctgtgatttgttggttgatctatttcgtttttcctgccgtttctgctaacaataactgcaatttttttgacctaacactcgacagttgcttgttcatgacttcatgcaagtttgccatttgggcttaatttttttcattccatgatgaagaacaaacaaatcaaagcacaaccttttgg

SEQ ID NO: 6975 - DNA, 3078 bp, Zea Mays
ctgctgccgcctccaccgctcgtcctcggcatcggcacacggtgccatcactctcccactcccactcactcacacactgtctcgctcgctcgcttgctcacccaccaatggcgagtcctcctcgctacccgttccccgtcctcctcctcggcctcgcgctggtggcgttgatggcgccggcgctactgcgagcagatggcggcgccgaggaggaggaggaggcgcggaagacgtacatcttccgcgtggaccacagcgccaagccgtccgtgttccccacccacgcgcactggtacgcctccgccgcgttcgcctcggcggcaccgggggcaaccccgctgcggccgctccacgtctacggcaccgtcttccacggcttctccgcgtccgtgccggcgtcccgcgccgaggagctgcggcgccacccggccgtgctcgccgcgttcgaggaccgcgcccgcccgcttcacaccacccggtcgccgcagttcatgggcctccgcgcgcgcctcggcctctggtccctcgcggactacggctccgacgtcatcgtcggggtgctcgacaccggcgtctggcccgagcgccgcagcctgtccgacaggaacctgccgcccgtccccgcgcgctggcgcggcggctgcgacgccggccccggcttcccggcctcgtcctgcaacaggaagctcgtcggcgcgcgcttcttctcgcagggccacgccgcgcgcttcggcgcctcggccgccgcgtccaacggctccgtcgagttcatgtcgccccgcgacgcggacggccacggcacgcacacggccaccaccgccgcgggcagcgtcgcgtacggcgccagcatggagggctacgcgcccggggtcgccaagggcgtcgcgcccaaggccagggtggccgcgtacaaggtctgctggaagggcgccggctgcatggactccgacatcctcgcgggcttcgaccgcgccgtcgctgacggcgtcgacgtcatctccgtctcgatcggcggcggcagcggcgtcacggctccgttctacctcgacccgatcgcgatcggcgcgtacggagccgtctcccggggggtgttcgtggccacctccgctggaaacgaagggccggcctccatgtcggtgaccaacctcgccccgtggcttgccaccgttggcgccggcaccatcgaccgtaatttcccggctgaaatcgtgctgggcgacggccgacgcttgtccggcgtgtcgctgtactccggcaagcctcttaccaactcatcgctgcctctgtactaccccgggaggactggcgggctctccgcttcgctgtgcatggagaactccatcgacccttcactggtgaaaggcaagatcgtcgtctgcgaccgcggcagcagcccgcgcgtggccaagggaatggtcgtcaaggaagctggtggcgcggcgatggtccttactaacggggaggccaacggcgagggactggttggagacgcccacgtcctccctgcttgcgcggtgggcgagaaggagggcgacgcggtcaaagcgtatgccgcgaacgcctccagcccgatggcgacaatcagcttcgggggcacggtcgtcggcgtcaagccggcacccgtggtggcctccttctcggcgcgtggacccaacgggctcgtcccggagattctcaagccggacttcatcgcaccgggcgtcaacatcctcgccgcgtggacgggcgccacgggtccgaccggcctggagggcgatacccgccgcacggagttcaacatcctgtccgggacgtccatggcgtgcccgcacgccagcggcgccgccgcgctgctccggtccgcgcaccccgggtggtcgccggcggcgatacggtccgcgctgatgactacggccatcgtgacggacaaccgcggcgggcccgtgggcgacgaggcagagcccgggcgcggcgcgacgccgttcgactacggcgccggccacatcaccctgggcaaggccctggaccccggcctggtctacgacgccggggaggacgactacgtcgcgttcatgtgcagcatcgggtacgagccgaacgcgatcgaggtggtcacgcacaagcccgtggcgtgccccgcgacggcgagcggggccaaggccagcggcagcccctcgggctccgacctcaactacccgtccatctccgtggtgctccgcggcggcaaccagtccaggacggtgacccgcacggtcaccaacgtcggcgcccaagcttcggcaacgtacactgcgcgcgtgcagatggcgtctagcggcggcgtgaccgtatccgtgaagccgcagcagctcgtcttctcccctggcgccaagaagcagagcttcgcggtgacggtgactgcgccgtctgctcaggacgcagcggcgccggtgtacgggttcctcgtctggtcggacggtggcgggcacgacgtgcggagccccattgtggtgacgtggctgcagcccatgtgactgtcaggtggggacaactctacggcctctgtggagcctgccctggctgggactgccgataaagatggcagcaggagtcaaggcgcagtggccagtgggccagtaacggtaaagtcgtgcggtcgggactgcgccattaaaggtgggtcctgcacgctcgctctgcagaattgattaaccgggcgtgctgtaacagtatgggcttatccgagtatagtgactactggtagtgacagtggtgtgtgaaaaactgataactctggtgtttctacttgcttgactgtgtatggaggcaacagtacttgcttgccactggcggacaggacacaggagcaacggaaagaaatggagcaacaggacaaagctatgaaaaacgagtactgctagctttggattttgctgcggttgccgggtagtagtatttttttatggatggctacaggatctcgtgacctgataaagttcgttggatgttcttatacaaatgggcgggtccgactcggtattcgcctattcggcaccctttgggtcgttttccacgaggacttcacccagcaacgccaaaaacgaggaaagtagccttgat

SEQ ID NO: 6976 - DNA, 1410 bp, Zea Mays
ctagtctctctacacggattatttttgtccaaagcctccagtgctaaggacgccggttattttatcagatctgatctagcctgaatccacctgttgtcaagatccatcagcccaccgaaagcaagcatcgcccacgatgacaaccataggcaaaactgcccagtccgccattttgtgagccatacaatttctttttttataacaaggcgtcagcaggagagcaactatatttatatacatcttccctgatctgtccctgtccggcaacaagaacaccaccaataaggatctcatcactacgagtcaccggcggcgtcgaggatcagggccaagatcctgtacgcgacatcgaagcaaggcctgcggcggctgctggacggggtccactacgaggtgcaggccaccgacccctccgagatgggcttcgacgtcatcagaggccgcgcgcaatgaggcccccgctgcgctctgctcctatttacgtacttacctgtgcgtgggcgtgttctcctactactcactgctcagtagtcagtagtcatctgcgttcgtgtgtgtgtgtgtgtgatcggccggatgctaattggcgttggtgtgctcccgtagcgatcgatgctgccaatctgacgaggcttcgcgtgtgtttgctttgctattttcggttctcgggagagatggtgcaggcgtggtgtgttgatgttgatgggtggagtagaagctcaggggagtggcagcggactaatgaaacgtccacctctgcgacgtagaattccactgaaaaaaaaatgctccagtgtaccataagctgcttcagatttgatcgtgttttctctcccatggtggcgtttctacctacatttttcttagaaaacacatttctagttactcgttcagttctgaattataaaatgttttgatttttctagatgtattgcttttgctacgtttagatatacacaatgtctagatagatagttaaagcaataaatctaagaaaaatcttataatttagaacgagacaatatgattcagagcaaagttgggttacgagagcaacatagaagaaaaaaaagtacaaagtggggaatagccatggcaattaaaatgaagttgtgtttaaaaattgcttgctccagttctcaggatctgcctagttttccggtccgttttttagaatcgttttgatgaaaatcgtccgaaatcgacataaacatgccgagtcgtagtgatagtagtaatccgtcacttttaaaacctaaaccatataaactcgtttatctttctttgcacgtaattcttacgatactcatattaataaaagtttgttagaaaaaagctaaaacaaatagtcccatattaggtactctcacactttccagtctagaccttgtactatatagttgggccaac

SEQ ID NO: 6977 - DNA, 1975 bp, Zea Mays
cttccattccccatcgatctctctttctctcaaacaagccaattcctcatcccctcctcgaaaaatctcgatctatctcttccctgctataatttggttgttaggaaaggtaataccgctaaacatgggaaactgaagcgcgaagaaccgattaattcggtacggggatgctgcaacgatcaggtccaaaaacgtggtatgcattcatgtacagagtaaccttgccacggtacactgtccagaaaggcgtgaacccaacccacacggtagcagcgccagccaactgcccgaaacttgacacctgccaagtttttctgtggaagcatttcacgcagcagcttgaaagatgcgcaggcgaaccatagagctacggcagccctggcaccaaatccccgttcgtcttttgcaccgttggaacaaaacctgggtttcgtgacagtagtatcgtaaaaaacatggcaactggaactgctatcggtccgattaaaaatgcgacggcgtcttgcagctgaaaagtcaacacgatctcgaagctgtttggcaaatctgacagaatgcgcatattagactagcttgtctaaaggatctggatttgaattcctaccccatagtagacgaaggcaattaggcaatctagagcatgtcctgccgtttgtctcaaggaaagcggacctgtcgtcttgagccttgggaggcaccacacaaattactcaattcacaattgagtagaaatctacggatccaatggctgttcaatcagtgccgcatccttatctgagaaagcaggaaggtgcgccacgctttttcggttatttctccacaggaaagagagagagaaaaaaaagttgcttgtggcactcatcgtcccgcaccccgctgcctttagtcggtcgagatcatgacggggaccaaactttcctgatgagcagcagctctctggccaggcctccctttcgccctgtcactcttgtctcgagcgctcctctagtctctctacacggattatttttgtccaaagcctccagtgctaaggacgccggttattttatcagatctgatctagcctgaatccacctgttgtcaagatccatcagcccaccgaaagcaagcatcgcccacgatgacaaccataggcaaaactgcccagtccgccattttgtgagccatacaatttctttttttataacaaggcgtcagcaggagagcaactatatttatatacatcttccctgatctgtccctgtccggcaacaagaacaccaccaataaggatctcatcactacgagtcaccggcggcgtcgaggatcagggccaagatcctgtacgcgacatcgaagcaaggcctgcggcggctgctggacggggtccactacgaggtgcaggccaccgacccctccgagatgggcttcgacgtcatcagaggccgcgcgcaatgaggcccccgctgcgctctgctcctatttacgtacttacctgtgcgtgggcgtgttctcctactactcactgctcagtagtcagtagtcatctgcgttcgtgtgtgtgtgtgtgtgatcggccggatgctaattggcgttggtgtgctcccgtagcgatcgatgctgccaatctgacgaggcttcgcgtgtaagaaaaaaaagtacaaagtggggaatagccatggcaattaaaatgaagttgtgtttaaaaattgcttgctccagttctcaggatctgcctagttttccggtccgttttttagaatcgttttgatgaaaatcgtccgaaatcgacataaacatgccgagtcgtagtgatagtagtaatccgtcacttttaaaacctaaaccatataaactcgtttatctttctttgcacgtaattcttacgatactcatattaataaaagtttgttagaaaaaagctaaaacaaatagtcccatattaggtactctcacactttccagtctagaccttgtactatatagttgggccaac

SEQ ID NO: 6978 - DNA, 3216 bp, Zea Mays
gtgtggggggagggagcgaatagtatgtggctattgcagcattattgccttttccccattcgttgagatgagagggagaggaatgaagggaatttttgggctgcttgttgccgcactctttttataaagtcgacccaccctcacctaattttaatgtcaaaagaacccgcagcagggaagactgagagtctgggagatagagagaggagagggagggtttcctcaaagagaacccgaacccaaacccaaaccgaagcagagcacactagcgttccctcaccagggcgtccatcccagcagccatggcgatggcgtacaagatggcgacggaggggatgaacgtgaaggaggagtgccagcgctggttcatggagatgaagtggaagaaggtgcaccgcttcgtggtgtacaagatcgacgagcggtcgcgcgccgtgctggtggacaaggtgggcggccccggggaagggtacgaggagctcgtggccgcgctgcccggcgacgactgccgctacgccgtcttcgacttcgacttcgtcaccgtcgacaactgccagaagagcaagatcttcttcatcgcctggtaaatcctgggccactcgccttccattccccatcgatctctctttctctcaaacaagccaattcctcatcccctcctcgaaaaatctcgatctatctcttccctgctataatttggttgttaggaaaggtaataccgctaaacatgggaaactgaagcgcgaagaaccgattaattcggtacggggatgctgcaacgatcaggtccaaaaacgtggtatgcattcatgtacagagtaaccttgccacggtacactgtccagaaaggcgtgaacccaacccacacggtagcagcgccagccaactgcccgaaacttgacacctgccaagtttttctgtggaagcatttcacgcagcagcttgaaagatgcgcaggcgaaccatagagctacggcagccctggcaccaaatccccgttcgtcttttgcaccgttggaacaaaacctgggtttcgtgacagtagtatcgtaaaaaacatggcaactggaactgctatcggtccgattaaaaatgcgacggcgtcttgcagctgaaaagtcaacacgatctcgaagctgtttggcaaatctgacagaatgcgcatattagactagcttgtctaaaggatctggatttgaattcctaccccatagtagacgaaggcaattaggcaatctagagcatgtcctgccgtttgtctcaaggaaagcggacctgtcgtcttgagccttgggaggcaccacacaaattactcaattcacaattgagtagaaatctacggatccaatggctgttcaatcagtgccgcatccttatctgagaaagcaggaaggtgcgccacgctttttcggttatttctccacaggaaagagagagagaaaaaaaagttgcttgtggcactcatcgtcccgcaccccgctgcctttagtcggtcgagatcatgacggggaccaaactttcctgatgagcagcagctctctggccaggcctccctttcgccctgtcactcttgtctcgagcgctcctctagtctctctacacggattatttttgtccaaagcctccagtgctaaggacgccggttattttatcagatctgatctagcctgaatccacctgttgtcaagatccatcagcccaccgaaagcaagcatcgcccacgatgacaaccataggcaaaactgcccagtccgccattttgtgagccatacaatttctttttttataacaaggcgtcagcaggagagcaactatatttatatacatcttccctgatctgtccctgtccggcaacaagaacaccaccaataaggatctcatcactacgagtaagcggcacgaccgaattatttaactactgttataacttgtcaacttgctccagtatccaattgttaaagcactactatggatgagctgtgctggcgactgctgctggcttgctggtgcggctgcatttccagtgggcttgttgcgcctgcgtgaggcagttggtctgacgcgtggattcgttgcttttgtgtgctgtgcttctctcttttgcgcaggtcaccggcggcgtcgaggatcagggccaagatcctgtacgcgacatcgaagcaaggcctgcggcggctgctggacggggtccactacgaggtgcaggccaccgacccctccgagatgggcttcgacgtcatcagaggccgcgcgcaatgaggcccccgctgcgctctgctcctatttacgtacttacctgtgcgtgggcgtgttctcctactactcactgctcagtagtcagtagtcatctgcgttcgtgtgtgtgtgtgtgtgatcggccggatgctaattggcgttggtgtgctcccgtagcgatcgatgctgccaatctgacgaggcttcgcgtgtgtttgctttgctattttcggttctcgggagagatggtgcaggcgtggtgtgttgatgttgatgggtggagtagaagctcaggggagtggcagcggactaatgaaacgtccacctctgcgacgtagaattccactgaaaaaaaaatgctccagtgtaccataagctgcttcagatttgatcgtgttttctctcccatggtggcgtttctacctacatttttcttagaaaacacatttctagttactcgttcagttctgaattataaaatgttttgatttttctagatgtattgcttttgctacgtttagatatacacaatgtctagatagatagttaaagcaataaatctaagaaaaatcttataatttagaacgagacaatatgattcagagcaaagttgggttacgagagcaacatagaagaaaaaaaagtacaaagtggggaatagccatggcaattaaaatgaagttgtgtttaaaaattgcttgctccagttctcaggatctgcctagttttccggtccgttttttagaatcgttttgatgaaaatcgtccgaaatcgacataaacatgccgagtcgtagtgatagtagtaatccgtcacttttaaaacctaaaccatataaactcgtttatctttctttgcacgtaattcttacgatactcatattaataaaagtttgttagaaaaaagctaaaacaaatagtcccatattaggtactctcacactttccagtctagaccttgtactatatagttgggccaac

SEQ ID NO: 6979 - DNA, 1854 bp, Zea Mays
gtgtggggggagggagcgaatagtatgtggctattgcagcattattgccttttccccattcgttgagatgagagggagaggaatgaagggaatttttgggctgcttgttgccgcactctttttataaagtcgacccaccctcacctaattttaatgtcaaaagaacccgcagcagggaagactgagagtctgggagatagagagaggagagggagggtttcctcaaagagaacccgaacccaaacccaaaccgaagcagagcacactagcgttccctcaccagggcgtccatcccagcagccatggcgatggcgtacaagatggcgacggaggggatgaacgtgaaggaggagtgccagcgctggttcatggagatgaagtggaagaaggtgcaccgcttcgtggtgtacaagatcgacgagcggtcgcgcgccgtgctggtggacaaggtgggcggccccggggaagggtacgaggagctcgtggccgcgctgcccggcgacgactgccgctacgccgtcttcgacttcgacttcgtcaccgtcgacaactgccagaagagcaagatcttcttcatcgcctgtatccaattgttaaagcactactatggatgagctgtgctggcgactgctgctggcttgctggtgcggctgcatttccagtgggcttgttgcgcctgcgtgaggcagttggtctgacgcgtggattcgttgcttttgtgtgctgtgcttctctcttttgcgcaggtcaccggcggcgtcgaggatcagggccaagatcctgtacgcgacatcgaagcaaggcctgcggcggctgctggacggggtccactacgaggtgcaggccaccgacccctccgagatgggcttcgacgtcatcagaggccgcgcgcaatgaggcccccgctgcgctctgctcctatttacgtacttacctgtgcgtgggcgtgttctcctactactcactgctcagtagtcagtagtcatctgcgttcgtgtgtgtgtgtgtgtgatcggccggatgctaattggcgttggtgtgctcccgtagcgatcgatgctgccaatctgacgaggcttcgcgtgtgtttgctttgctattttcggttctcgggagagatggtgcaggcgtggtgtgttgatgttgatgggtggagtagaagctcaggggagtggcagcggactaatgaaacgtccacctctgcgacgtagaattccactgaaaaaaaaatgctccagtgtaccataagctgcttcagatttgatcgtgttttctctcccatggtggcgtttctacctacatttttcttagaaaacacatttctagttactcgttcagttctgaattataaaatgttttgatttttctagatgtattgcttttgctacgtttagatatacacaatgtctagatagatagttaaagcaataaatctaagaaaaatcttataatttagaacgagacaatatgattcagagcaaagttgggttacgagagcaacatagaagaaaaaaaagtacaaagtggggaatagccatggcaattaaaatgaagttgtgtttaaaaattgcttgctccagttctcaggatctgcctagttttccggtccgttttttagaatcgttttgatgaaaatcgtccgaaatcgacataaacatgccgagtcgtagtgatagtagtaatccgtcacttttaaaacctaaaccatataaactcgtttatctttctttgcacgtaattcttacgatactcatattaataaaagtttgttagaaaaaagctaaaacaaatagtcccatattaggtactctcacactttccagtctagaccttgtactatatagttgggccaac

SEQ ID NO: 6980 - DNA, 3155 bp, Zea Mays
aggacaatggttggatagagagcgtgatacacatccgtcccttctagtctcctaataactagtttctatcttgctccccaaaccagcgcaaaccctgccctgacaccggcagcgacacgtccaccggcggcgccatggtgctcgaggcaacgatgatctgcatagacaattcggaatggatgcggaacggcgactacgctccgtcgcggttccaggcgcaggccgatgccgtcaacctcatctgcggcgccaagacccagtcaaacccggagaacacggtaggcgtgatgacaatggccgggaagggtgttcgcgtgcttgtcactcccaccagcgacctcgggaagattctcgcctgtatgcacgggttagaagttggcgctgaggcaaacttggctgcggcaatccaggttgcccagcttgctctaaagcatcgccagaacaagaggcagcagcagaggattatagctttcattggaagtcctgtgaagtacgacaagaaagttttggagaccattgggaagaagctgaaaaagaacaatgttgctcttgacattgttgactttggtgaatccgatgatgaaaaacctgagaaactggaagcattgattgctgctgttaacagcagtgatagcagtcacattgttcatatccctcctggtgaaaatgccctctctgatgtcctcctaagcactcctatatttactggtgaagaaggtggaagcggttttgctgcttccgcagcagctgccgcagctactggagcatctggatttgaatttggtgtggacccaaacgtagatccagaattggcacttgccctgcggttgtctatggaagaagagcgggcaaggcaagaggctattgcaaaaaaggctgctgaagatacttctaatacagaacataacaatgtcccaagctcaaacagtgattctgttatggctgaaggagaacctgcctcaaatgctgctgctggtgacaaagaacaaccaaaggatgatgacgatctactacagcaggcacttgcaatgtcaatggagggtggtgcttcaggatctgcagctgtgactgactctgctatggcagaagctggtgcagttgaccctgacttggcattggctcttcaaatgtctgtccaggatgcaaacatgtccagtgacactgatatgagtaaggtgtttgaagacagaacgtttgtgtcatctatccttaattcgcttcctggtgttgatcccaatgatccatctgttaaagatttgctggcatcgttgcacagccagggagagcaagagaagaaggaagacacgtcagacaaaacagaagacgataagaactgatatagccatgttcacgcttccatgcgtacaaagaaattaaagaccggtctccattgactgcgtttactctcttggtcgtggagtttgtttatcctcatataacggtgctttgattataacttaccgccgagggaatttgtattatgacactgcaacaatcttctctccatatatgttcaagggattttcgtgtttcaatgctctccatatatgttcaattgatttccgtgttacaagttctctttgcactgtttaatttgaagcgacacactatatattattttattttgaagcgacaaacaggaaattcgctctcgtgtaagccgatctggttagttattgtaagctgttgccctacaattttacagcgaccggcgaccagagaggcggctggcaaatatctggaatttacgcgcacttcgtagaagatgctagatgtctacgagcatgtccagcgtttctatattatgaaagcagaacgaaaacggcgtcagctaggccatccgtcgtctaaaattcaggtggctcggcgtctccatatgtcgtgaaggttcgagaaccatcgtatgttcacaaatcgatttcctgtcacacacaggctctctacgatacgggaagtcaggaaccttccggatggactccttcctcagccattgtagcttgcctcgcggcactggcggcggctccgcccggccagcacaaccgcagtcccagtcttctagacgaagcgaacgtgcgacaggaaaaacacggccgctgttggtcgaatccacgccggcgatgtcccctgccgccgcccaactgagtggtacaggtacatcgtacaccaatccatccgatctctaggcctaataccttggaacaagcaaaggggagcgatgcacgacgtcaatggaagactccgccggccaggaggtctgcgtcgttcttggcattggggacaacatcaagggcctcttggccacgctgtcgcgcgttgacgccatcatctcctatgattcgtcccctcgctcaacctgcatcctatcataccctatcccgtgccaagtccccgattcacggtggctgtgtggtagtcggtaatgctgcatatgaacttgggcgacattaagtgtgaggtgttctgcaaccaggtgccccgcacggcggagaacttcttggccctctgcgctagcggctactacgacagcactgtgttccaccgcaacatcaagggcttcatggtataaggcggcgaccccatcggttccggcaatgcagggcctccatctgggcaccaagttcgccgacgagttcagggagtcccaaggtagcacactatgcagtgcaggagctaacagcagacccaacgccaacggcagccgattcttcatcacctacgccaagcagccgttctgaaaaaaaattgaacagagtcacccaagaatgtgcatgtatggaatgacagcttcagattaacgacaaccacaattttccaattgtgtggttttgatggagtcatgtatgggtaaccaggaggccatctaaataaatccgagaactacgactcattatattaagaagataggaaaaaaaggcttgagaattacgcctcatgattcatcgcatttttcttggtcgttgttgcttcaaggataacaggtatatttactgcaactactcagcatgttaggtaatatcaattttttaagttgttgcatcatcatatcttattttaagttgttgtctcaccacatgtactactttataacatgattactaagttgagtgcataattattttgtgaccactaaaaccaatattttgtatgttcagtac

SEQ ID NO: 6981 - DNA, 565 bp, Zea Mays
gatctctgctcgctagcgcacaatctgctcgatctgcacggttcgagctagatctggtggtaaagaaagcagacaaaaaggaatggggctcgcgtttgggaagctcttcagccgctcttcgccaataaggatatgcagatccttatggtcggcctcgacaccactggtaaaaccaccatcctctataagctcaagcttggtgagatcatcacaaccatccccgccatcggtcacattcagaggaacacattggacaaggttctagacactgttgcaaaaggaggacagacctcaagtaaaataggattgtcgtatgcttgagacgataacgatggagatcttttcaaataatggctggtctttttatcatagattgagtgcttgaatttgtgaaacctttgtcgaatgtgagattttcattccagagtggaaccctatgtttgtgagtttgaacagtcacatgtatcaaccaataccgaagctggaatattaataatattcccttttctaaaaaaatatttgtttcttttctatagaagctttgataggatagagcttaatgaat

SEQ ID NO: 6982 - DNA, 679 bp, Zea Mays
ctcccttgcaccgacaaatatctctgtccctgatctcctctctgcggctgcacgcgatagatctctgctcgctagcgcacaatctgctcgatctgcacggttcgagctagatctggtcggttcaaatccgcgtcgttgtcgactggacgcaccggggagatttgtgattcatcatatgttaggcttgggtgagatttgatcgttgaatgaatgatcagttggcgattctacaggtggtaaagaaagcagacaaaaaggaatggggctcgcgtttgggaagctcttcagccgctcttcgccaataaggatatgcagatccttatggtcggcctcgacaccactggtcacattcagaggaacacattggacaaggttctagacactgttgcaaaaggaggacagacctcaagtaaaataggattgtcgtatgcttgagacgataacgatggagatcttttcaaataatggctggtctttttatcatagattgagtgcttgaatttgtgaaacctttgtcgaatgtgagattttcattccagagtggaaccctatgtttgtgagtttgaacagtcacatgtatcaaccaataccgaagctggaatattaataatattcccttttctaaaaaaatatttgtttcttttctatagaagctttgataggatagagcttaatgaat

SEQ ID NO: 6983 - DNA, 609 bp, Zea Mays
ccgacacctcccttgcaccgacaaatatctctgtccctgatctcctctctgcggctgcacgcgatagatctctgctcgctagcgcacaatctgctcgatctgcacggttcgagctagatctggtggtaaagaaagcagacaaaaaggaatggggctcgcgtttgggaagctcttcagccgctcttcgccaataaggatatgcagatccttatggtcggcctcgacaccactggtaaaaccaccatcctctataagctcaagcttggtgagatcgtcacattcagaggaacacattggacaaggttctagacactgttgcaaaaggaggacagacctcaagtaaaataggattgtcgtatgcttgagacgataacgatggagatcttttcaaataatggctggtctttttatcatagattgagtgcttgaatttgtgaaacctttgtcgaatgtgagattttcattccagagtggaaccctatgtttgtgagtttgaacagtcacatgtatcaaccaataccgaagctggaatattaataatattcccttttctaaaaaaatatttgtttcttttctatagaagctttgataggatagagcttaatgaat

SEQ ID NO: 6984 - DNA, 2592 bp, Zea Mays
gcctatcgccgctccacaatctcatctcgaataagatactgacgcacccccatgtctccccttccatcaccctggaaactgcagagcagagctacgcgctataccgcatattggtggggaaaagaaaaggattcaatcaggccgtctgaagagagcatgagcatgattataccggggcggaaagcgagcttttagtaaactgcctcacttgcgctataagtctagctgcaggagtgctctcggattcccaccccccgttctgtagctctcctctaatcctgatttttgtatgcgtggtggtcgctcttccgtctctcccagcccagcagccagcagtcgtctccttctctacctccctcgcatatcctgctcctctgtaaccactgtactaaaactagcctgtacctgtactgtgctgacattatatacagccccttctctttgcttcttgctcgtgccaattggcagttgccattgccaatcaccacgtagagctgcattattgcttgcttcgaggccatgggaactgcaagagttcgcttcgtggtccttgttctgatctctacgtttctcagagtcagagaaggcagagccgcgacattcacgttcgtgaaccggtgcacggggacggtgtggccgggcatccagtccaacgccggaagctcgaggctggacacgacgggcttcgtgctgccgccgggcacgtcgcgcgcggtcccggcgccgtcggggtggtccggccgcgtctgggcccgcaccggctgcgggcaggacggcagcggcaaggtggtgtgcgcgacgggcgactgcgggtccgggtccctggagtgcaacgggcagaacgcggcgacgcctgcgacgctggccgagttcacgctggcctccgcgggcggcaacgacttctacgacgtgagcctggtggacggctacaacctgccgatcctggtggagcccgcgggcggcgccgccaccggcgccagtgccacgacgtgcgccgcggccgggtgcacggcggacctcaacgagcggtgccccgcggagctgcgcgccgagggcggcgccgggtgccgcagcgcctgcgacgccttcggcaggcccgagtactgctgcagcggcgcctacgccaaccccaacacctgccgccccaccgcctactcgcagctcttcaagtccgcctgccccaactcgtacagctacgcatacgacgaccccaccagcaccttcacctgcgccggcggccgcgactacaccatcaccttctgccccgtcgccaccccaagcgtgaaatcgtcgagtggccctggagcggcaacaacgacggcggcaccgacaggcccgacgccgacgctgccgggggcgacgccgcggtcggcaggcggcggcccggaggggcagggcgtgatgctgggcgacaactcctggctcgccagcctcgccacgggcgacgcgtcgtccgcgccggcgctccgggccttgcccctcgcgccgctcctgctcgtcggcctgctcctgcttgtgctgctatagcaccaccagcgggaaacccaggcaaccgaccgcgtcacgggcgtgtgaggcgaaagcttttgatctcggacagcctaccgaacgcgcgcgctcctgctacgtttgatgaatcatctcctagtcacggtgcaggcgtgcagtgcggcggatgattttgacggctagccgaatgcgcgcacccccatccccagtcagcagctgaaggaaaaaaagtttaagtggcctactcatggatgaggtggctgcagcatggactagacacaaatactattagtgctgatggtgtatagtaccgctgccgctttaaagtagtgtacagtgcagtgcagctctgatggcgctgtccctcggcacatgggaggagatgtgccatgccatgccatctgatctgtgcttgcggatcaatcaaatactacgtacgtgtctacgtatatagcgtggtggggaggacatgggcgcggtgatgagaattgagatgatgcccgctgatctggtccactgcttttgagttttgagtgaagccaaaggaaggaaggatcggtgccgccaggcgttcatgcctccctataatccctataaccatttctgagctgcgtcgtatcgtatcaccctaggatcgcattccaattaggtcttgttcgtttgtaccggattgatggatcggaacgatttcaagccgaattagttctctaaattatataaactttgattagctggaacgattcctggtgcaatccgacgtaaacgaacaaggccttagtgtaaacgtaatgtcatgtttttaattcgtaaggttggttgatgcgatctgtgactgatcgagcacggtagggtccctagggaccatacatatcagagcttgcttatagattcatccacattctctcgatcactcgaccatgcactgagcttgtcttgctttcttgccgagagaacaactcacctgcagtttggcagttagtacggagtacgcttgcgctgctaccggacttagggatggcaacgggtttaaaacctgcgggtacagagattataaacccgtacccgcgagattaatgttaaatc

SEQ ID NO: 6985 - DNA, 1920 bp, Zea Mays
cggaaagaggacaaagactcgagccgccgacttcacacggccacgtcgggaacgaagctcagagcagcgcgacggcggtggcgagttgctcgccgccgaggtagaccatcgagccgttcgtgggctgcacgcccgcggcctgcgggttctcgccggagtacttgccgctagaaaaggagtaaaaccaatgttagcacatggtacaaacaaaaacggaattacagtgccacgcggtgggtgaagctctttaacatcgtgacggtagagagaatttaacatgacagtacaagaatcggagaggatttgatgcgagatcttttgtccgggacagtggtggtacatggaacttgaatgtcttgggcagctgcactgcacgcctctctgagcgtgggaacatgggttgcagttgggggtgcaggataggacaagacaggacagggcaagggcctatggttatggtatggggaccgtacggttgaaacggctactagaactagaagccagtagcggcccgttggcctgggtgtgcgggcaggagaagtgaccacacgcaaaccagcagtgtctaggccctggatccatagcccgttggatccgcccgttggccgttgccgcctctcctcctcctcgtctcgtcagagccatcaacggctagacattttttttttctgacaggagtgtagacgatgccgaccagcacagcttcagagggctgtttggtttgcccctgctaaaatttagcccctatcacatcgaatgtttgaacctccgttcggggtattaaatatagtcggattataaaactaatttctcagccgaagattaaaaagtgagacgaatctattacagttggttgagtctatatttcatactcatatttgaaagtcaaacgcttaatgtaacccgagctaaactttagtccacagaaccaaccacccccagtcggagatagcggttagaaaaaggttctcatcggacattgcccacgataacacattagtacttgttaggttattttatcacgtatggattaagtaagattcggaaaaaatatttttttaattgtttggactgaaactcactcaatcccacttaattcacatgaattaaaagtaaaatgaataactctttaaacctagcttggatactctagtattgagctcaattcgtgtgagatgtattaaggtgtattttaaactaatgtaggtcatgtttggtttctttagtctagagactaaatttagttaggagaataaagtttagtacctaacatgtttagtcctatggactaaaattagtaaaaatatactaaatgactcataaaaacactaaaatgacctttaacattctcctgctattagtacaattaaactaaatgaggggcaaatgtggaattaatatggtttagtccattttagcctcctattttagtactaccgtttgacaatttagaaactaaataagattaaaatgaagggactaatctttagtcgatcaaaccaaacatgaccttaaaccctaatacatctcaaccgatatggagtgaggttaataagggcttgttcggttattttcaatccatatggattggaggggattgatacggattggaggggattttgatttgttagggattgaaaccccctcaatccccctcaatccatatggactggggtagaaccgaacaagccctaatagagtacacaaataaagccttagtggtgtggactgtctgtgtgatgtctcagcctctggtctcaagctatccaatttgccatccggaataggcattcagccacctcaataatttggtgccatttcaggtaaacactaacctttggagcttgtatgacaagggaaacctccattttgggaaagaatttacctggtggtgctcgggcagaatgtgatggcgtagct

SEQ ID NO: 6986 - DNA, 2696 bp, Zea Mays
aggaaatgcatcgattgtttagcacataactcctatcacctaatgcattaaacaaggtgataaaagattttaaaacagtaaggaggtgacaaatgcaccggggcttgcctggataacacaaggttagtgtttgttagacgacgtccgcttgacgaccatcctttgtcctagcacttgatcaggcgggttcgtccatcagcatcaccatgcggagtagctcgcgcttggggtcgacttggctcgtcttccgcatcacacgattaattaacgtacctcatgggatgcataatgcacatgtatgaatataaagtggaatagcataagacaaataatctacactgaagttgatgaaacacttataacaaagcattagaatcaatcacaagcaagtaccagcaagcgatataagactaattataataattacacttttctagcctattcagagatagctcatacatcaagaaaccttaaaccttgtacgagtcctctattttccttagctaatgcataacaccgaaaggctaacaatattcaaactcctattattggacacctgagttatagtacatgcaggaacaatttaactaacctatattccaccagggcattctaactatcgatataatacaacgtaacaattactaaggcaaggcttttgacctcactactcaacacaatcaacatcgacaaaattatcgaataatcgcttaaaatactaaatctattcttcacgccactaatttggcatacttcataagtaaaaccaatgtgaacacacttgacatacacgtccgctcgagtacccctacgtaactagcattttaaacctaagttttacctcacgacactagtacaccataatcatgtcctcacatgcgacaagatattttggcaaccatcaaatataactatggcatgtttatgcttcaatcaagataatcgtcgcgattaatatatctattcaatccatcgactcaatcaattaataaaatagcgaactagagaatggttaccgattcaactagaattccaagacatcgttgacgattcttgtttatgcctcctgcaagcaccacatgggatttgttgctttattcaaactctcgggatttttcgacgacgcaagggatgtcgacaagttggagaattgtaaggtcgagcacgacagagagcttcggatcccaacgcaagtagcgtgcaattgaaagatagatcgtcggggtcgacgagcatgtcgcggacgcgacgtagattgacgacgaggaacaagaggtgtcacagcacacaaaggacgtcgcgaagatgtcgggcatcgtctatggcgtgcgtgcaaattcctgggactcgacaagctgggcagagcagagagccaaccccgtgttgcatcaacagcagcgcgactctagtgagacccgagtccgtatgggccgacagcatggacgagcagacacgacacgaagggtgcgagtccgccaaggatgcgaacttgaaggatggcgcagtttagaacgaaaccttactgagcgaagaacgacgaccgacaaggcgaagctcgatgacgaggtcgagccagggatggccagcgcaaacgcacacaagggcttgccaacaacaccaagacgacagcgtggtgtgcacacgacgcaaagagaaacgaccacaactccacgacagcttcacggacacggcgaggacgcagagcgcggtgactgttcttcaatggctagaatactggaattggaggcaggtggttcgaacagaggagcgcacggcccgggaagtttcgacggcgcggacagcgagggagctcgatgcgcgcagggaaacttcatggcgcggtggagaactcgatggtggcccatgcgcaggaaggagcagaggccgagcaaagagtcggcgtgcgcagaggcttgagaggagggagctaggcgcagcactgggcgctggccagcagagaggcgcgcggcaggggagctcggcataggcgcggcttggctggagaaggcgcaagtcgccggcgagcagagaggcaaggtccgagcacagggcgatggggcgcgctggagatggccgagaaggagaagtccaagcgccgtccagggagcaggcgctggggcagggaggagcgcggacgggcggaactccggctgggcacgcgccgatgagggagaagctcggctggggaggggaagcaggggcgcggccaggcgagcaccaaagacgagccagggaccgcgggagagggagctcggcggccagccatggaagcagggcaggggcgcggccagcgcgaggagctcggcgcgacgcaggagaaagatgggggggggggggggggggagagaagcgcacgtggaggagagccgctcggcagagaggagaacgccgggagagaaaggcgttgggggccgggcgcgggagatggaggcgcgccattggagatgataaggaagaagcggcgtgaaaattctgagcagggggcggcgggataaggataggagaagaagatatttccatttctttttttaatttctttattcttctttttttaccgaaaaatcacagatgttttttaattgggatttttagcgatgaacaaagggtcgacgcgctatacgactacacatattattttctcggattttgaaataggaaaccgaagtggccagcaattgttccggtttcggtttatt

SEQ ID NO: 6987 - DNA, 2379 bp, Zea Mays
cctcggcgtccgggcatcgccatcgtagacacggcaaaggagacgccggaaggcccggacggaacaagcgagatatttaaggacgcctttttggcgcgaccccacgacatggcggcatatctatctactacacacgcctttaaaacctttcgccctcctccgcgctcccggctcctcccagcaccagcaagcagccttatctatcccctcagctctgcagctcagtgtccaccaccgccgcctccttccagctgggtggaagaaacatgtcgcgaatggcgcccccgtctccgcctcagtccctgaagcccccgacgctgcccttctccccgcccaaaaagccaccgccgatgccggtgtacaaggacctgcacttcaaccgcgacctctccgccaccaagaagctccaggccggagtggacctggtggcacggttgttgggggtcaccctggggcccaaggggaggaacgtggtgcttggcaacaagtatggccctcccaagattgtcaatgacggggagaccgtccttaaggagatcgaattggaagatccattagaaaatcttggagtgaagctggtccgacaggctggagcaaggaccaatgatattgcaggagatggttgtaccacatccataatccttgcccaaggcctcattgctgaagggatgaaggttcttgcagctggaatcaacccagttcaggtcgcacgtggcattgagaagactgctgctgctttggtgtctgagctcagactgatgtcgcgggtgattgaagaccatgaaattgcacatgtggctgcagttagtgcgggaaatgattatgctgttggaaatatgatttatgatgcttttcaaagagtaggtagacaaggaatggtgagaattgaaaatggaagaggcaccgagaacagtctggaggttctggaaggaatgcaatttgaacgcggttacctatctccttactttgttaccgatcgtggtaacatgacggtggagttcactgactgtcagatactattggttgacaagaaaattacggatgctagtgagattataaggatactggacagtgctgtcaaagaaaactatccgttgttaataatcgccgaggatgtggaagaacaggcaatggctgatttgataaaaaacaagctgaaagggacaattaaggttgcagccgttaaggccttctcttttggggaacaaaagactcaatgcttggatgacattgcaatcatgacaggaggtacactagtgagggatgacatggggcatatactggaaaaggcaggaaaagaggttcttggttccgcttctaaggtggtaatcacgaaagattcaacactaattgttactgacggaagcaatcgtcgagcagttgaggaaagggttgctatgataaaaggccaaattgagaattctaaggaaagttacaacaagaagatattgggtgagaggatagcaaggttatgtggtgcaattgcagtgatccaggttggtgctcaaacaatcattgagatgaaagataagaagctgaggattgaagatgcacttaacacaacaagggcagctattgaggaaggtgttgtagttggtggtggatgtagcctactaagactgtcagagaagattgacgcaatcaaggaatcatcgttggataatatagagcaggaggttggtgctgacatcttcaaacaagccttgagttaccctacctcactaatagcaaaaaatgcaggggtgaatggcgactttgtcattaaaaaggtgttactgaatgatgatgcaaattatggttacaatgctgccaagaactgctatgaggacttgatggctgctggaatactggacgcaacaaaggttgtgaggtgttgcattgagcatgctgctgtagttgctaagtcctttctcacctctgatgtggtgattgttgaggcaaaagaaggcaaacctattcgaataagacccccaatgcctcctaggcacttaattcccccaatgcctgcttcaatttcaggtattcgagtgtagcaggcgtcctttccaccaagaatcagcctcaacacaacaagactacgggcccgctctatgcacgctatcgcatcatcggagcagcagcaagggtggatgatatgtgttatatagggaatacaaaggtgaacaattcaattttgatgttcaaatgctccttaccgtcataaatatacttctgtttttttaggaacatatactttaatagcttcgcttagtttagaattttttttttgaagagtagaagaattactcattattatattaagaaaaaaagagttttagtcctgaaggaccagtatggagaataaaagagccaccttacagcggctaaaaacaagagggc

SEQ ID NO: 6988 - DNA, 2461 bp, Zea Mays
cctcggcgtccgggcatcgccatcgtagacacggcaaaggagacgccggaaggcccggacggaacaagcgagatatttaaggacgcctttttggcgcgaccccacgacatggcggcatatctatctactacacacgcctttaaaacctttcgccctcctccgcgctcccggctcctcccagcaccagcaagcagccttatctatcccctcagctctgcagctcagtgtccaccaccgccgcctccttccagctgggtggaagaaacatgtcgcgaatggcgcccccgtctccgcctcagtccctgaagcccccgacgctgcccttctccccgcccaaaaagccaccgccgatgccggtgtacaaggacctgcacttcaaccgcgacctctccgccaccaagaagctccaggccggagtggacctggtggcacggttgttgggggtcaccctggggcccaaggggaggaacgtggtgcttggcaacaagtatggccctcccaagattgtcaatgacggggagaccgtccttaaggagatcgaattggaagatccattagaaaatcttggagtgaagctggtccgacaggctggagcaaggaccaatgatattgcaggagatggttgtaccacatccataatccttgcccaaggcctcattgctgaagggatgaaggttcttgcagctggaatcaacccagttcaggtcgcacgtggcattgagaagactgctgctgctttggtgtctgagctcagactgatgtcgcgggtgattgaagaccatgaaattgcacatgtggctgcagttagtgcgggaaatgattatgctgttggaaatatgatttatgatgcttttcaaagagtaggtagacaaggaatggtgagaattgaaaatggaagaggcaccgagaacagtctggaggttctggaaggaatgcaatttgaacgcggttacctatctccttactttgttaccgatcgtggtaacatgacggtggagttcactgactgtcagatactattggttgacaagaaaattacggatgctagtgagattataaggatactggacagtgctgtcaaagaaaactatccgttgttaataatcgccgaggatgtggaagaacaggcaatggctgatttgataaaaaacaagctgaaagggacaattaaggttgcagccgttaaggccttctcttttggggaacaaaagactcaatgcttggatgacattgcaatcatgacaggaggtacactagtgagggatgacatggggcatatactggaaaaggcaggaaaagaggttcttggttccgcttctaaggtggtaatcacgaaagattcaacactaattgttactgacggaagcaatcgtcgagcagttgaggaaagggttgctatgataaaaggccaaattgagaattctaaggaaagttacaacaagaagatattgggtgagaggatagcaaggttatgtggtgcaattgcagtgatccaggttggtgctcaaacaatcattgagatgaaagataagaagctgaggattgaagatgcacttaacacaacaagggcagctattgaggaaggtgttgtagttggtggtggatgtagcctactaagactgtcagagaagattgacgcaatcaaggaatcatcgttggataatatagagcaggaggttggtgctgacatcttcaaacaagccttgagttaccctacctcactaatagcaaaaaatgcaggggtgaatggcgactttgtcattaaaaaggtgttactgaatgatgatgcaaattatggttacaatgctgccaagaactgctatgaggacttgatggctgctggaatactggacgcaacaaaggttgtgaggtgttgcattgagcatgctgctgtagttgctaagtcctttctcacctctgatgtggtgattgttgaggcaaaagaaggcaaacctattcgaataagacccccaatgcctcctaggcacttaattcccccaatgcctgcttcaagtattcgagtgtagcaggcgtcctttccaccaagaatcagcctcaacacaacaagactacgggcccggtacccccaagtttctaagataataaagcaaagaaaacatagtgaaattttgacgtcaaacgtggctttgtatgattgctccaagaagctctatgcacgctatcgcatcatcggagcagcagcaagggtggatgatatgtgttatatagggaatacaaaggtgaacaattcaattttgatgttcaaatgctccttaccgtcataaatatacttctgtttttttaggaacatatactttaatagcttcgcttagtttagaattttttttttgaagagtagaagaattactcattattatattaagaaaaaaagagttttagtcctgaaggaccagtatggagaataaaagagccaccttacagcggctaaaaacaagagggc

SEQ ID NO: 6989 - DNA, 554 bp, Zea Mays
gtctcgggagattcggtgtctgcagaaaccaacaatagatctagaagtttcactgtgggtcactggcggatgtgggcgcaggcggccatggcaggagcagtagccgtcctgacactgtagcgccaagggtaggatcaggaatggagcggagttgccgtcctggggcagcggcctgatttggtgctcctcgtatgctgtagtttctgagaccgacctgtgactgtgagtgaccttgtgcttccggaaatctggtggcatctaaagcactcctagttttaagcagcgctggatcaggtttgcctgcctgcttgaaatgaaaccctttccaaatactggtagcaccctggtaaaaatcctctaaaatagtgctgcgctgcttcgttttagacaacgctgttaattccggtctttaggtcgaatctgcgttttggtaaaactagtagcatcttctagatccgtgagactaacagatcggatttaagattaagtaaagaagtcaaaatgacgatttaatgatgcggttttccgactttattacatcttaattgattgga

SEQ ID NO: 6990 - DNA, 1921 bp, Zea Mays
ccactgttgagcaccatcaacgtttcgtgggacccaaggttcagcatcatcgacgttttcgtgccggggggctcccacttcttcctcctcgacagtcctcagtcctccgtgcgaaatctgttcgcactcgcagtcgcagtcaccactgttctccagggatggcgccgtgttgcctgctccagatcggttggtgtctcgagcgcccccgtggctttcgcctcgccgcggcgctgtgcgcggctgtggtcgcgctggcgctggcgcccgccttggatgccacgtcggcgtcgcttctgggcatcaactacggccgcgtggggaacaacctcccgccgcctcagtccgtcatgccgctgctcgagggcctcggtattggccgcgtgcggatgtacgacgccgaccccaccgtgctgcgcgcgttcgcccggaccggggtcgagctcatcgtcggcgtgcccgacgagtgcctggccgccgtggccgacccgagcggcgcggcacagtggctcaaggagaacgtcgcgcctttcctgccggacacgaagatctccgtgctcgccgtcggcaacgaggtgctcaccggcgccaacagctccacgctgtcgcgcaccctcctcccggcgatgcagtccctgcacggcgcggtggccgcgctcggcctcgacaagcagatcaccgtcacctcggcgcacaacctcggcgtgctcgggacgtcgtacccgccctcggcgggggccttccgcaaggacctgctcccgtacctctgccccatcctggactaccatgccaggaccggctcgccgttcctcgtgaacgcgtatccctacttcgcctactccagcgaccccaggggggtgcagcttgactacgcgctgctcgacccgggcttcgccggcgtgcaggaccccaactccaggctgcactaccccaacctcctcgtggcgcaggtggacgcggtgtaccacgccatcgcggcggccaataccgcggcgtcgcgggtggtggaggtgcgggtctcggagaccggctggccctccgcgggggccgccaacgagacggccgcgacgccgcagaacgcggcgcgctacaacagcaacgcgatgcgcctggtggcggagggcaagggcacgccgctcaagcccggggcgccgctccgcgcctacgtgttcgcgctcttcaacgagaacctcaagcccgggttggcgtctgagcgctactacggcctcttcaagcccgacggcacgccggcgtacgagctctccttcaagctaccgcgcgacaactccacgtttggtcacggagataccggcaagggcggtggcggaatcggcggtaacggcaatggcaatggcagcagctggaacaatagcggcggcggaaacagcggctactatgacatctcggcttcagcacgtgacactacgggtcactggcggatgtgggcgcaggcggccatggcaggagcagtagccgtcctgacactgtagcgccaagggtaggatcaggaatggagcggagttgccgtcctggggcagcggcctgatttggtgctcctcgtatgctgtagtttctgagaccgacctgtgactgtgagtgaccttgtgcttccggaaatctggtggcatctaaagcactcctagttttaagcagcgctggatcaggtttgcctgcctgcttgaaatgaaaccctttccaaatactggtagcaccctggtaaaaatcctctaaaatagtgctgcgctgcttcgttttagacaacgctgttaattccggtctttaggtcgaatctgcgttttggtaaaactagtagcatcttctagatccgtgagactaacagatcggatttaagattaagtaaagaagtcaaaatgacgatttaatgatgcggttttccgactttattacatcttaattgattgga

SEQ ID NO: 6991 - DNA, 1658 bp, Zea Mays
ctttgggttgggttatatatattcggtccatccatccatgcaagatccatccatgggctcgctcgctagtagcttggcatgcatgcacgcatgcatggatcgatcatggatagacgatgcctgctagtagtaggccagcaggcgctaccagcgattattgctgcatgatttccccttcgcattcgcgtgtggatctgggtcttttctgaatccgccgtctctgcgataagattctgggagcggccaggcgtgtttctttctcgaggaaggcaagtccgtccccgtccccccctttcacgaggaaatcaacactgacaagccaagcaacggcagtgcaaaaagaagcacgccaagcgctaatccgggaggcctgcctgcggcgatgaatgatatgcacttctcatccgtcgcatccgtgccgtcgatcgcattcctcttctacccgtcaaggcagcagccacgtacaccatgcggatgcatgtgatgtgtgtgtgtgtgtgtgtgtatctccttctatcttgggctctgcacaaagccttccaatgccagtggcggtgtggtgcttcccgatctgatcgatcgatgactcgatgagctagccctccttgaaaagaatagaacgtcagcgccaatctctagtattggtagcagcagtagccgtcctcctcctaggtggtgaatctccaggccgagctgacctacctgcaagcacacctcgccacgctcgagctgccggccccgcccccgctgccggccccgccgcagatgcccatgccaggcccgttctccatctcggacctgccgttgtcgaccagcgtccccaccaccgtcgacctgtccgcgctcttcgacccgccaccaccgcagtgggcgacggcgcagcagccgcaccaccaccatcaacagccgccgcagcaccaccagctccggcaaccggcgccgtatggcgctggcgcgtccgtcaggcccggcggcggccccggcatggcagagagctcaggcggagacgagctgcagtcgctggcgagggagctcctggaccgccaccggtccggcggcgtgaagctcgagcacccgccgccacactcaagatgagctggatgggggagtagaaggatcaaaaacccgtgcagaacaaggtgagagttggcgcccggcagtatcgagggagataggggtcggtgacgggcgatgtccagcacagcaggagtaggtaagcagcattggccggttttcgcgtacccagcacccctgttgttaatcggctggggtgcaatggcggcgcccacttgcttgatatattctccagtttgatcatatttgctccaagacaaaagaaagagtgctggggatcgacgagagtattactagaattgacatgtattagtaacattattgttacctttgataccgttccattagttgcaagatttttattaagaaaagaatctcaacatggtttctatactgttaattgttcacaaaatatcactaatcttgttttctttttcacagtctgaatgcatcaacacccatatatacacatcgtgttttccccccaactagtagcgtttaattaacaaccggcgagtaatgtgcattacaatgaagctatttaagacttcataagttttttcgttaaaaatgtgttaaccaag

SEQ ID NO: 6992 - DNA, 1160 bp, Zea Mays
aaacaccttccgtcccctggccattctgtcacactactcagccagcccgctctatctctttcctctatccaagccagaaaggtagaaaccccccggaaacaatttccggccatggcgaccgcagcccaccaggttgccgccaccttcctctcgttcctttcctcctccactcaccacctcgccccttcctccgtctccctcgggacaacctctgtcctacccgtctcccttcgggccgctggcacacgtggcccacggctcgcctaccgcctccggggccgccgcgtcggtgccgccgtcgcccagctccccaccacgcatccagaggtagtttctggggagaagaagatcagatggtcatcaagggctgtgcggtcttttgcgatggcagagctggaggcccggaagatgaggtaccctacgacaggcactgaggggctcctcatgggcattcttgttgaaggaactagtggtgcagcaaaacttttgcgggctaatggaatcacacttctcaaagtgcgtgaggaggcagcgaatgtgcttgggaaatcagaaatgttttactttagtcccatgcatccaccattgacagaagctgcacagcgagcccttgattgggctgtcaatgaaaaattgaaatcagcatatcaccatttgatgatatattccaggatgagtgaggatggagaagtaaatgccaatcatttgctactggggatatggtcagatgacgagtcagctggtcataaaatcctgtattcgctcggatttgacgatgtgaaagccagtttactggccaaaacggctgacgaggaggctgcaatgagtcctagatagcaaagggagcacctaatctgttattcaacttacaagagatgtgttagggtcaacttacaagcgattgccatgccggtgcctgtaaaaacgttgcggtttgtttgccacggtgaatgcttgtgttcctttctcagctggatttgtgatcagctcatagaaaaagaaaaaaaacttgtagggtccagtgggcctgacgagcccttcaaattttttgttcaatttgcagcctgaatcctaacaggcgagaatttcatgtgaactgtgatattacacagaactcttagtttctagagactaattttagtccttccattttatttcat

SEQ ID NO: 6993 - DNA, 1140 bp, Zea Mays
aaacaccttccgtcccctggccattctgtcacactactcagccagcccgctctatctctttcctctatccaagccagaaaggtagaaaccccccggaaacaatttccggccatggcgaccgcagcccaccaggttgccgccaccttcctctcgttcctttcctcctccactcaccacctcgccccttcctccgtctccctcgggacaacctctgtcctacccgtctcccttcgggccgctggcacacgtggcccacggctcgcctaccgcctccggggccgccgcgtcggtgccgccgtcgcccagctccccaccacgcatccagaggtagtttctggggagaagaagatcagatggtcatcaagggctgtgcggtcttttgcgatggcagagctggaggcccggaagatgaggtaccctacgacaggcactgaggggctcctcatgggcattcttgttgaagtccattatttcaggaactagtggtgcagcaaaacttttgcgggctaatggaatcacacttctcaaagtgcgtgaggaggcagcgaatgtgcttgggaaatcagaaatgttttactttagtcccatgcatccaccattgacagaagctgcacagcgagcccttgattgggctgtcaatgaaaaattgaaatcaggtgaggatggagaagtaaatgccaatcatttgctactggggatatggtcagatgacgagtcagctggtcataaaatcctgtattcgctcggatttgacgatgtgaaagccagtttactggccaaaacggctgacgaggaggctgcaatgagtcctagatagcaaagggagcacctaatctgttattcaacttacaagagatgtgttagggtcaacttacaagcgattgccatgccggtgcctgtaaaaacgttgcggtttgtttgccacggtgaatgcttgtgttcctttctcagctggatttgtgatcagctcatagaaaaagaaaaaaaacttgtagggtccagtgggcctgacgagcccttcaaattttttgttcaatttgcagcctgaatcctaacaggcgagaatttcatgtgaactgtgatattacacagaactcttagtttctagagactaattttagtccttccattttatttcat

SEQ ID NO: 6994 - DNA, 5549 bp, Zea Mays
atgataaataaattgctgaagatagtcttagacccaaacatattcacgaggaaatattacagtcacacagatactgctactgggctattggacggccacacatcgacgccacgtgcaggcaacacaggcaacaaaacacacggtaaatacataaacggagaaaccatctcgtgatcaagggcataccaggcttctcacttctaggcttctgggcttcgtcagagcatccatactcgcaaaaatcgtatcagcaatctccactgaaccacaccagcaatctccactgaaatttgttttgtcgaaactatagatttaataagagcatgacagattgtaacatggatgtcagaaatctagaaaatatgggatataaggtgactctgaattgaactagtaaaatctatagattttatagatttttagaaatctatacctgtttgattgagatttcagatttttggtagcgaatctggttcagaaatctgaaccaaacacaccctaaatgtaccaacatattgttagaactagaagttgcatcttgctgacaccacctgcatgggcagcgggtcaattgcatgtagactatcatgtgctttaaaccgtctgcagcaatctacctatagtttacctaaaaatattgttttgtaatgttctgcactgtaaactacactgttcgcaaaatagagtttgaatatgagtattgggatgagtaaagtgctggagatagccttatgagtctgcaaaagttacaaaaaaaatttaaatgtaaaaaatacaagttacaaaagaaacctctagttaaattggttagttgatctgagtaaaattggttagttgatctgagtagtattctgtattcctcaggttttgagttttaatcccagtcgaagcgaatttgaggttaaagctctcacgctaaatgcttctgttagcgtgtacttaccttctttgttcatcccgcattcccgcaacacgcgctaaatgcatattaatataataccatgggacagtctttttccaaccagcccgagtttttacagtgacaagttcaagtgttccaaacccaccatttcaaatgtgaatttgctgattatttaaattacttcccagccctaacaggaaaattgggtgatctactgcaatgattgaatgttgcggtcaataattaacttggaagcaaaaggaacagaaatctgtccattccttaaatcacttgagctttataaggccctttcagtgtcagcaaagatcaatgaccgaatcaccatatctccactgacgacaagggaaaaagaacactgcttcagcacagtttaattggatgttcacctcccacaggacatattaggtatatcactgaacattacgtacctactattcaatgaaacaagccaatatttcactgttgtgatcaaccctaagatgtttgtatcagacgaacagcccagtcagagtaatcaatggatgacagtgatctcagaaactaaaaaagattagactaatgtgtaagtagctgagaatagaatacaattctcacccatgattacattccagccagtgttgtttctttaatcaactggtatccaacaaaattctcaatgtgtatgcaacttatgcctattgggaagggcttagttttccatcaaaagtcccataagttgggcttatcgtagaatattcaaaaagggattatattaacaataactttagtccctttctcactaaggcctatttggtttgtttagtccatggactaaaatttaattggggtactaaagtttagtccctagcctgtttggttacagaaacaaaatatttagaacacattaaatgactcgtaagaagaccaaaatgctccttaacattttgttgccattagtgcaattgaaacacaaatgagggacaacagatagaattaatatgattcagtcccttttagacaccctttgagagactagggactaaatcagtttagtctctgttttagtcccacagtttagcaatttagagactaaataggattagaattgacggactaatctttagtccctcgaaccaaaccgccctttaatttcagacatgtcaagtcatgcagcaaccgccgccttgaatagtgcctattcatatgggcttcgcttccaccaagagtctcataatcaagaggacttatacccttgactcttgagaaaggcagtagattctcagaagagtactccattccatttcttattttatttcggttatatattaaggcatgtaggaacccccaccttgaatagttcattttcatcacattaggctgtaaatactccctctgtcctaaactattagtcgttttagctcttgatttttatgtctatatttaaatagatgatgataaatctagacacatatataaaataaatacattaattattatatgaatcaactaaaaaggtaaaacaaattttattttgagacagatgagtactaaacagggtaaagttaaatttgctccaagggcggggcatgcgcccttagtaaccaggaacttggaacttggccacattcctcgttccgcgaatattcgttctgttccgagaacatgggaacaatctcattccagtagtgttaaatcctagttttttttagtgcaccgcgtaccaccctcgatcccatcgatccaggaacctcgttactaaacatgtgccatcccaaccaccgttggatgtgcatagggataggtgcagtacaggagatccactactaaacagctattccatcatggctggtaaaggaggaatgcctctagaacccacatgtggcagcaaagatgggctcaatttcattcctataatttaagtcgtaccacacccatcactgtagcaagccgctcaaaatccgctgcaagttccaaatggtgtcaataagcatagtacaaaaaacaaaacaaagaactacatgccacatgaagctatctccagagtccagacagtgcgtcttaatcccgactctcctcaacaaagtgcttcaatcagttcaggaatgaatgtaaagtatggttatgaatttcctccctaaaaacacagatctagttgaatcctacaagattctgttttttaatgggaattgcataggatcacgagaatgtatcatacttagctgtttaaccagacagcactagttccattgttagccttcgtttgcttgctttttagctgaaatttggcacacacaaagcatgaacactaggtacaaacctgttaattttatagcacctgaataatgatatatcgcatatgggaacagaagactgaaaaatctgggttctcctaaccttgaactggtggtataccatctgatgtcagtgcttgacaataaccttgctgaaaggctgcacatcgcaaacgttgctgatgaacctatatgtcgaaggtcatgatacatgaacaaatggttggttagttcattaatattgctggtaaattcatcagcagcaagaaacatgtagtagcaaaggaaatggtgtaatgcaatcagactaaggaaatgaagtcaccctctattcaatgtactgtgtatatgcatgccaagacaaaatcttctacctcaacaaacaaagaaatgcagaatgaaataatcttgaaccgcagaaatgcaaaagttatgcagattgttatctcttgaaatgccccagtttgtaggttaagaacatacaagttaattggtgaaatttgttctattgttaattctccaaggttctgaatcaaacatttaattatcttttatcataccatcacatttcaaaatagcaaattatgtgacagaattagtaaaatgtcactataacacacaatttagaaccatgccacaggcccaccacttacatgtgaggctcagtcctacttgagattttgagtgaaatatccaatgcactccatccaaattataaggcattttggcttttatagattcatggctttaactatgtatctagagtagacagtgtgtatatctaagtgcatattaaaagctatgtatctagaaaagccaacatgttttatagtttggaatggaggaaatattttaaactgaaaacattgaaataacatttaaccaaaatcaaaatacaaaatctcatctgaaacattaaatacagaaactagaaaagtgtaaatgttattgaagcgatatcactcttgtttgctttaatgagcatggactcatcccataaaaaatgagtacgaacaacagtgttgacagtatccctctgttccaaactgtatgttgtttttgttcggtagtatatataagttaaacttccttaactttaaccaaatttatagaaaagtgcaccaacttctataacctcaagttagttttgcttaatacaccatgaaatacattttgatagtacttcatcggtattgcagatgttaacatatttttctataaatattgtcaaattagaaaagtttaggacaatattaatacaacaatttacaatttggaatggaggaagcagtactatatgtgacacagaggcatcttggagcttggaaaaaaggaacgcaaaatctcaataatgtattcaaaacactaagtttgcatttcctatgatatcatgtttcatgtaaccccaacatgggaagcatcaattgtcatggcacaaaccaactagccaacaacaataggaactgaaggaaacaatatatatttatgaatggatcattaagctacaaatgtctgcagttgcataacagaaaataccatatcatttacctgatatatatattttagattcagagggcaagataaaaagcattcaacaacaacaaagccttttagtcccagcaagttggggtaagcaagataaataaaaacatactagtttctaaatcattgtacccaagatacaaaccggaacaggcccaaaaatgtataattaagcatagacacttcttaaaagggatgcaacaaagtgaggatgagactaatgcaaccttgtggaggaatgagaattgagaaaactaacatataattgtgactaaactgctgctaaactcgcacgcatgcccaccagggttttgaaaatccacgactacgacgcgcctaggcgctaggccacggcctcccgcctggactagggggtaggcaggctgctaggcgtttggagcgcctaggcggcgccgagcggcgattccgcgcgcccaggagctcaggcgtccgcgtaggcgagctaggcgcgcgcgggggaaaatggcgggtgggaaaaggtcacgcgcgcaggagagaatggcgcgcgcgggggagaaaataggacgcgcgcggtagagaaaaggctagcgcgcgcagaaaaggactgtacgccagtaaaagaagctgtacgccagaaaaggaaggagagaaaacacgcggtagagaagacccctgtagctgcttgcttttctcctgtacgcggtaaaacttgcttctctcctcccaatcttgtttctctcctgtacgcgggcggctactgcttgctgaaggtttctctcctgtacgcgcgacagcagacagcccaaggtttg

SEQ ID NO: 6995 - DNA, 5331 bp, Zea Mays
atgataaataaattgctgaagatagtcttagacccaaacatattcacgaggaaatattacagtcacacagatactgctactgggctattggacggccacacatcgacgccacgtgcaggcaacacaggcaacaaaacacacggtaaatacataaacggagaaaccatctcgtgatcaagggcataccaggcttctcacttctaggcttctgggcttcgtcagagcatccatactcgcaaaaatcgtatcagcaatctccactgaaccacaccagcaatctccactgaaatttgttttgtcgaaactatagatttaataagagcatgacagattgtaacatggatgtcagaaatctagaaaatatgggatataaggtgactctgaattgaactagtaaaatctatagattttatagatttttagaaatctatacctgtttgattgagatttcagatttttggtagcgaatctggttcagaaatctgaaccaaacacaccctaaatgtaccaacatattgttagaactagaagttgcatcttgctgacaccacctgcatgggcagcgggtcaattgcatgtagactatcatgtgctttaaaccgtctgcagcaatctacctatagtttacctaaaaatattgttttgtaatgttctgcactgtaaactacactgttcgcaaaatagagtttgaatatgagtattgggatgagtaaagtgctggagatagccttatgagtctgcaaaagttacaaaaaaaatttaaatgtaaaaaatacaagttacaaaagaaacctctagttaaattggttagttgatctgagtaaaattggttagttgatctgagtagtattctgtattcctcaggttttgagttttaatcccagtcgaagcgaatttgaggttaaagctctcacgctaaatgcttctgttagcgtgtacttaccttctttgttcatcccgcattcccgcaacacgcgctaaatgcatattaatataataccatgggacagtctttttccaaccagcccgagtttttacagtgacaagttcaagtgttccaaacccaccatttcaaatgtgaatttgctgattatttaaattacttcccagccctaacaggaaaattgggtgatctactgcaatgattgaatgttgcggtcaataattaacttggaagcaaaaggaacagaaatctgtccattccttaaatcacttgagctttataaggccctttcagtgtcagcaaagatcaatgaccgaatcaccatatctccactgacgacaagggaaaaagaacactgcttcagcacagtttaattggatgttcacctcccacaggacatattaggtatatcactgaacattacgtacctactattcaatgaaacaagccaatatttcactgttgtgatcaaccctaagatgtttgtatcagacgaacagcccagtcagagtaatcaatggatgacagtgatctcagaaactaaaaaagattagactaatgtgtaagtagctgagaatagaatacaattctcacccatgattacattccagccagtgttgtttctttaatcaactggtatccaacaaaattctcaatgtgtatgcaacttatgcctattgggaagggcttagttttccatcaaaagtcccataagttgggcttatcgtagaatattcaaaaagggattatattaacaataactttagtccctttctcactaaggcctatttggtttgtttagtccatggactaaaatttaattggggtactaaagtttagtccctagcctgtttggttacagaaacaaaatatttagaacacattaaatgactcgtaagaagaccaaaatgctccttaacattttgttgccattagtgcaattgaaacacaaatgagggacaacagatagaattaatatgattcagtcccttttagacaccctttgagagactagggactaaatcagtttagtctctgttttagtcccacagtttagcaatttagagactaaataggattagaattgacggactaatctttagtccctcgaaccaaaccgccctttaatttcagacatgtcaagtcatgcagcaaccgccgccttgaatagtgcctattcatatgggcttcgcttccaccaagagtctcataatcaagaggacttatacccttgactcttgagaaaggcagtagattctcagaagagtactccattccatttcttattttatttcggttatatattaaggcatgtaggaacccccaccttgaatagttcattttcatcacattaggctgtaaatactccctctgtcctaaactattagtcgttttagctcttgatttttatgtctatatttaaatagatgatgataaatctagacacatatataaaataaatacattaattattatatgaatcaactaaaaaggtaaaacaaattttattttgagacagatgagtactaaacagggtaaagttaaatttgctccaagggcggggcatgcgcccgagatccactactaaacagctattccatcatggctggtaaaggaggaatgcctctagaacccacatgtggcagcaaagatgggctcaatttcattcctataatttaagtcgtaccacacccatcactgtagcaagccgctcaaaatccgctgcaagttccaaatggtgtcaataagcatagtacaaaaaacaaaacaaagaactacatgccacatgaagctatctccagagtccagacagtgcgtcttaatcccgactctcctcaacaaagtgcttcaatcagttcaggaatgaatgtaaagtatggttatgaatttcctccctaaaaacacagatctagttgaatcctacaagattctgttttttaatgggaattgcataggatcacgagaatgtatcatacttagctgtttaaccagacagcactagttccattgttagccttcgtttgcttgctttttagctgaaatttggcacacacaaagcatgaacactaggtacaaacctgttaattttatagcacctgaataatgatatatcgcatatgggaacagaagactgaaaaatctgggttctcctaaccttgaactggtggtataccatctgatgtcagtgcttgacaataaccttgctgaaaggctgcacatcgcaaacgttgctgatgaacctatatgtcgaaggtcatgatacatgaacaaatggttggttagttcattaatattgctggtaaattcatcagcagcaagaaacatgtagtagcaaaggaaatggtgtaatgcaatcagactaaggaaatgaagtcaccctctattcaatgtactgtgtatatgcatgccaagacaaaatcttctacctcaacaaacaaagaaatgcagaatgaaataatcttgaaccgcagaaatgcaaaagttatgcagattgttatctcttgaaatgccccagtttgtaggttaagaacatacaagttaattggtgaaatttgttctattgttaattctccaaggttctgaatcaaacatttaattatcttttatcataccatcacatttcaaaatagcaaattatgtgacagaattagtaaaatgtcactataacacacaatttagaaccatgccacaggcccaccacttacatgtgaggctcagtcctacttgagattttgagtgaaatatccaatgcactccatccaaattataaggcattttggcttttatagattcatggctttaactatgtatctagagtagacagtgtgtatatctaagtgcatattaaaagctatgtatctagaaaagccaacatgttttatagtttggaatggaggaaatattttaaactgaaaacattgaaataacatttaaccaaaatcaaaatacaaaatctcatctgaaacattaaatacagaaactagaaaagtgtaaatgttattgaagcgatatcactcttgtttgctttaatgagcatggactcatcccataaaaaatgagtacgaacaacagtgttgacagtatccctctgttccaaactgtatgttgtttttgttcggtagtatatataagttaaacttccttaactttaaccaaatttatagaaaagtgcaccaacttctataacctcaagttagttttgcttaatacaccatgaaatacattttgatagtacttcatcggtattgcagatgttaacatatttttctataaatattgtcaaattagaaaagtttaggacaatattaatacaacaatttacaatttggaatggaggaagcagtactatatgtgacacagaggcatcttggagcttggaaaaaaggaacgcaaaatctcaataatgtattcaaaacactaagtttgcatttcctatgatatcatgtttcatgtaaccccaacatgggaagcatcaattgtcatggcacaaaccaactagccaacaacaataggaactgaaggaaacaatatatatttatgaatggatcattaagctacaaatgtctgcagttgcataacagaaaataccatatcatttacctgatatatatattttagattcagagggcaagataaaaagcattcaacaacaacaaagccttttagtcccagcaagttggggtaagcaagataaataaaaacatactagtttctaaatcattgtacccaagatacaaaccggaacaggcccaaaaatgtataattaagcatagacacttcttaaaagggatgcaacaaagtgaggatgagactaatgcaaccttgtggaggaatgagaattgagaaaactaacatataattgtgactaaactgctgctaaactcgcacgcatgcccaccagggttttgaaaatccacgactacgacgcgcctaggcgctaggccacggcctcccgcctggactagggggtaggcaggctgctaggcgtttggagcgcctaggcggcgccgagcggcgattccgcgcgcccaggagctcaggcgtccgcgtaggcgagctaggcgcgcgcgggggaaaatggcgggtgggaaaaggtcacgcgcgcaggagagaatggcgcgcgcgggggagaaaataggacgcgcgcggtagagaaaaggctagcgcgcgcagaaaaggactgtacgccagtaaaagaagctgtacgccagaaaaggaaggagagaaaacacgcggtagagaagacccctgtagctgcttgcttttctcctgtacgcggtaaaacttgcttctctcctcccaatcttgtttctctcctgtacgcgggcggctactgcttgctgaaggtttctctcctgtacgcgcgacagcagacagcccaaggtttg

SEQ ID NO: 6996 - DNA, 3198 bp, Zea Mays
acgatcccccttctcgatccctacacgtctcctgaaacgcacgccctcccttggctgccccccgccccttccctttcgccccctctcgcgcaatttccccagcccggaccccaaccccggcggcgctgcagtccaccgcaagtcacctccacctcacgcgaggcctccagccctcgtcgccccgcgcttctcccccacgacccggccgccttcgcgcttgcgccccgcggatcgccggcgcgaccctcaggtgtgtacgtctggcatggcaagggacctatcaactggccctgctttctcttttcatgaatgatgtccttccgttcgaaggacgcacatgcacaaacaagacttaactggccatggagaagccaatcgccgttatcagcgcagctgcttgttgatattccacctgaaatagagttgtccgactaccggagattgccaagttctcgaagcgagagcccatctggacttctccatgacgaaggcgtcaaggaagaacctatccctgatctggacattttctttgaaaggctttacgaatatttctgcgcaaaagggctcaggtgtatcattaccaaatggataatagagatcctcaatgtactttttatggtatgctgtatcgggttctttttcttatttgttgattgggatactcttattcatttgaaatgcggtgtggaggcacttgagtctggggagaaaccatgtgatcttatgaaggccattaagcatgatccattagttcccttcacattgcccaaaatgataactgttggatcaatggtcataatgacagcttatggacttaccaactttctcaagttctttgtacagttaagaagtacactcaatgttcgtcagttctactatgacagacttaaggtcaatgatcttgagattcaaactatatcatggcccaaaataattgagaaagttgtcctgctccagaaatctcaaaaactatgtgttgttagggatctctcagagcatgatattatcatgagaatcatgaggaaagaaaattatttgattgggatggtcaataaaggcattctttcttttccaattcattcttgtgtgcctggggctggcccaactggatcacatgagcatggcaggagaaactatctgatacttccaaagtcccttgaatggaccttaaactggtgcatctttcaaagtatgttcgatagtaaattttgtgtaaggaaagagtttttgacaagcccagatgtgttgagaaagcgacttatatttgttggcattgcaatgcttatcctatcaccctgccttgtgatatttccattggtgtacgtcattctaaggcatgctgaagaaatttataatcaccctagtacagcatcatctagacggtggtcaaacttatcaaggtggatctttagggaatataacgaggttgatcacttctttagacacagaatgaacaacagcgctgttcattctttaaattacttgaagcaatttccaaccccactggtttccatcatggctaaatttgtatcttttgtttctggtggcttggctggtgctctaataatcattggatttgtgggtgaatctattcttgaaggacatatttttggaagaaatcttctctggtatactattgtttttggaacaatagcagctataagtcgaaaagtagtggccgatgagcttcaagtttttgacccagaaggggccatgtgcctcgctgttcaccaaacacattacatgccaaagcgatggcgtggtaaagagaacagcgaactttatactataatcatgctacttgaagagatggcctccattttcatcactccttacttgcttatttctgaggtacctaagcgagttgatgacattctgcgcttcatctcagacttcacaatatatgtagacggagtgggagattctaagcttgtttaacttcaaaaaacatggaaatagaaactatgggtcaccattcaatgctcttaaaggtctcaggagctcccaagggaagatggagaaatcattcttaagtttccagagtgtctatccatcatgtgagccaaatgctgatggcaaacaattcttatctaacctccaaaagttcaaagaaaggcaagtacgtcaacaagctcttgcacaatatcaagcactggaggcttcaggctttgtggcaggcactagaggtcaaagggatgataccttccaacaactccatagcgatattcatggccacgctgaggccaccctgcctcctgtttataacttgagccccttgggattgcttgacacagaccaaagaatgcatccatatatcctggactggtattacacatgtcatccaccacactcggatagagctgagggcccccaatttgaccaagcattccctgagaccggtgtgagcacgagtccaccagcaagggaaacatctgaaattgaagaagtcggagactgggacaacgagttgtatgaaagggttcaaagtcatctgggggcatcaacatcaagtgctttgttctggaacactccagggaaggaccatggtacagaagaaaacactaacagcaattggtgggcacatgcccctgcatatccttctggtccccagggtagcttcatcgagcctccagattttggaaatcgatacatgacaaatcctcattccagtaatcacagtggcggtacatcggagggaagcacgtcggatctagagcagagcaatagcagaagcagaagttcctggaggagccctcaagcgttgtccaagacaagatatatggacgactctgatattgaggaagggctaagcctgcactttgctgatgtccatcagaaggatgaagacgatagacacctggtggtcagggatcatcaagatcccgcaccatctggtcttccagtaagaataatacctagaagcagtgaccctgtgtaagctggttaaacaccacaggattatcacataaaaaaaaactccacaggattagttgatgcatgttaacggttgtattttgttgtttgaaccacatcaaaatcaaatgctgcgtctcgcccgtgaactggcaaaacagtcacagattctttttgtacaggccagtaatgatagaaacattcttttacaagcgtgcttggtaggtgcaacacaagtcacaagtgctgtaaaacttggataaagtagcaattgctatccttttt

SEQ ID NO: 6997 - DNA, 3289 bp, Zea Mays
acgatcccccttctcgatccctacacgtctcctgaaacgcacgccctcccttggctgccccccgccccttccctttcgccccctctcgcgcaatttccccagcccggaccccaaccccggcggcgctgcagtccaccgcaagtcacctccacctcacgcgaggcctccagccctcgtcgccccgcgcttctcccccacgacccggccgccttcgcgcttgcgccccgcggatcgccggcgcgaccctcaggtgtgtacgtctggcatggcaagggacctatcaactggccctgctttctcttttcatgaatgatgtccttccgttcgaaggacgcacatgcacaaacaagacttaactggccatggagaagccaatcgccgttatcagcgcagctgcttgttgatattccacctgaaatagagttgtccgactaccggagattgccaagttctcgaagcgagagcccatctggacttctccatgacgaaggcgtcaaggaagaacctatccctgatctggacattttctttgaaaggctttacgaatatttctgcgcaaaagggctcaggtgtatcattaccaaatggataatagagatcctcaatgtactttttatggtatgctgtatcgggttctttttcttatttgttgattgggatactcttattcatttgaaatgcggtgtggaggcacttgagtctggggagaaaccatgtgatcttatgaaggccattaagcatgatccattagttcccttcacattgcccaaaatgataactgttggatcaatggtcataatgacagcttatggacttaccaactttctcaagttctttgtacagttaagaagtacactcaatgttcgtcagttctactatgacagacttaaggtcaatgatcttgagattcaaactatatcatggcccaaaataattgagaaagttgtcctgctccagaaatctcaaaaactatgtgttgttagggatctctcagagcatgatattatcatgagaatcatgaggaaagaaaattatttgattgggatggtcaataaaggcattctttcttttccaattcattcttgtgtgcctggggctggcccaactggatcacatgagcatggcaggagaaactatctgatacttccaaagtcccttgaatggaccttaaactggtgcatctttcaaagtatgttcgatagtaaattttgtgtaaggaaagagtttttgacaagcccagatgtgttgagaaagcgacttatatttgttggcattgcaatgcttatcctatcaccctgccttgtgatatttccattggtgtacgtcattctaaggcatgctgaagaaatttataatcaccctagtacagcatcatctagacggtggtcaaacttatcaaggtggatctttagggaatataacgaggttgatcacttctttagacacagaatgaacaacagcgctgttcattctttaaattacttgaagcaatttccaaccccactggtttccatcatggctaaatttgtatcttttgtttctggtggcttggctggtgctctaataatcattggatttgtgggtgaatctattcttgaaggacatatttttggaagaaatcttctctggtatactattgtttttggaacaatagcagctataagtcgaaaagtagtggccgatgagcttcaagtttttgacccagaaggggccatgtgcctcgctgttcaccaaacacattacatgccaaagcgatggcgtggtaaagagaacagcgaactttatactataatcatgctacttgaagagatggcctccattttcatcactccttacttgcttatttctgaggtacctaagcgagttgatgacattctgcgcttcatctcagacttcacaatatatgtagacggagtgggagatgtatgcaggtctttgctgctgtttcttctgctatttagctcttatttttgtttggcctatgcaacacttaacacatttatttctttatgtttcaatagtctaagcttgtttaacttcaaaaaacatggaaatagaaactatgggtcaccattcaatgctcttaaaggtctcaggagctcccaagggaagatggagaaatcattcttaagagtgtctatccatcatgtgagccaaatgctgatggcaaacaattcttatctaacctccaaaagttcaaagaaaggcaagtacgtcaacaagctcttgcacaatatcaagcactggaggcttcaggctttgtggcaggcactagaggtcaaagggatgataccttccaacaactccatagcgatattcatggccacgctgaggccaccctgcctcctgtttataacttgagccccttgggattgcttgacacagaccaaagaatgcatccatatatcctggactggtattacacatgtcatccaccacactcggatagagctgagggcccccaatttgaccaagcattccctgagaccggtgtgagcacgagtccaccagcaagggaaacatctgaaattgaagaagtcggagactgggacaacgagttgtatgaaagggttcaaagtcatctgggggcatcaacatcaagtgctttgttctggaacactccagggaaggaccatggtacagaagaaaacactaacagcaattggtgggcacatgcccctgcatatccttctggtccccagggtagcttcatcgagcctccagattttggaaatcgatacatgacaaatcctcattccagtaatcacagtggcggtacatcggagggaagcacgtcggatctagagcagagcaatagcagaagcagaagttcctggaggagccctcaagcgttgtccaagacaagatatatggacgactctgatattgaggaagggctaagcctgcactttgctgatgtccatcagaaggatgaagacgatagacacctggtggtcagggatcatcaagatcccgcaccatctggtcttccagtaagaataatacctagaagcagtgaccctgtgtaagctggttaaacaccacaggattatcacataaaaaaaaactccacaggattagttgatgcatgttaacggttgtattttgttgtttgaaccacatcaaaatcaaatgctgcgtctcgcccgtgaactggcaaaacagtcacagattctttttgtacaggccagtaatgatagaaacattcttttacaagcgtgcttggtaggtgcaacacaagtcacaagtgctgtaaaacttggataaagtagcaattgctatccttttt

SEQ ID NO: 6998 - DNA, 3227 bp, Zea Mays
acgatcccccttctcgatccctacacgtctcctgaaacgcacgccctcccttggctgccccccgccccttccctttcgccccctctcgcgcaatttccccagcccggaccccaaccccggcggcgctgcagtccaccgcaagtcacctccacctcacgcgaggcctccagccctcgtcgccccgcgcttctcccccacgacccggccgccttcgcgcttgcgccccgcggatcgccggcgcgaccctcaggtgtgtacgtctggcatggcaagggacctatcaactggccctgctttctcttttcatgaatgatgtccttccgttcgaaggacgcacatgcacaaacaagacttaactggccatggagaagccaatcgccgttatcagcgcagctgcttgttgatattccacctgaaatagagttgtccgactaccggagattgccaagttctcgaagcgagagcccatctggacttctccatgacgaaggcgtcaaggaagaacctatccctgatctggacattttctttgaaaggctttacgaatatttctgcgcaaaagggctcaggtgtatcattaccaaatggataatagagatcctcaatgtactttttatggtatgctgtatcgggttctttttcttatttgttgattgggatactcttattcatttgaaatgcggtgtggaggcacttgagtctggggagaaaccatgtgatcttatgaaggccattaagcatgatccattagttcccttcacattgcccaaaatgataactgttggatcaatggtcataatgacagcttatggacttaccaactttctcaagttctttgtacagttaagaagtacactcaatgttcgtcagttctactatgacagacttaaggtcaatgatcttgagattcaaactatatcatggcccaaaataattgagaaagttgtcctgctccagaaatctcaaaaactatgtgttgttagggatctctcagagcatgatattatcatgagaatcatgaggaaagaaaattatttgattgggatggtcaataaaggcattctttcttttccaattcattcttgtgtgcctggggctggcccaactggatcacatgagcatggcaggagaaactatctgatacttccaaagtcccttgaatggaccttaaactggtgcatctttcaaagtatgttcgatagtaaattttgtgtaaggaaagagtttttgacaagcccagatgtgttgagaaagcgacttatatttgttggcattgcaatgcttatcctatcaccctgccttgtgatatttccattggtgtacgtcattctaaggcatgctgaagaaatttataatcaccctagtacagcatcatctagacggtggtcaaacttatcaaggtggatctttagggaatataacgaggttgatcacttctttagacacagaatgaacaacagcgctgttcattctttaaattacttgaagcaatttccaaccccactggtttccatcatggctaaatttgtatcttttgtttctggtggcttggctggtgctctaataatcattggatttgtgggtgaatctattcttgaaggacatatttttggaagaaatcttctctggtatactattgtttttggaacaatagcagctataagtcgaaaagtagtggccgatgagcttcaagtttttgacccagaaggggccatgtgcctcgctgttcaccaaacacattacatgccaaagcgatggcgtggtaaagagaacagcgaacttgtacgaagagaatttgagacattatttccgtatactataatcatgctacttgaagagatggcctccattttcatcactccttacttgcttatttctgagcgagttgatgacattctgcgcttcatctcagacttcacaatatatgtagacggagtgggagatgtatgcagtctaagcttgtttaacttcaaaaaacatggaaatagaaactatgggtcaccattcaatgctcttaaaggtctcaggagctcccaagggaagatggagaaatcattcttaagtttccagagtgtctatccatcatgtgagccaaatgctgatggcaaacaattcttatctaacctccaaaagttcaaagaaaggcaagtacgtcaacaagctcttgcacaatatcaagcactggaggcttcaggctttgtggcaggcactagaggtcaaagggatgataccttccaacaactccatagcgatattcatggccacgctgaggccaccctgcctcctgtttataacttgagccccttgggattgcttgacacagaccaaagaatgcatccatatatcctggactggtattacacatgtcatccaccacactcggatagagctgagggcccccaatttgaccaagcattccctgagaccggtgtgagcacgagtccaccagcaagggaaacatctgaaattgaagaagtcggagactgggacaacgagttgtatgaaagggttcaaagtcatctgggggcatcaacatcaagtgctttgttctggaacactccagggaaggaccatggtacagaagaaaacactaacagcaattggtgggcacatgcccctgcatatccttctggtccccagggtagcttcatcgagcctccagattttggaaatcgatacatgacaaatcctcattccagtaatcacagtggcggtacatcggagggaagcacgtcggatctagagcagagcaatagcagaagcagaagttcctggaggagccctcaagcgttgtccaagacaagatatatggacgactctgatattgaggaagggctaagcctgcactttgctgatgtccatcagaaggatgaagacgatagacacctggtggtcagggatcatcaagatcccgcaccatctggtcttccagtaagaataatacctagaagcagtgaccctgtgtaagctggttaaacaccacaggattatcacataaaaaaaaactccacaggattagttgatgcatgttaacggttgtattttgttgtttgaaccacatcaaaatcaaatgctgcgtctcgcccgtgaactggcaaaacagtcacagattctttttgtacaggccagtaatgatagaaacattcttttacaagcgtgcttggtaggtgcaacacaagtcacaagtgctgtaaaacttggataaagtagcaattgctatccttttt

SEQ ID NO: 6999 - DNA, 3205 bp, Zea Mays
acgatcccccttctcgatccctacacgtctcctgaaacgcacgccctcccttggctgccccccgccccttccctttcgccccctctcgcgcaatttccccagcccggaccccaaccccggcggcgctgcagtccaccgcaagtcacctccacctcacgcgaggcctccagccctcgtcgccccgcgcttctcccccacgacccggccgccttcgcgcttgcgccccgcggatcgccggcgcgaccctcaggtgtgtacgtctggcatggcaagggacctatcaactggccctgctttctcttttcatgaatgatgtccttccgttcgaaggacgcacatgcacaaacaagacttaactggccatggagaagccaatcgccgttatcagcgcagctgcttgttgatattccacctgaaatagagttgtccgactaccggagattgccaagttctcgaagcgagagcccatctggacttctccatgacgaaggcgtcaaggaagaacctatccctgatctggacattttctttgaaaggctttacgaatatttctgcgcaaaagggctcaggtgtatcattaccaaatggataatagagatcctcaatgtactttttatggtatgctgtatcgggttctttttcttatttgttgattgggatactcttattcatttgaaatgcggtgtggaggcacttgagtctggggagaaaccatgtgatcttatgaaggccattaagcatgatccattagttcccttcacattgcccaaaatgataactgttggatcaatggtcataatgacagcttatggacttaccaactttctcaagttctttgtacagttaagaagtacactcaatgttcgtcagttctactatgacagacttaaggtcaatgatcttgagattcaaactatatcatggcccaaaataattgagaaagttgtcctgctccagaaatctcaaaaactatgtgttgttagggatctctcagagcatgatattatcatgagaatcatgaggaaagaaaattatttgattgggatggtcaataaaggcattctttcttttccaattcattcttgtgtgcctggggctggcccaactggatcacatgagcatggcaggagaaactatctgatacttccaaagtcccttgaatggaccttaaactggtgcatctttcaaagtatgttcgatagtaaattttgtgtaaggaaagagtttttgacaagcccagatgtgttgagaaagcgacttatatttgttggcattgcaatgcttatcctatcaccctgccttgtgatatttccattggtgtacgtcattctaaggcatgctgaagaaatttataatcaccctagtacagcatcatctagacggtggtcaaacttatcaaggtggatctttagggaatataacgaggttgatcacttctttagacacagaatgaacaacagcgctgttcattctttaaattacttgaagcaatttccaaccccactggtttccatcatggctaaatttgtatcttttgtttctggtggcttggctggtgctctaataatcattggatttgtgggtgaatctattcttgaaggacatatttttggaagaaatcttctctggtatactattgtttttggaacaatagcagctataagtcgaaaagtagtggccgatgagcttcaagtttttgacccagaaggggccatgtgcctcgctgttcaccaaacacattacatgccaaagcgatggcgtggtaaagagaacagcgaacttgtacgaagagaatttgagacattatttccgtatactataatcatgctacttgaagagatggcctccattttcatcactccttacttgcttatttctgaggtacctaagacttcacaatatatgtagacggagtgggagatgtatgcagtctaagcttgtttaacttcaaaaaacatggaaatagaaactatgggtcaccattcaatgctcttaaaggtctcaggagctcccaagggaagatggagaaatcattcttaagtttccagagtgtctatccatcatgtgagccaaatgctgatggcaaacaattcttatctaacctccaaaagttcaaagaaaggcaagtacgtcaacaagctcttgcacaatatcaagcactggaggcttcaggctttgtggcaggcactagaggtcaaagggatgataccttccaacaactccatagcgatattcatggccacgctgaggccaccctgcctcctgtttataacttgagccccttgggattgcttgacacagaccaaagaatgcatccatatatcctggactggtattacacatgtcatccaccacactcggatagagctgagggcccccaatttgaccaagcattccctgagaccggtgtgagcacgagtccaccagcaagggaaacatctgaaattgaagaagtcggagactgggacaacgagttgtatgaaagggttcaaagtcatctgggggcatcaacatcaagtgctttgttctggaacactccagggaaggaccatggtacagaagaaaacactaacagcaattggtgggcacatgcccctgcatatccttctggtccccagggtagcttcatcgagcctccagattttggaaatcgatacatgacaaatcctcattccagtaatcacagtggcggtacatcggagggaagcacgtcggatctagagcagagcaatagcagaagcagaagttcctggaggagccctcaagcgttgtccaagacaagatatatggacgactctgatattgaggaagggctaagcctgcactttgctgatgtccatcagaaggatgaagacgatagacacctggtggtcagggatcatcaagatcccgcaccatctggtcttccagtaagaataatacctagaagcagtgaccctgtgtaagctggttaaacaccacaggattatcacataaaaaaaaactccacaggattagttgatgcatgttaacggttgtattttgttgtttgaaccacatcaaaatcaaatgctgcgtctcgcccgtgaactggcaaaacagtcacagattctttttgtacaggccagtaatgatagaaacattcttttacaagcgtgcttggtaggtgcaacacaagtcacaagtgctgtaaaacttggataaagtagcaattgctatccttttt

SEQ ID NO: 7000 - DNA, 3200 bp, Zea Mays
acgatcccccttctcgatccctacacgtctcctgaaacgcacgccctcccttggctgccccccgccccttccctttcgccccctctcgcgcaatttccccagcccggaccccaaccccggcggcgctgcagtccaccgcaagtcacctccacctcacgcgaggcctccagccctcgtcgccccgcgcttctcccccacgacccggccgccttcgcgcttgcgccccgcggatcgccggcgcgaccctcaggtgtgtacgtctggcatggcaagggacctatcaactggccctgctttctcttttcatgaatgatgtccttccgttcgaaggacgcacatgcacaaacaagacttaactggccatggagaagccaatcgccgttatcagcgcagctgcttgttgatattccacctgaaatagagttgtccgactaccggagattgccaagttctcgaagcgagagcccatctggacttctccatgacgaaggcgtcaaggaagaacctatccctgatctggacattttctttgaaaggctttacgaatatttctgcgcaaaagggctcaggtgtatcattaccaaatggataatagagatcctcaatgtactttttatggtatgctgtatcgggttctttttcttatttgttgattgggatactcttattcatttgaaatgcggtgtggaggcacttgagtctggggagaaaccatgtgatcttatgaaggccattaagcatgatccattagttcccttcacattgcccaaaatgataactgttggatcaatggtcataatgacagcttatggacttaccaactttctcaagttctttgtacagttaagaagtacactcaatgttcgtcagttctactatgacagacttaaggtcaatgatcttgagattcaaactatatcatggcccaaaataattgagaaagttgtcctgctccagaaatctcaaaaactatgtgttgttagggatctctcagagcatgatattatcatgagaatcatgaggaaagaaaattatttgattgggatggtcaataaaggcattctttcttttccaattcattcttgtgtgcctggggctggcccaactggatcacatgagcatggcaggagaaactatctgatacttccaaagtcccttgaatggaccttaaactggtgcatctttcaaagtatgttcgatagtaaattttgtgtaaggaaagagtttttgacaagcccagatgtgttgagaaagcgacttatatttgttggcattgcaatgcttatcctatcaccctgccttgtgatatttccattggtgtacgtcattctaaggcatgctgaagaaatttataatcaccctagtacagcatcatctagacggtggtcaaacttatcaaggtggatctttagggaatataacgaggttgatcacttctttagacacagaatgaacaacagcgctgttcattctttaaattacttgaagcaatttccaaccccactggtttccatcatggctaaatttgtatcttttgtttctggtggcttggctggtgctctaataatcattggatttgtgggtgaatctattcttgaaggacatatttttggaagaaatcttctctggtatactattgtttttggaacaatagcagctataagtcgaaaagtagtggccgatgagcttcaagtttttgacccagaaggggccatgtgcctcgctgttcaccaaacacattacatgccaaagcgatggcgtggtaaagagaacagcgaacttgtacgaagagaatttgagacattatttccgtatactataatcatgctacttgaagagatggcctccattttcatcactccttacttgcttatttctgaggtacctaagcgagttgatgacattctgcgcttcatctcagacttcacaatatatgtagacggagtgggagatgtatgcagaaactatgggtcaccattcaatgctcttaaaggtctcaggagctcccaagggaagatggagaaatcattcttaagtttccagagtgtctatccatcatgtgagccaaatgctgatggcaaacaattcttatctaacctccaaaagttcaaagaaaggcaagtacgtcaacaagctcttgcacaatatcaagcactggaggcttcaggctttgtggcaggcactagaggtcaaagggatgataccttccaacaactccatagcgatattcatggccacgctgaggccaccctgcctcctgtttataacttgagccccttgggattgcttgacacagaccaaagaatgcatccatatatcctggactggtattacacatgtcatccaccacactcggatagagctgagggcccccaatttgaccaagcattccctgagaccggtgtgagcacgagtccaccagcaagggaaacatctgaaattgaagaagtcggagactgggacaacgagttgtatgaaagggttcaaagtcatctgggggcatcaacatcaagtgctttgttctggaacactccagggaaggaccatggtacagaagaaaacactaacagcaattggtgggcacatgcccctgcatatccttctggtccccagggtagcttcatcgagcctccagattttggaaatcgatacatgacaaatcctcattccagtaatcacagtggcggtacatcggagggaagcacgtcggatctagagcagagcaatagcagaagcagaagttcctggaggagccctcaagcgttgtccaagacaagatatatggacgactctgatattgaggaagggctaagcctgcactttgctgatgtccatcagaaggatgaagacgatagacacctggtggtcagggatcatcaagatcccgcaccatctggtcttccagtaagaataatacctagaagcagtgaccctgtgtaagctggttaaacaccacaggattatcacataaaaaaaaactccacaggattagttgatgcatgttaacggttgtattttgttgtttgaaccacatcaaaatcaaatgctgcgtctcgcccgtgaactggcaaaacagtcacagattctttttgtacaggccagtaatgatagaaacattcttttacaagcgtgcttggtaggtgcaacacaagtcacaagtgctgtaaaacttggataaagtagcaattgctatccttttt

SEQ ID NO: 7001 - DNA, 3197 bp, Zea Mays
acgatcccccttctcgatccctacacgtctcctgaaacgcacgccctcccttggctgccccccgccccttccctttcgccccctctcgcgcaatttccccagcccggaccccaaccccggcggcgctgcagtccaccgcaagtcacctccacctcacgcgaggcctccagccctcgtcgccccgcgcttctcccccacgacccggccgccttcgcgcttgcgccccgcggatcgccggcgcgaccctcaggtgtgtacgtctggcatggcaagggacctatcaactggccctgctttctcttttcatgaatgatgtccttccgttcgaaggacgcacatgcacaaacaagacttaactggccatggagaagccaatcgccgttatcagcgcagctgcttgttgatattccacctgaaatagagttgtccgactaccggagattgccaagttctcgaagcgagagcccatctggacttctccatgacgaaggcgtcaaggaagaacctatccctgatctggacattttctttgaaaggctttacgaatatttctgcgcaaaagggctcaggtgtatcattaccaaatggataatagagatcctcaatgtactttttatggtatgctgtatcgggttctttttcttatttgttgattgggatactcttattcatttgaaatgcggtgtggaggcacttgagtctggggagaaaccatgtgatcttatgaaggccattaagcatgatccattagttcccttcacattgcccaaaatgataactgttggatcaatggtcataatgacagcttatggacttaccaactttctcaagttctttgtacagttaagaagtacactcaatgttcgtcagttctactatgacagacttaaggtcaatgatcttgagattcaaactatatcatggcccaaaataattgagaaagttgtcctgctccagaaatctcaaaaactatgtgttgttagggatctctcagagcatgatattatcatgagaatcatgaggaaagaaaattatttgattgggatggtcaataaaggcattctttcttttccaattcattcttgtgtgcctggggctggcccaactggatcacatgagcatggcaggagaaactatctgatacttccaaagtcccttgaatggaccttaaactggtgcatctttcaaagtatgttcgatagtaaattttgtgtaaggaaagagtttttgacaagcccagatgtgttgagaaagcgacttatatttgttggcattgcaatgcttatcctatcaccctgccttgtgatatttccattggtgtacgtcattctaaggcatgctgaagaaatttataatcaccctagtacagcatcatctagacggtggtcaaacttatcaaggtggatctttagggaatataacgaggttgatcacttctttagacacagaatgaacaacagcgctgttcattctttaaattacttgaagcaatttccaaccccactggtttccatcatggctaaatttgtatcttttgtttctggtggcttggctggtgctctaataatcattggatttgtgggtgaatctattcttgaaggacatatttttggaagaaatcttctctggtatactattgtttttggaacaatagcagctataagtcgaaaagtagtggccgatgagcttcaagtttttgacccagaaggggccatgtgcctcgctgttcaccaaacacattacatgccaaagcgatggcgtggtaaagagaacagcgaacttgtacgaagagaatttgagacattatttccgtatactataatcatgctacttgaagagatggcctccattttcatcactccttacttgcttatttctgaggtacctaagacttcacaatatatgtagacggagtgggagattctaagcttgtttaacttcaaaaaacatggaaatagaaactatgggtcaccattcaatgctcttaaaggtctcaggagctcccaagggaagatggagaaatcattcttaagtttccagagtgtctatccatcatgtgagccaaatgctgatggcaaacaattcttatctaacctccaaaagttcaaagaaaggcaagtacgtcaacaagctcttgcacaatatcaagcactggaggcttcaggctttgtggcaggcactagaggtcaaagggatgataccttccaacaactccatagcgatattcatggccacgctgaggccaccctgcctcctgtttataacttgagccccttgggattgcttgacacagaccaaagaatgcatccatatatcctggactggtattacacatgtcatccaccacactcggatagagctgagggcccccaatttgaccaagcattccctgagaccggtgtgagcacgagtccaccagcaagggaaacatctgaaattgaagaagtcggagactgggacaacgagttgtatgaaagggttcaaagtcatctgggggcatcaacatcaagtgctttgttctggaacactccagggaaggaccatggtacagaagaaaacactaacagcaattggtgggcacatgcccctgcatatccttctggtccccagggtagcttcatcgagcctccagattttggaaatcgatacatgacaaatcctcattccagtaatcacagtggcggtacatcggagggaagcacgtcggatctagagcagagcaatagcagaagcagaagttcctggaggagccctcaagcgttgtccaagacaagatatatggacgactctgatattgaggaagggctaagcctgcactttgctgatgtccatcagaaggatgaagacgatagacacctggtggtcagggatcatcaagatcccgcaccatctggtcttccagtaagaataatacctagaagcagtgaccctgtgtaagctggttaaacaccacaggattatcacataaaaaaaaactccacaggattagttgatgcatgttaacggttgtattttgttgtttgaaccacatcaaaatcaaatgctgcgtctcgcccgtgaactggcaaaacagtcacagattctttttgtacaggccagtaatgatagaaacattcttttacaagcgtgcttggtaggtgcaacacaagtcacaagtgctgtaaaacttggataaagtagcaattgctatccttttt

SEQ ID NO: 7002 - DNA, 3168 bp, Zea Mays
acgatcccccttctcgatccctacacgtctcctgaaacgcacgccctcccttggctgccccccgccccttccctttcgccccctctcgcgcaatttccccagcccggaccccaaccccggcggcgctgcagtccaccgcaagtcacctccacctcacgcgaggcctccagccctcgtcgccccgcgcttctcccccacgacccggccgccttcgcgcttgcgccccgcggatcgccggcgcgaccctcaggtgtgtacgtctggcatggcaagggacctatcaactggccctgctttctcttttcatgaatgatgtccttccgttcgaaggacgcacatgcacaaacaagacttaactggccatggagaagccaatcgccgttatcagcgcagctgcttgttgatattccacctgaaatagagttgtccgactaccggagattgccaagttctcgaagcgagagcccatctggacttctccatgacgaaggcgtcaaggaagaacctatccctgatctggacattttctttgaaaggctttacgaatatttctgcgcaaaagggctcaggtgtatcattaccaaatggataatagagatcctcaatgtactttttatggtatgctgtatcgggttctttttcttatttgttgattgggatactcttattcatttgaaatgcggtgtggaggcacttgagtctggggagaaaccatgtgatcttatgaaggccattaagcatgatccattagttcccttcacattgcccaaaatgataactgttggatcaatggtcataatgacagcttatggacttaccaactttctcaagttctttgtacagttaagaagtacactcaatgttcgtcagttctactatgacagacttaaggtcaatgatcttgagattcaaactatatcatggcccaaaataattgagaaagttgtcctgctccagaaatctcaaaaactatgtgttgttagggatctctcagagcatgatattatcatgagaatcatgaggaaagaaaattatttgattgggatggtcaataaaggcattctttcttttccaattcattcttgtgtgcctggggctggcccaactggatcacatgagcatggcaggagaaactatctgatacttccaaagtcccttgaatggaccttaaactggtgcatctttcaaagtatgttcgatagtaaattttgtgtaaggaaagagtttttgacaagcccagatgtgttgagaaagcgacttatatttgttggcattgcaatgcttatcctatcaccctgccttgtgatatttccattggtgtacgtcattctaaggcatgctgaagaaatttataatcaccctagtacagcatcatctagacggtggtcaaacttatcaaggtggatctttagggaatataacgaggttgatcacttctttagacacagaatgaacaacagcgctgttcattctttaaattacttgaagcaatttccaaccccactggtttccatcatggctaaatttgtatcttttgtttctggtggcttggctggtgctctaataatcattggatttgtgggtgaatctattcttgaaggacatatttttggaagaaatcttctctggtatactattgtttttggaacaatagcagctataagtcgaaaagtagtggccgatgagcttcaagtttttgacccagaaggggccatgtgcctcgctgttcaccaaacacattacatgccaaagcgatggcgtggtaaagagaacagcgaacttgtacgaagagaatttgagacattatttccgtatactataatcatgctacttgaagagatggcctccattttcatcactccttacttgcttatttctgaggtacctaagcgagttgatgacattctgcgcttcatctcagacttcacaatatatgtagacggagtgggagatgtatgcaggtctcaggagctcccaagggaagatggagaaatcattcttaagtttccagagtgtctatccatcatgtgagccaaatgctgatggcaaacaattcttatctaacctccaaaagttcaaagaaaggcaagtacgtcaacaagctcttgcacaatatcaagcactggaggcttcaggctttgtggcaggcactagaggtcaaagggatgataccttccaacaactccatagcgatattcatggccacgctgaggccaccctgcctcctgtttataacttgagccccttgggattgcttgacacagaccaaagaatgcatccatatatcctggactggtattacacatgtcatccaccacactcggatagagctgagggcccccaatttgaccaagcattccctgagaccggtgtgagcacgagtccaccagcaagggaaacatctgaaattgaagaagtcggagactgggacaacgagttgtatgaaagggttcaaagtcatctgggggcatcaacatcaagtgctttgttctggaacactccagggaaggaccatggtacagaagaaaacactaacagcaattggtgggcacatgcccctgcatatccttctggtccccagggtagcttcatcgagcctccagattttggaaatcgatacatgacaaatcctcattccagtaatcacagtggcggtacatcggagggaagcacgtcggatctagagcagagcaatagcagaagcagaagttcctggaggagccctcaagcgttgtccaagacaagatatatggacgactctgatattgaggaagggctaagcctgcactttgctgatgtccatcagaaggatgaagacgatagacacctggtggtcagggatcatcaagatcccgcaccatctggtcttccagtaagaataatacctagaagcagtgaccctgtgtaagctggttaaacaccacaggattatcacataaaaaaaaactccacaggattagttgatgcatgttaacggttgtattttgttgtttgaaccacatcaaaatcaaatgctgcgtctcgcccgtgaactggcaaaacagtcacagattctttttgtacaggccagtaatgatagaaacattcttttacaagcgtgcttggtaggtgcaacacaagtcacaagtgctgtaaaacttggataaagtagcaattgctatccttttt

SEQ ID NO: 7003 - DNA, 3228 bp, Zea Mays
acgatcccccttctcgatccctacacgtctcctgaaacgcacgccctcccttggctgccccccgccccttccctttcgccccctctcgcgcaatttccccagcccggaccccaaccccggcggcgctgcagtccaccgcaagtcacctccacctcacgcgaggcctccagccctcgtcgccccgcgcttctcccccacgacccggccgccttcgcgcttgcgccccgcggatcgccggcgcgaccctcaggtgtgtacgtctggcatggcaagggacctatcaactggccctgctttctcttttcatgaatgatgtccttccgttcgaaggacgcacatgcacaaacaagacttaactggccatggagaagccaatcgccgttatcagcgcagctgcttgttgatattccacctgaaatagagttgtccgactaccggagattgccaagttctcgaagcgagagcccatctggacttctccatgacgaaggcgtcaaggaagaacctatccctgatctggacattttctttgaaaggctttacgaatatttctgcgcaaaagggctcaggtgtatcattaccaaatggataatagagatcctcaatgtactttttatggtatgctgtatcgggttctttttcttatttgttgattgggatactcttattcatttgaaatgcggtgtggaggcacttgagtctggggagaaaccatgtgatcttatgaaggccattaagcatgatccattagttcccttcacattgcccaaaatgataactgttggatcaatggtcataatgacagcttatggacttaccaactttctcaagttctttgtacagttaagaagtacactcaatgttcgtcagttctactatgacagacttaaggtcaatgatcttgagattcaaactatatcatggcccaaaataattgagaaagttgtcctgctccagaaatctcaaaaactatgtgttgttagggatctctcagagcatgatattatcatgagaatcatgaggaaagaaaattatttgattgggatggtcaataaaggcattctttcttttccaattcattcttgtgtgcctggggctggcccaactggatcacatgagcatggcaggagaaactatctgatacttccaaagtcccttgaatggaccttaaactggtgcatctttcaaagtatgttcgatagtaaattttgtgtaaggaaagagtttttgacaagcccagatgtgttgagaaagcgacttatatttgttggcattgcaatgcttatcctatcaccctgccttgtgatatttccattggtgtacgtcattctaaggcatgctgaagaaatttataatcaccctagtacagcatcatctagacggtggtcaaacttatcaaggtggatctttagggaatataacgaggttgatcacttctttagacacagaatgaacaacagcgctgttcattctttaaattacttgaagcaatttccaaccccactggtttccatcatggctaaatttgtatcttttgtttctggtggcttggctggtgctctaataatcattggatttgtgggtgaatctattcttgaaggacatatttttggaagaaatcttctctggtatactattgtttttggaacaatagcagctataagtcgaaaagtagtggccgatgagcttcaagtttttgacccagaaggggccatgtgcctcgctgttcaccaaacacattacatgccaaagcgatggcgtggtaaagagaacagcgaacttgtacgaagagaatttgagacattatttccgtatactataatcatgctacttgaagagatggcctccattttcatcactccttacttgcttatttctgaggtacctaagcgagttgatgacattctgcgcttcatctcagacttcacaatatatgtagacggagtgggagattctaagcttgtttaacttcaaaaaacatggaaatagaaactatgggtcaccattcaatgctcttaaaggtctcaggagctcccaagggaagatggagaaatcattcttaagtttccagagtgtctatccatcatgtgagccaaatgctgatggcaaacaattcttatctaacctccaaaagttcaaagaaaggcaagtacgtcaacaagctcttgcacaatatcaagcactggaggcttcaggctttgtggcaggcactagaggtcaaagggatgataccttccaacaactccatagcgatattcatggccacgctgaggccaccctgcctcctgtttataacttgagccccttgggattgcttgacacagaccaaagaatgcatccatatatcctggactggtattacacatgtcatccaccacactcggatagagctgagggcccccaatttgaccaagcattccctgagaccggtgtgagcacgagtccaccagcaagggaaacatctgaaattgaagaagtcggagactgggacaacgagttgtatgaaagggttcaaagtcatctgggggcatcaacatcaagtgctttgttctggaacactccagggaaggaccatggtacagaagaaaacactaacagcaattggtgggcacatgcccctgcatatccttctggtccccagggtagcttcatcgagcctccagattttggaaatcgatacatgacaaatcctcattccagtaatcacagtggcggtacatcggagggaagcacgtcggatctagagcagagcaatagcagaagcagaagttcctggaggagccctcaagcgttgtccaagacaagatatatggacgactctgatattgaggaagggctaagcctgcactttgctgatgtccatcagaaggatgaagacgatagacacctggtggtcagggatcatcaagatcccgcaccatctggtcttccagtaagaataatacctagaagcagtgaccctgtgtaagctggttaaacaccacaggattatcacataaaaaaaaactccacaggattagttgatgcatgttaacggttgtattttgttgtttgaaccacatcaaaatcaaatgctgcgtctcgcccgtgaactggcaaaacagtcacagattctttttgtacaggccagtaatgatagaaacattcttttacaagcgtgcttggtaggtgcaacacaagtcacaagtgctgtaaaacttggataaagtagcaattgctatccttttt

SEQ ID NO: 7004 - DNA, 1888 bp, Zea Mays
acgatcccccttctcgatccctacacgtctcctgaaacgcacgccctcccttggctgccccccgccccttccctttcgccccctctcgcgcaatttccccagcccggaccccaaccccggcggcgctgcagtccaccgcaagtcacctccacctcacgcgaggcctccagccctcgtcgccccgcgcttctcccccacgacccggccgccttcgcgcttgcgccccgcggatcgccggcgcgaccctcaggtgtgtacgtctggcatggcaagggacctatcaactggccctgctttctcttttcatgaatgatgtccttccgttcgaaggacgcacatgcacaaacaagacttaactggccatggagaagccaatcgccgttatcagcgcagctgcttgttgatattccacctgaaatagagttgtccgactaccggagattgccaagttctcgaagcgagagcccatctggacttctccatgacgaaggcgtcaaggaagaacctatccctgatctggacattttctttgaaaggctttacgaatatttctgcgcaaaagggctcaggtgtatcattaccaaatggataatagagatcctcaatgtactttttatggtatgctgtatcgggttctttttcttatttgttgattgggatactcttattcatttgaaatgcggtgtggaggcacttgagtctggggagaaaccatgtgatcttatgaaggccattaagcatgatccattagttcccttcacattgcccaaaatgataactgttggatcaatggtcataatgacagcttatggacttaccaactttctcaagttctttgtacagttaagaagtacactcaatgttcgtcagttctactatgacagacttaaggtcaatgatcttgagattcaaactatatcatggcccaaaataattgagaaagttgtcctgctccagaaatctcaaaaactatgtgttgttagggatctctcagagcatgatattatcatgagaatcatgaggaaagaaaattatttgattgggatggtcaataaaggcattctttcttttccaattcattcttgtgtgcctggggctggcccaactggatcacatgagcatggcaggagaaactatctgatacttccaaagtcccttgaatggaccttaaactggtgcatctttcaaagtatgttcgatagtaaattttgtgtaaggaaagagtttttgacaagcccagatgtgttgagaaagcgacttatatttgttggcattgcaatgcttatcctatcaccctgccttgtgatatttccattggtgtacgtcattctaaggcatgctgaagaaatttataatcaccctagtacagcatcatctagacggtggtcaaacttatcaaggtggatctttagggaatataacgaggttgatcacttctttagacacagaatgaacaacagcgctgttcattctttaaattacttgaagcaatttccaaccccactggtttccatcatggctaaatttgtatcttttgtttctggtggcttggctggtgctctaataatcattggatttgtgggtgaatctattcttgaaggacatatttttggaagaaatcttctctggtatactattgtttttggaacaatagcagctataagtcgaaaagtagtggccgatgagcttcaagtttttgacccagaaggggccatgtgcctcgctgttcaccaaacacattacatgccaaagcgatggcgtggtaaagagaacagcgaacttgtacgaagagaatttgagacattatttccgcttatgattacatctggggtataagccaatcagctatggggtttgctgcttcaattatatggcaataaaaattgac

SEQ ID NO: 7005 - DNA, 1532 bp, Zea Mays
gtgaaatcgctcaaatcgacttgtttgtctcggcacggccgacgcctctggaatgatcctacctctggcagtggctgcatccgctgccgaccaagggcggacccaccgggtggtgagcgagttgactcatgggacatcccagggcgaggtgagcaaggccgagttccaggaggccctgtcggacatactcctcggcatggcggcggggctcaagagggaccccctcgtgatactgcgcatggacggcgaggacctcagggacttcgccgccggcagcagatacgagcccacagctgccgccgttttctcgcaggtcgtcgatctcggttccgaagtcgcgtcaccgcgccaatgcgtgttggccgctctacagaagctgtccgtcgaccacggagtgcccccggcttcagatgcctgggtcgcgaagcacatcgtggagccggcgttgcagcagcttcttcctgccgatcagcctgggcagcagccggcctcccgcgatgacctgttccagcagctgaagaagctgctgggcgccgtcgctgatcgactccaggagcagcctgtgatcgtcgcgcacaccgagaaccactatgacgggagtggcgtcaagaggctgctggccaacaaattcgagttggacaagctgctggattctgtctggaaaaatttggcagcagaagataagaacaaggcgtccaaggggtgcctcataaccgcgcttgacaagatggccgatgctgcaagccttccatattacagtgctgtgaaagaggtggatgctgtcgtggaagagtcgatcaagacagcgggcgtcgaagaaggaaaggcagtggatgaagcggagttcaagaagtcgctcacagaaatccttagggctatcatgctgaggctgaacgacagccccgtcttcgtctctaccgacgtcgtcgtgcacgagcctttgtccgggacatcatcgtcggtgaactgaagggaaacgtacgacggaaacgtactgggaaaacggaacgggccagggtcattactgttggtatttgagcagtgcctgcgtagttgctttttgtctgatctcgcacagggactgcttttttgactgatctcacactgtgctctgctagcttgtcgcaagtttgcaacatgacaagatgtcaagatgaaggccatcatctggttttgttaacccgattgacatataagtttggaataaggcgttcaagccatacataattacatatcatcgacggcaacctaatagctattctaaattttgttttgctggagctcggagaaatatgttactcgatgcatgcaaaatacacagtcattcaatcagatgttatacactcgagcctaaaggtaaccaagtgaaagtttgcaggatatcctacacaacagtgggcatactatcaagggcctcaaatatgttacattgtagtagactgttttataatctagaattaggattttattattgaagcggtatattttattggtgtcataaattctataaattatactcatttttaaattat

SEQ ID NO: 7006 - DNA, 1809 bp, Zea Mays
ttgtccacgctggatgcgtcgccgccgccgtcacggtcaccgcgcggacagagcgagagaccgcgtgcggccgggctggagtggccgtcgcgtcgaccacaccagcagcagcagcgcgcggaacatgtgggcgggcgacctggtgggcaccgtcccacacgtaccgagtacgtgtccctctccccgcgcgctatccagccgccgacgcacgcccccttttgcccggccggctcgtcgtcttctcctcctgcctttttagtctccacgctcggcgcggggacagaccaaacgccgaggcgcgattccgcaaagcgaccggccgcgcgacacgactgagcgagctcgctcgaccctcctgccgcggtgctgctacacagctagtactagtggtgagcgagttgactcatgggacatcccagggcgaggtgagcaaggccgagttccaggaggccctgtcggacatactcctcggcatggcggcggggctcaagagggaccccctcgtgatactgcgcatggacggcgaggacctcagggacttcgccgccggcagcagatacgagcccacagctgccgccgttttctcgcaggtcgtcgatctcggttccgaagtcgcgtcaccgcgccaatgcgtgttggccgctctacagaagctgtccgtcgaccacggagtgcccccggcttcagatgcctgggtcgcgaagcacatcgtggagccggcgttgcagcagcttcttcctgccgatcagcctgggcagcagccggcctcccgcgatgacctgttccagcagctgaagaagctgctgggcgccgtcgctgatcgactccaggagcagcctgtgatcgtcgcgcacaccgagaaccactatgacgggagtggcgtcaagaggctgctggccaacaaattcgagttggacaagctgctggattctgtctggaaaaatttggcagcagaagataagaacaaggcgtccaaggggtgcctcataaccgcgcttgacaagatggccgatgctgcaagccttccatattacagtgctgtgaaagaggtggatgctgtcgtggaagagtcgatcaagacagcgggcgtcgaagaaggaaaggcagtggatgaagcggagttcaagaagtcgctcacagaaatccttagggctatcatgctgaggctgaacgacagccccgtcttcgtctctaccgacgtcgtcgtgcacgagcctttgtccgggacatcatcgtcggtgaactgaagggaaacgtacgacggaaacgtactgggaaaacggaacgggccagggtcattactgttggtatttgagcagtgcctgcgtagttgctttttgtctgatctcgcacagggactgcttttttgactgatctcacactgtgctctgctagcttgtcgcaagtttgcaacatgacaagatgtcaagatgaaggccatcatctggttttgttaacccgattgacatataagtttggaataaggcgttcaagccatacataattacatatcatcgacggcaacctaatagctattctaaattttgttttgctggagctcggagaaatatgttactcgatgcatgcaaaatacacagtcattcaatcagatgttatacactcgagcctaaaggtaaccaagtgaaagtttgcaggatatcctacacaacagtgggcatactatcaagggcctcaaatatgttacattgtagtagactgttttataatctagaattaggattttattattgaagcggtatattttattggtgtcataaattctataaattatactcatttttaaattat

SEQ ID NO: 7007 - DNA, 1280 bp, Zea Mays
cgcatctaaagtgctagtctattgaaggatactttgatactaaaaccatgcagctttagattggcagcttttctttttgtgatttattacagaataaaggaaagaaataaaacaaatagttttcccccctgaaatgccaacttactgtatgagaaagaacaggtttttgtcataatatacaagtgctaacatgccatttatcttccggcatttgatatgccaatttcctgtaggctggcttttggctatgcctatcctgcctatgaatgctacaagaccgttgaactgaacaaaccacagattgagcagctcatattttggtgtcagtattggctaccgttttactcagaagcaaaggtgttgttctttgtatatttgtggtaccctaagacaaagggaactacgtatgtttatggaactttctttaagccatatatttctcagcatgagaatgaaatcgaccgaaatcttcttgagctcagagctcgagccaccgatatggttgtcctttacttccataaggctgcttcggtagggcaaaatactttctttgacgttttaaaatatgttgctgcccagtccccttctcggaaatcaaggctgcaccctcatcaggaaccacagcagcagcaaccacaagtgcaggtggagctgcagcagccgcaaccacaaaaacaagcagcacctgttatgcgcagaggagcatctattgctgctcggcaagcagcaatggcacagcaatctctggagactatacccgttccatcttcacccaagatcaagcgtcaaacatcagggagacctggttcggtggcatccacaaagcctgcagcagctgcatccacaccaaaacctggcggtagcccaaagaaagagggcgcggaagagcttgaccctgcgctcgaggagacgccgatggaggagacgatccgtgtgacgcgcgccaagctaaggaggcgcacggccaccgaggattctgctgggaattagctgcatgccgttgttttccctgcacattgtattgatctttttccgagttttaggctcacatgttgtttgctggaatggagatatgttgttgttcacttggttcttgtgacacagagttaattatcttatttccgtgctttcttagtacctttttgtgtgatttaagttgtaaataacagttcccctccgcatttgtatatagtttagcggcatgggcaacgaatgcctgtaattgcaacattacacgcttcaatctggtcactccttgggtatcttctcaagatgtgtca

SEQ ID NO: 7008 - DNA, 2566 bp, Zea Mays
acacccatggttgaacttgaactggagaggcagtagccagagtgtgagctgacggcggacgtgctcgcctctcctctcctcacatttccggctcccctctccgcattccatggcaccgcattaccggtatttttagccgccggaggagacgggttgcgtagagagaggggaaaccagagctcctgactgttcctctctccctcctcacgggcgggctccgtctgttccgtccatccaccgccccggtcgtctcccggccagatccctctcctgcaaggtttctttgcggtatggtcggttctctgtggtttctcttctgaatgtgctggtgcggtgatgttgttttgatttgtgttcgctttggcggatctggtcgcgcacagagtggccggagaagatgatgggcgggttcctctccagggtcctcctgtaagcgctctattgctccgaatcttgtagcatgttgtttgtagattgacatgttgaggttggagccttatcagaggcatgagtttcgggtttgaatttgtttccttgaaatgggattttgtgggtgcccattcagagagttcagtctcttcttggtttaaactcttcattcgttcttaacatactgctttcttaaaaaaatgaggagatgcgttctgtcttatcgatttgtccccctggttattcgccggaaaatgaggctaagagcacgcaaccattcaaaagtattttattgttctcgaggagcatgggagcaagttttcaatgcattgcacaacgggcaaaggttatgttcgtttattcttccggttcgacgcattcttctttgggaacgtatcatgtgctcatatgagcactttaaatctagtgtctttatttctcattcagggggtgagggcagcagtgtcacacagaagagacaggcggcgcgacgcaacaagggtgacacacagaagaaactaggaaatgtctattcacacttgaatgagaaatgaatgcaccagatttaaagtgcttatatgagcacaagagctccatgagtacatgatacgttcccttattctttatgatgatgttctattaatcatatttcttcaaacggttaagatcggagaatgctgccgtatgcgttaagatatgtcgaattgctgtgttctttttttttatctgtgacctgcttcatcaagaactagatttgatcctgtccatctgtgtgttgatgatttatctatctttttgagcgcatctaaagtgctagtctattgaaggatactttgatactaaaaccatgcagctttagattggcagcttttctttttgtgatttattacagaataaaggaaagaaataaaacaaatagttttcccccctgaaatgccaacttactgtatgagaaagaacaggtttttgtcataatatacaagtgctaacatgccatttatcttccggcatttgatatgccaatttcctgtaggctggcttttggctatgcctatcctgcctatgaatgctacaagaccgttgaactgaacaaaccacagattgagcagctcatattttggtgtcagtattggattttagttgccctgttgacagttttggagagatttggagattttacaatatcatggctaccgttttactcagaagcaaaggtgttgttctttgtatatttgtggtaccctaagacaaagggaactacgtatgtttatggaactttctttaagccatatatttctcagcatgagaatgaaatcgaccgaaatcttcttgagctcagagctcgagccaccgatatggttgtcctttacttccataaggctgcttcggtagggcaaaatactttctttgacgttttaaaatatgttgctgcccagtccccttctcggaaatcaaggctgcaccctcatcaggaaccacagcagcagcaaccacaagtgcaggtggagctgcagcagccgcaaccacaaaaacaagcagcacctgttatgcgcagaggagcatctattgctgctcggcaagcagcaatggcacagcaatctctggagactatacccgttccatcttcacccaagatcaagcgtcaaacatcagggagacctggttcggtggcatccacaaagcctgcagcagctgcatccacaccaaaacctggcggtagcccaaagaaagagggcgcggaagagcttgaccctgcgctcgaggagacgccgatggaggagacgatccgtgtgacgcgcgccaagctaaggaggcgcacggccaccgaggattctgctgggaattagctgcatgccgttgttttccctgcacattgtattgatctttttccgagttttaggctcacatgttgtttgctggaatggagatatgttgttgttcacttggttcttgtgacacagagttaattatcttatttccgtgctttcttagtacctttttgtgtgatttaagttgtaaataacagttcccctccgcatttgtatatagtttagcggcatgggcaacgaatgcctgtaattgcaacattacacgcttcaatctggtcactccttgggtatcttctcaagatgtgtca

SEQ ID NO: 7009 - DNA, 3137 bp, Zea Mays
acacccatggttgaacttgaactggagaggcagtagccagagtgtgagctgacggcggacgtgctcgcctctcctctcctcacatttccggctcccctctccgcattccatggcaccgcattaccggtatttttagccgccggaggagacgggttgcgtagagagaggggaaaccagagctcctgactgttcctctctccctcctcacgggcgggctccgtctgttccgtccatccaccgccccggtcgtctcccggccagatccctctcctgcaagagtggccggagaagatgatgggcgggttcctctccagggtcctcctgtaagcgctctattgctccgaatcttgtagcatgttgtttgtagattgacatgttgaggttggagccttatcagaggcatgagtttcgggtttgaatttgtttccttgaaatgggattttgtgggtgcccattcagagagttcagtctcttcttggtttaaactcttcattcgttcttaacatactgctttcttaaaaaaatgaggagatgcgttctgtcttatcgatttgtccccctggttattcgccggaaaatgaggctaagagcacgcaaccattcaaaagtattttattgttctcgaggagcatgggagcaagttttcaatgcattgcacaacgggcaaaggttatgttcgtttattcttccggttcgacgcattcttctttgggaacgtatcatgtgctcatatgagcactttaaatctagtgtctttatttctcattcagggggtgagggcagcagtgtcacacagaagagacaggcggcgcgacgcaacaagggtgacacacagaagaaactaggaaatgtctattcacacttgaatgagaaatgaatgcaccagatttaaagtgcttatatgagcacaagagctccatgagtacatgatacgttcccttattctttatgatgatgttctattaatcatatttcttcaaacggttaagatcggagaatgctgccgtatgcgttaagatatgtcgaattgctgtgttctttttttttatctgtgacctgcttcatcaagaactagatttgatcctgtccatctgtgtgttgatgatttatctatctttttgagcgcatctaaagtgctagtctattgaaggatactttgatactaaaaccatgcagctttagattggcagcttttctttttgtgatttattacagaataaaggaaagaaataaaacaaatagttttcccccctgaaatgccaacttactgtatgagaaagaacaggtttttgtcataatatacaagtgctaacatgccatttatcttccggcatttgatatgccaatttcctgtaggctggcttttggctatgcctatcctgcctatgaatgctacaagaccgttgaactgaacaaaccacagattgagcagctcatattttggtgtcagtattggattttagttgccctgttgacagttttggagagatttggagattttacaatatcatggctaccgttttactcagaagcaaaggtgttgttctttgtatatttgtggtaccctaagacaaagggaactacgtatgtttatggaactttctttaagccatatatttctcagcatgagaatgaaatcgaccgaaatcttcttgagctcagagctcgagccaccgatatggttgtcctttacttccataaggctgcttcggtagggcaaaatactttctttgacgttttaaaatatgttgctgcccagtccccttctcggaaatcaaggctgcaccctcatcaggtttggtcgaatgtattctcttttttgtccaaaaaaaatccattgaataatttgttgttaagtgttcatcatgtttacacagatactcaaaactttttttaatgttcttctctgatgcaatattgatcatgatgttagactaattttagcagctatgttgtttaaagatgcattcgctactgcttccaagtggtattgtcaaaaatgcgtgagagctgcgttcatttcattgagagaaacaagtacatagggagtgactataaatcaccttggccccctcaagttagaaagtttaaagtgcttgccagtttttattatgaccaaaacacccacaacagactatgtggccaaggtgattgagcaaaggaggaactcatgggcccctgctaaataccagatgctactttcatcagcaactgtctgcagggtcaccaatatgtatgcatatttggaacatatcataaattgcgatagcatgtcagcatcattgagccatatcctaccaagtactaaggcacttatggtcgtttggttccttttcaattgctaacacaagttcatactcaggataaactcagaaatttgttccatgtaggcattccttctgtatgtggtatgccatagggagggatgtaggacaagaaaggtcatctaaatcatgctttaatgccttccaggaaccacagcagcagcaaccacaagtgcaggtggagctgcagcagccgcaaccacaaaaacaagcagcacctgttatgcgcagaggagcatctattgctgctcggcaagcagcaatggcacagcaatctctggagactatacccgttccatcttcacccaagatcaagcgtcaaacatcagggagacctggttcggtggcatccacaaagcctgcagcagctgcatccacaccaaaacctggcggtagcccaaagaaagagggcgcggaagagcttgaccctgcgctcgaggagacgccgatggaggagacgatccgtgtgacgcgcgccaagctaaggaggcgcacggccaccgaggattctgctgggaattagctgcatgccgttgttttccctgcacattgtattgatctttttccgagttttaggctcacatgttgtttgctggaatggagatatgttgttgttcacttggttcttgtgacacagagttaattatcttatttccgtgctttcttagtacctttttgtgtgatttaagttgtaaataacagttcccctccgcatttgtatatagtttagcggcatgggcaacgaatgcctgtaattgcaacattacacgcttcaatctggtcactccttgggtatcttctcaagatgtgtca

SEQ ID NO: 7010 - DNA, 352 bp, Zea Mays
gaattaaccaggcgcccagcctgtgacaaggagtgggactttttggtggagtccgaggacgaggcctccctcaataatggtgaggacctcgagctcctcctcggtgtggattgggaggagagcgacgacgatctcttctcttgggacagagccgataagtcctcggagggctaggaaggcgacatgtccttggcggaggagccactctttgttaggttctccaacgacaacgacgatgatgggaacaccggcaaggggtctggcgacccggcaggagcgacgacgatggcgacgaggctgacgcgtcccctccatccaaatgtcacaagattcagttcatggtgggaaatgt

SEQ ID NO: 7011 - DNA, 2003 bp, Zea Mays
agccgcaaggccagacagacgccgagcccagccagcgccagccgaagacgaccgccgcccgggagccagcccaatcaaacccatcgcccatcggtctcctctctccctctttgtccaccgcgtcgtcgtctcgtctccctccccgcccctcgtatattaacagccccgtcgtgactacactgaccaccgcctcgaatccatcgctccgctactcgaaccagactcattggtgcatactcccgcgtcccgcctggctccggggtccattcgtcgacccatctccggcgaaagcttacctctactaccactgaagcgaaggcgtcacatcggaagaattgtagctgtttgtcctcctcttcccgacagcgcagagcggagatccgaccggacctgggatcgattccttccttttctcggagattgatgagctatgtgatgagtgggagccagagccgctatgccctccagtcaaggagggggctcgaattgatactccaatgttggaaagtgctgctggaccacatacgattgttgatggtaaagaagttgtgaactttgcatcagcaaactacctcggtttaattggcaatgagaagattattgattcttgcattggttcactggagaaatatggtgttgggtcttgtggtccacgtggcttttatggaacaattgatgtccatcttgactgtgagtcaaaaatagctaaattcctgggcactccagactccattctgtattcatatgggatttctacaatattcagtgtgatacctgccttttgtaagaaaggagatatcatagtcgctgatgagggtgttcactgggcagtgcaaaatggtctccatttatcaagaagcactgtggtgtacttcaagcacaatgatatggtttcacttgcaagcactttggaaaaacttacacatggaaataaacgtgctgaaaagattagacgctacattgttgtagaatccatttaccagaattctggccaaattgcccccttggatgaaatcgtcaggttgaaggagaaatatcggttccgtgttattctggaggagagccattcttttggtgtgcttggcaagtctgggcgtggccttgctgaacattatggagttcctattgaaaaaattgatataattactgctggaatgggaaatgcattagctaccgatggtggattttgtacaggaagtgtcagagttgttgatcatcagcgtctaagcagctctggatatgttttctctgcatctctgccaccttatcttgccactgctgctgtttctgctgtcaactacctggagcagaatcccgcagttcttgcaaatctaaggagcaatattgctcttttgcataaagaattatcagatactccagggctagaaattttcagccatgttttgtcacctattgtcttccttaagctgaagaaatcgacaggttctcctaccactgacctagaccttcttgaaactattgctggcagggtcttgaaggaagactcagttctcattgtgacatcaaagaagtcaaatctggataggtgcaaactccccgttggaatccgcctgtttgtatcagctggacatactgaatccgacatctccaggctttcctcatccttgaagcgagtttctgcggcagttctttcagactgcttttgatccacatcggatacccttgaagatgaaagccatccattttctacgcactttgtaccctagaccgtgtgtgtgtgtttggtaaatgtacataacctgtacatttctacatatttatgaattcaccttgttgtcgtttatacccgtagtacatgggattttttttttgtagaacagtgatgttggagaatagtgcgtttgtgctgtacatctcgttgatttccatgtagtgatgttttcccctgtatcctcacccacaagacattggccgtcttatattttcaaacaattgcaacacccacctctgctgtgttgttaattagactcataacatacaaa

SEQ ID NO: 7012 - DNA, 2204 bp, Zea Mays
agccgcaaggccagacagacgccgagcccagccagcgccagccgaagacgaccgccgcccgggagccagcccaatcaaacccatcgcccatcggtctcctctctccctctttgtccaccgcgtcgtcgtctcgtctccctccccgcccctcgtatattaacagccccgtcgtgactacactgaccaccgcctcgaatccatcgctccgctactcgaaccagactcattggtgcatactcccgcgtcccgcctggctccggggtccattcgtcgacccatctccggcgaaagcttacctctactaccactgaagcgaaggcgtcacatcggaagaattgtagctgtttgtcctcctcttcccgacagcgcagagcggagatccgaccggacctgggatcgattccttccttttctcgattctgggcgctaacggttcctgagggaagctcctggggacatggacatggcattgcccgttgtgaatgccacagcggcggtgctcgcccgtgtctcggctgcgttcaatgccccacttgcccgtgcagtcgtcttcggggtccatatcgatgctctccaggaagagctacaaaccaccaaagaaaccacttactgaaaaggagattgatgagctatgtgatgagtgggagccagagccgctatgccctccagtcaaggagggggctcgaattgatactccaatgttggaaagtgctgctggaccacatacgattgttgatggtaaagaagttgtgaactttgcatcagcaaactacctcggtttaattggcaatgagaagattattgattcttgcattggttcactggagaaatatggtgttgggtcttgtggtccacgtggcttttatggaacaattgatgtccatcttgactgtgagtcaaaaatagctaaattcctgggcactccagactccattctgtattcatatgggatttctacaatattcagtgtgatacctgccttttgtaagaaaggagatatcatagtcgctgatgagggtgttcactgggcagtgcaaaatggtctccatttatcaagaagcactgtggtgtacttcaagcacaatgatatggtttcacttgcaagcactttggaaaaacttacacatggaaataaacgtgctgaaaagattagacgctacattgttgtagaatccatttaccagaattctggccaaattgcccccttggatgaaatcgtcaggttgaaggagaaatatcggttccgtgttattctggaggagagccattcttttggtgtgcttggcaagtctgggcgtggccttgctgaacattatggagttcctattgaaaaaattgatataattactgctggaatgggaaatgcattagctaccgatggtggattttgtacaggaagtgtcagagttgttgatcatcagcgtctaagcagctctggatatgttttctctgcatctctgccaccttatcttgccactgctgctgtttctgctgtcaactacctggagcagaatcccgcagttcttgcaaatctaaggagcaatattgctcttttgcataaagaattatcagatactccagggctagaaattttcagccatgttttgtcacctattgtcttccttaagctgaagaaatcgacaggttctcctaccactgacctagaccttcttgaaactattgctggcagggtcttgaaggaagactcagttctcattgtgacatcaaagaagtcaaatctggataggtgcaaactccccgttggaatccgcctgtttgtatcagctggacatactgaatccgacatctccaggctttcctcatccttgaagcgagtttctgcggcagttctttcagactgcttttgatccacatcggatacccttgaagatgaaagccatccattttctacgcactttgtaccctagaccgtgtgtgtgtgtttggtaaatgtacataacctgtacatttctacatatttatgaattcaccttgttgtcgtttatacccgtagtacatgggattttttttttgtagaacagtgatgttggagaatagtgcgtttgtgctgtacatctcgttgatttccatgtagtgatgttttcccctgtatcctcacccacaagacattggccgtcttatattttcaaacaattgcaacacccacctctgctgtgttgttaattagactcataacatacaaa

SEQ ID NO: 7013 - DNA, 2569 bp, Zea Mays
agccgcaaggccagacagacgccgagcccagccagcgccagccgaagacgaccgccgcccgggagccagcccaatcaaacccatcgcccatcggtctcctctctccctctttgtccaccgcgtcgtcgtctcgtctccctccccgcccctcgtatattaacagccccgtcgtgactacactgaccaccgcctcgaatccatcgctccgctactcgaaccagactcattggtgcatactcccgcgtcccgcctggctccggggtccattcgtcgacccatctccggcgaaagcttacctctactaccactgaagcgaaggcgtcacatcggaagaattgtagctgtttgtcctcctcttcccgacagcgcagagcggagatccgaccggacctgggatcgattccttccttttctcgattctgggcgctaacggttcctgagggaagctcctggggacatggacatggcattgcccgttgtgaatgccacagcggcggtgctcgcccgtgtctcggctgcgttcaatgccccacttgcccgtgcagtcgtcttcggggtccatatcgatgggcacttggtcgtggaagggcttcttattgcagtcatcgtgtttcagctctccaggaagagctacaaaccaccaaagaaaccacttactgaaaaggagattgatgagctatgtgatgagtgggagccagagccgctatgccctccagtcaaggagggggctcgaattgatactccaatgttggaaagtgctgctggaccacatacgattgttgatggtaaagaagttgtgaactttgcatcagcaaactacctcggtttaattggcaatgagaagattattgattcttgcattggttcactggagaaatatggtgttgggtcttgtggtccacgtggcttttatggaacaattgatgtccatcttgactgtgagtcaaaaatagctaaattcctgggcactccagactccattctgtattcatatgggatttctacaatattcagtgtgatacctgccttttgtaagaaaggagatatcatagtcgctgatgagggtgttcactgggcagtgcaaaatggtctccatttatcaagaagcactgtggtgtacttcaagcacaatgatatggtttcacttgcaagcactttggaaaaacttacacatggaaataaacgtgctgaaaagattagacgctacattgttgtagaatccatttaccagaattctggccaaattgcccccttggatgaaatcgtcaggttgaaggagaaatatcggttccgtgttattctggaggagagccattcttttggtgtgcttggcaagtctgggcgtggccttgctgaacattatggagttcctattgaaaaaattgatataattactgctggaatgggaaatgcattagctaccgatggtggattttgtacaggaagtgtcagagttgttgatcatcagcgtctaagcagctctggatatgttttctctgcatctctgccaccttatcttgccactgctgctgtttctgctgtcaactacctggagcagaatcccgcagttcttgcaaatctaaggagcaatattgctcttttgcataaaggtaagctgattctattgttaattaattatttctttgaccaggttgtacttctcatttttctggattaatgtggaaaatatgggcataacaccgaggcaactacctaacagtaaatctttaaagtatacagaagccacagtgaattacaatgtaacttcttttctctctgagcactaggttcctataccagggaaaatatgattaagttgtgaaactaatataagccataactagtgtgttcatgcacaatacgatttccaactactatgtaaccaactggtggccaccatctcaacactctttgtattcactctgcagaattatcagatactccagggctagaaattttcagccatgttttgtcacctattgtcttccttaagctgaagaaatcgacaggttctcctaccactgacctagaccttcttgaaactattgctggcagggtcttgaaggaagactcagttctcattgtgacatcaaagaagtcaaatctggataggtgcaaactccccgttggaatccgcctgtttgtatcagctggacatactgaatccgacatctccaggctttcctcatccttgaagcgagtttctgcggcagttctttcagactgcttttgatccacatcggatacccttgaagatgaaagccatccattttctacgcactttgtaccctagaccgtgtgtgtgtgtttggtaaatgtacataacctgtacatttctacatatttatgaattcaccttgttgtcgtttatacccgtagtacatgggattttttttttgtagaacagtgatgttggagaatagtgcgtttgtgctgtacatctcgttgatttccatgtagtgatgttttcccctgtatcctcacccacaagacattggccgtcttatattttcaaacaattgcaacacccacctctgctgtgttgttaattagactcataacatacaaa

SEQ ID NO: 7014 - DNA, 2136 bp, Zea Mays
acctgggccgtcagactcgccgcgcggcgcggccccgaccacatcgccgattcctcgtttcctccgcacccgcacgcttcccacccgctgccccgcgcccagccgtcgccgtgatcgccagagcgttcctctgccgagccgttcggccggtccactcccgcgaagcttccagtagaggcgaccttcggatcgagtctcggccgccgaggagtcgaaggccatggaagtggtggcgtcggcgccggggaaggtgctcatcgcgggaggatacctcgtgctggagcgccccaacgccggcctagtcctcagcaccaccgcccgcttctacgccgtcgtccgccccctccgcgacagcctccccgccgacgcttgggcctgggcgtggacggatgtcaaagtgacttcccctcagctctcacgggaggccacatacaagctgtccctaacgaagtcgacgctgcaattgacgtctgcgagggaatctacaaacccttttgtggagcaggccatacaattctcggtagcagctgctaaagcgaccattattgataaggagaggaaggatgtagtagataagttgctgctgcaaggtctgaacattacaattcttggatgcaatgatttctattcttatagaaagcagattgaagcacgcggtctccctcttactccagaggcactgctttcattgcctccattctcttcaatcacatttaactcagaggttgctaatggaacaatgactggagagaaatgtaaacctgaagtagccaaaactggacttgggtcatcagctgccatgaccacatcagttgttgcagctcttcttcactatcttggtgtcgttagcctctcatgtccaggacaatcttctggtgataatacaactacacgagaacttgacttggttcactctattgcccaaagtgcacattgtatagcacaggggaaaattggcagtggttttgatgttagtgctgctgtctatgggagtcaacgctatgtaaggttttctccagaaatactctcgtctcaggctacaggtgggactttcctcccagatgtagtatcagatattgttacacaaaggtgggatcatgagaataaacagttctcattacctcctctgatgacccttctccttggggaacctggaaccggaggatcatctactccatcaatggttggatctgtgaaacggtggcagaagtctgactctgagaaatgcaaagatacatggagtaaactggcctttgccaattcagcgctggagaaccaactgcgaatcttaaaaggactttctgaaaatcaccgagaggcatatgagtcggtagtgctatcctgtagccatctcacttatgagaagtggacagaggtggctactaaccaacatcaagaattaattattaaatcattgttggctgcaagggatgcttgccttgagataaggcttcacatgcgagagatgggcatagcagccggtgttccgattgagccagattcacaaacacggctacttgacgccactatgaatatggagggtgttttacttgctggagttccgggagctggtggcttcgatgcagtattctcagtgactttgggggatgcaagtaatgctgtagcaaatgcttggagctctgctggcgttctgccacttctcgttcgagaagactgccgtggtgtctcattggaagatgctgacccaagaacaagggaggaaaataaggaattcaatggatttccatggaattagtgcttgtagttatagctatggaatgtacgtgagaaaatgtcaaggcaaaataagctgcacgagatgaggcggaggagatgatggttgaagtcacatttcgaatttcgaatgtgggaggaaaagaccctgggccattggagagtcagggctcgtattcgcccgttgtagggaccacctcattggggatggtagctatgagaggccctctctctctcttgtcctgttggacgagttgacgtgcatctagggaggtgccctcgtatcaccacttggactggtctctcatgcatttagagttttagggttcaggatttagggagatgccctcgagacttgttgcagggatgtgctcgtgtcatgtagcggcatagacatgcgtt

SEQ ID NO: 7015 - DNA, 2056 bp, Zea Mays
acctgggccgtcagactcgccgcgcggcgcggccccgaccacatcgccgattcctcgtttcctccgcacccgcacgcttcccacccgctgccccgcgcccagccgtcgccgtgatcgccagagcgttcctctgccgagccgttcggccggtccactcccgcgaagcttccagtagaggcgaccttcggatcgagtctcggccgccgaggagtcgaaggccatggaagtggtggcgtcggcgccggggaaggtgctcatcgcgggaggatacctcgtgctggagcgccccaacgccggcctagtcctcagcaccaccgcccgcttctacgccgtcgtccgccccctccgcgacagcctccccgccgacgcttgggcctgggcgtggacggatgtcaaagtgacttcccctcagctctcacgggaggccacatacaagctgtccctaacgaagtcgacgctgcaattgacgtctgcgagggaatctacaaacccttttgtggagcaggccatacaattctcggtagcagctgctaaagcgaccattattgataaggagaggaaggatgtagtagataagttgctgctgcaaggtctgaacattacaattcttggatgcaatgatttctattcttatagaaagcagattgaagcacgcggtctccctcttactccagaggcactgctttcattgcctccattctcttcaatcacatttaactcagaggttgctaatggaacaatgactggagagaaatgtaaacctgaagtagccaaaactggacttgggtcatcagctgccatgaccacatcagttgttgcagctcttcttcactatcttggtgtcgttagcctctcatgtccaggacaatcttctggtgataatacaactacacgagaacttgacttggttcactctattgcccaaagtgcacattgtatagcacaggggaaaattggcagtggttttgatgttagtgctgctgtctatgggagtcaacgctatgtaaggttttctccagaaatactctcgtctcaggctacaggtgggactttcctcccagatgtagtatcagatattgttacacaaaggtgggatcatgagaataaacagttctcattacctcctctgatgacccttctccttggggaacctggaaccggaggatcatctactccatcaatggttggatctgtgaaacggtggcagaagtctgactctgagaaatgcaaagatacatggagtaaactggcctttgccaattcagcgctggagaaccaactgcgaatcttaaaaggactttctgaaaatcaccgagaggcatatgagtcggtagtgctatcctgtagccatctcacttatgagaagtggacagaggtggctactaaccaacatcaagaattaattattaaatcattgttggctgcaagggatgcttgccttgagataaggcttcacatgcgagagatgggcatagcagccggtgttccgattgagccagattcacaaacacggctacttgacgccactatgaatatggagggtgttttacttgctggagttccgggagctggtggcttcgatgcagtattctcagtgactttgggggatgcaagtaatgctgtagcaaatgcttggagctctgctggcgttctgccacttctcgttcgagaagactgccgtggtgtctcattggaagatgctgacccaagaacaagggaggcaaaataagctgcacgagatgaggcggaggagatgatggttgaagtcacatttcgaatttcgaatgtgggaggaaaagaccctgggccattggagagtcagggctcgtattcgcccgttgtagggaccacctcattggggatggtagctatgagaggccctctctctctcttgtcctgttggacgagttgacgtgcatctagggaggtgccctcgtatcaccacttggactggtctctcatgcatttagagttttagggttcaggatttagggagatgccctcgagacttgttgcagggatgtgctcgtgtcatgtagcggcatagacatgcgtt

SEQ ID NO: 7016 - DNA, 1539 bp, Zea Mays
agatgaaattgatattgatgctatcattaatgacttcgcttcgagacatgttagaagacaattttaagattgaagcacgcggtctccctcttactccagaggcactgctttcattgcctccattctcttcaatcacatttaactcagaggttgctaatggaacaatgactggagagaaatgtaaacctgaagtagccaaaactggacttgggtcatcagctgccatgaccacatcagttgttgcagctcttcttcactatcttggtgtcgttagcctctcatgtccaggacaatcttctggtgataatacaactacacgagaacttgacttggttcactctattgcccaaagtgcacattgtatagcacaggggaaaattggcagtggttttgatgttagtgctgctgtctatgggagtcaacgctatgtaaggttttctccagaaatactctcgtctcaggctacaggtgggactttcctcccagatgtagtatcagatattgttacacaaaggtgggatcatgagaataaacagttctcattacctcctctgatgacccttctccttggggaacctggaaccggaggatcatctactccatcaatggttggatctgtgaaacggtggcagaagtctgactctgagaaatgcaaagatacatggagtaaactggcctttgccaattcagcgctggagaaccaactgcgaatcttaaaaggactttctgaaaatcaccgagaggcatatgagtcggtagtgctatcctgtagccatctcacttatgagaagtggacagaggtggctactaaccaacatcaagaattaattattaaatcattgttggctgcaagggatgcttgccttgagataaggcttcacatgcgagagatgggcatagcagccggtgttccgattgagccagattcacaaacacggctacttgacgccactatgaatatggagggtgttttacttgctggagttccgggagctggtggcttcgatgcagtattctcagtgactttgggggatgcaagtaatgctgtagcaaatgcttggagctctgctggcgttctgccacttctcgttcgagaagactgccgtggtgtctcattggaagatgctgacccaagaacaagggaggtatcggcagctgtatcgtccattcagattaattgattctactgttaatattctatttatgtattgtgccgaatgctaggaggtacgtggttaaaataagtgctgcacttgcagcaagttagcacgttgtttacaatgactgttcatgagtgtagaaaataaggaattcaatggatttccatggaattagtgcttgtagttatagctatggaatgtacgtgagaaaatgtcaaggtatccaacaaactcatactgtaaaccttgtatttgtaacttttgcggtttgtatgataattcggcatgtgttaatgtttgatatctgaccttatcccatgataggtagtggtcgcggctataagtctgtccgtggtcagtggtcagtagccaactgttt

SEQ ID NO: 7017 - DNA, 1035 bp, Zea Mays
gaaacacatcattactttaagatgggccggctcaggttagtgggcatcaacccatttgcctgcactagtagacagatttctcagaagccgcggccgtcacgcgtcagacccacgcagcgcaccttctcttctccgccgcgtcgccgccgaacatcagcatcggatcgatggagggctgggacaaggggaccaagagcacggtgggcgagatcccgctgctgtcgacgcgcgcgggtccgcgggacggcgaggcgtggcggcagaggctcaaggaggagtaccgcgcgctcatcgcctacacgtcggtgaacaaggccaaggacaacgactggttccgcatcgccgccgccaacccggagggaacccgctgggaggggacctgctggtcgcccccgagatcgagctccccaccctcgacggcaagactcacaaggcgatgcctaggcgtcgcctaggcgtccaggtgcccgaaagatccaaggcgtccccgtcgcctaggtaagaagcagcaagagggcatagggcagaggggaaaggaaaggggcggcactgtttcagggtggcagcgccgaatcgggagcggcggaggccaaatccagggcggcagagaacaaatccagggaggcggaggctgaatcggcggcggcagcgtccaaatcgtcggcggcggcggcgaatctgaggcggcgacggcgaatctaaggcggcggcggcgaatctgaggcggcgacggcgaatctaaggcggcggcggctcaatcgggggcagcggcagctgaatggtgggggagagaggcaacctagggttgccagaggaaggattatatgggctggctggtgggctgggtctcctaccccttccttctccttttttcttttttttttctttttcttcctcctccatggggctgttttgctgattctcaggttgataaggcgtcgccttgctcgccttaggcgtcgcctaggcgtctaggcggtggtccggcgccttatctcgccttaccgccttaagaaccatggtttgatatttata

SEQ ID NO: 7018 - DNA, 1881 bp, Zea Mays
gaaacacatcattactttaagatgggccggctcaggttagtgggcatcaacccatttgcctgcactagtagacagatttctcagaagccgcggccgtcacgcgtcagacccacgcagcgcaccttctcttctccgccgcgtcgccgccgaacatcagcatcggatcgatggagggctgggacaaggggaccaagagcacggtgggcgagatcccgctgctgtcgacgcgcgcgggtccgcgggacggcgaggcgtggcggcagaggctcaaggaggagtaccgcgcgctcatcgcctacacgtcggtgaacaaggccaaggacaacgactggttccgcatcgccgccgccaacccggagggaacccgctgggaggggacctgctggtcgcccccgagatcgagctccccaccctcgacggcaagactcacaagatgtaccgcggtgggaagatctgcctcaccgtgcacttcaagccgctgtgggccaagaactgcccgaggttcggcctggcgcacgcgctgtgcctcggcctcgcgccgtggctcgcggcggaagtcccgattctggtcgactcgggcatggtgaagcacaaggatgacgaggcggctccggctgaggcatctgcctctgctgctcctccttcgtagttgccacttgcaacaactgagtgtccggtgagctaagggcgatatcggaaatcaactcggcggtgaaccgtgaaccgccaaataagagagatacctgcaaatctaaacatcatgtgaaacatgttccatacctgctgattgctgtctgcgtactaatttctatccaacttctaaattgtgttcgcagatttttatggtacacttgactaataccataaggtaacataattgcttaataaaactagtgcagattttctgattggtcggttatagaatttgttcatcgattactagcgtgtttggttcaaggaatgaggtagtccatcaccttttcatttctcactttcttatttggtttgtggaatggaatgagttattccatcaccatttcattcctcataggctaataattagtaataatatgaggaatgagttcgttccactaaatttgtggaatggactcatgatgcaccacatcatctagaatggattgattgttcaaaccaaacacccctacaagtttgtgtgcaatttccctaaaaacttctgtttttgatttgacacagtgcttagctgtctttgagattttgtcatgccccaaaatttccaattttgggatgtaaatagaaaacgcttaatataaacaatggttttgatccttgttttaaaggcgatgcctaggcgtcgcctaggcgtccaggtgcccgaaagatccaaggcgtccccgtcgcctaggtaagaagcagcaagagggcatagggcagaggggaaaggaaaggggcggcactgtttcagggtggcagcgccgaatcgggagcggcggaggccaaatccagggcggcagagaacaaatccagggaggcggaggctgaatcggcggcggcagcgtccaaatcgtcggcggcggcggcgaatctgaggcggcgacggcgaatctaaggcggcggcggctcaatcgggggcagcggcagctgaatggtgggggagagaggcaacctagggttgccagaggaaggattatatgggctggctggtgggctgggtctcctaccccttccttctccttttttcttttttttttctttttcttcctcctccatggggctgttttgctgattctcaggttgataaggcgtcgccttgctcgccttaggcgtcgcctaggcgtctaggcggtggtccggcgccttatctcgccttaccgccttaagaaccatggtttgatatttata

SEQ ID NO: 7019 - DNA, 1470 bp, Zea Mays
gaaacacatcattactttaagatgggccggctcaggttagtgggcatcaacccatttgcctgcactagtagacagatttctcagaagccgcggccgtcacgcgtcagacccacgcagcgcaccttctcttctccgccgcgtcgccgccgaacatcagcatcggatcgatggagggctgggacaaggggaccaagagcacggtgggcgagatcccgctgctgtcgacgcgcgcgggtccgcgggacggcgaggcgtggcggcagaggctcaaggaggagtaccgcgcgctcatcgcctacacgtcggtgaacaaggccaaggacaacgactggttccgcatcgccgccgccaacccggagggaacccgctgggaggggacctgctggtcgcccccgagatcgagctccccaccctcgacggcaagactcacaagatgtaccgcggtgggaagatctgcctcaccgtgcacttcaagccgctgtgggccaagaactgcccgaggttcggcctggcgcacgcgctgtgcctcggcctcgcgccgtggctcgcggcggaagtcccgattctggtcgactcgggcatggtgaagcacaaggatgacgaggcggctccggctgaggcatctgcctctgctgctcctccttcgtagttgccacttgcaacaactgagtgtccggtgagctaagggcgatatcggaaatcaactcggcggtgaaccgtgaaccgccaaataagagagatacctgcaaatctaaacatcatgtgaaacatgttccatacctgctgattgctgtctgcgtactaatttctatccaacttctaaattgtgttcgcagatttttatggtacacttgactaataccataaggcgatgcctaggcgtcgcctaggcgtccaggtgcccgaaagatccaaggcgtccccgtcgcctaggtaagaagcagcaagagggcatagggcagaggggaaaggaaaggggcggcactgtttcagggtggcagcgccgaatcgggagcggcggaggccaaatccagggcggcagagaacaaatccagggaggcggaggctgaatcggcggcggcagcgtccaaatcgtcggcggcggcggcgaatctgaggcggcgacggcgaatctaaggcggcggcggcgaatctgaggcggcgacggcgaatctaaggcggcggcggctcaatcgggggcagcggcagctgaatggtgggggagagaggcaacctagggttgccagaggaaggattatatgggctggctggtgggctgggtctcctaccccttccttctccttttttcttttttttttctttttcttcctcctccatggggctgttttgctgattctcaggttgataaggcgtcgccttgctcgccttaggcgtcgcctaggcgtctaggcggtggtccggcgccttatctcgccttaccgccttaagaaccatggtttgatatttata

SEQ ID NO: 7020 - DNA, 1345 bp, Zea Mays
gaaacacatcattactttaagatgggccggctcaggttagtgggcatcaacccatttgcctgcactagtagacagatttctcagaagccgcggccgtcacgcgtcagacccacgcagcgcaccttctcttctccgccgcgtcgccgccgaacatcagcatcggatcgatggagggctgggacaaggggaccaagagcacggtgggcgagatcccgctgctgtcgacgcgcgcgggtccgcgggacggcgaggcgtggcggcagaggctcaaggaggagtaccgcgcgctcatcgcctacacgtcggtgaacaaggccaaggacaacgactggttccgcatcgccgccgccaacccggagggaacccgctgggaggggacctgctggtacgtccacaacctccgccgctatgagttccctctccagttcgacatgcccgtcgcctacccccaggtcgcccccgagatcgagctccccaccctcgacggcaagactcacaagatgtaccgcggtgggaagatctgcctcaccgtgcacttcaagccgctgtgggccaagaactgcccgaggttcggcctggcgcacgcgctgtgcctcggcctcgcgccgtggctcgcggcggaagtcccgattctggtcgactcgggcatggtgaagcacaaggatgacgaggcggctccggctgaggcatctgcctctgctgctcctccttcgtagttgccacttgcaacaactgagtgtccggcgatgcctaggcgtcgcctaggcgtccaggtgcccgaaagatccaaggcgtccccgtcgcctaggtaagaagcagcaagagggcatagggcagaggggaaaggaaaggggcggcactgtttcagggtggcagcgccgaatcgggagcggcggaggccaaatccagggcggcagagaacaaatccagggaggcggaggctgaatcggcggcggcagcgtccaaatcgtcggcggcggcggcgaatctgaggcggcgacggcgaatctaaggcggcggcggcgaatctgaggcggcgacggcgaatctaaggcggcggcggctcaatcgggggcagcggcagctgaatggtgggggagagaggcaacctagggttgccagaggaaggattatatgggctggctggtgggctgggtctcctaccccttccttctccttttttcttttttttttctttttcttcctcctccatggggctgttttgctgattctcaggttgataaggcgtcgccttgctcgccttaggcgtcgcctaggcgtctaggcggtggtccggcgccttatctcgccttaccgccttaagaaccatggtttgatatttata

SEQ ID NO: 7021 - DNA, 1016 bp, Zea Mays
aacaagacaggcctaagcagccaagctaaacttatgtgtgtatgggaatatggtctgaaagtgctgccaaggatatgaacaaacaggtacaagatatttgggaaagctctagcaagaattcagagtgatagtcaggtcacgtcaaggattggccaccctattactggatatggccaggaaactagaaaccgtgcagctcggcaaagaattccaaataagatttggacagatgaggatggtgttgaacatgtggaggtgaactttctcatccgtgggccacatggagctggaaaagtgtattcagagatgttcaaagacactgatcggacgtggaagttcacataccttgttgttgatatcgtgtcaccaccacatgcaaaaacacaactgatgttagaatcttacttaccagcataaggatgcaggaaacagaggcagttagcagtgccatgacatctccgagattttggcacaaatgggaagctctgatagaagtggctaaactggggatttgtgaacaagtctaggcaagttgggaatttaggaacaagattgtcataatgtactaccatcaaaccagttttgtggagtaataaacggttcttacattactagaagcatatctgaaaatgtttcgatgtttcttttagttacggggaaaacccctgcatgcctggatgagggtattttttgttagttctcatgagtaccttgtatcgtccaaatacgtgggctaatccagcaagtcatcttttgtaaaatcatagcaactcttattgtatctggatttggtttccaattaactcattttgaaatgctcgacttaagggctaaggcatgggtataatcttggctgttaggaacatctctctctctctctctctctctctctctctctctctcttaaattaaagccttaaaatgtatggtatgaaaatatattttacgttatgtctaactatactaattttatgtcacaaatatgagtctttctatagaatatgtgaaacttaaaa

SEQ ID NO: 7022 - DNA, 1480 bp, Zea Mays
aaagccgcccgcccgccccgtcgccgcgaccgcgagggcaccagaaagccgagaatccacccaaacaattctctgtttctcctgttcgctgcctcctcattcctgaacccctcccccaagtatacgagtcacatccgcatggcctcccgggtcacgaggctgctcctgcaccgccgcctcaccaccgcagcggaagcctccgcgcgccgcgcgccgcaggctccctgtgccggcgccgctgtctccaaggatgttgttaaggctgaagcttcatctttgaaaaattcaaggtggcacattactaggtcaaacacttcaggtcctttgactactcgttatgagtgccgcaaagtatttccttgttctgtaaggccatctgcatcttactctacacaagcttcagaccagaagggaaaacaggaagggaaagacttgtcaaatgtagaacacccctttgatgatattacctacaatatacctgagaagccagtgacatttactgaaggtgcttcttatagtcttgtaatactcgccgggctcggaattgcaggactggctggatatgctgtgttcaaagagcttatatttgagccaaaagagtcacgtcaaggattggccaccctattactggatatggccaggaaactagaaaccgtgcagctcggcaaagaattccaaataagatttggacagatgaggatggtgttgaacatgtggaggtgaactttctcatccgtgggccacatggagctggaaaagtgtattcagagatgttcaaagacactgatcggacgtggaagttcacataccttgttgttgatatcgtgtcaccaccacatgcaaaaacacaactgatgttagaatcttacttaccagcataaggatgcaggaaacagaggcagttagcagtgccatgacatctccgagattttggcacaaatgggaagctctgatagaagtggctaaactggggatttgtgaacaagtctaggcaagttgggaatttaggaacaagattgtcataatgtactaccatcaaaccagttttgtggagtaataaacggttcttacattactagaagcatatctgaaaatgtttcgatgtttcttttagttacggggaaaacccctgcatgcctggatgagggtattttttgttagttctcatgagtaccttgtatcgtccaaatacgtgggctaatccagcaagtcatcttttgtaaaatcatagcaactcttattgtatctggatttggtttccaattaactcattttgaaatgctcgacttaagggctaaggcatgggtataatcttggctgttaggaacatctctctctctctctctctctctctctctctctctctcttaaattaaagccttaaaatgtatggtatgaaaatatattttacgttatgtctaactatactaattttatgtcacaaatatgagtctttctatagaatatgtgaaacttaaaa

SEQ ID NO: 7023 - DNA, 1574 bp, Zea Mays
aaagccgcccgcccgccccgtcgccgcgaccgcgagggcaccagaaagccgagaatccacccaaacaattctctgtttctcctgttcgctgcctcctcattcctgaacccctcccccaagtatacgagtcacatccgcatggcctcccgggtcacgaggctgctcctgcaccgccgcctcaccaccgcagcggaagcctccgcgcgccgcgcgccgcaggctccctgtgccggcgccgctgtctccaaggatgttgttaaggctgaaggtcaattcccacctctgaattaaagctctgtgtttgattggccaacttcatctttgaaaaattcaaggtggcacattactaggtcaaacacttcaggtcctttgactactcgttatgagtgccgcaaagtatttccttgttctgtaaggccatctgcatcttactctacacaagcttcagaccagaagggaaaacaggaagggaaagacttgtcaaatgtagaacacccctttgatgatattacctacaatatacctgagaagccagtgacatttactgaaggtgcttcttatagtcttgtaatactcgccgggctcggaattgcaggactggctggatatgctgtgttcaaagagcttatatttgagccaaaagagtacaagatatttgggaaagctctagcaagaattcagagtgatagtcaggtcacgtcaaggattggccaccctattactggatatggccaggaaactagaaaccgtgcagctcggcaaagaattccaaataagatttggacagatgaggatggtgttgaacatgtggaggtgaactttctcatccgtgggccacatggagctggaaaagtgtattcagagatgttcaaagacactgatcggacgtggaagttcacataccttgttgttgatatcgtgtcaccaccacatgcaaaaacacaactgatgttagaatcttacttaccagcataaggatgcaggaaacagaggcagttagcagtgccatgacatctccgagattttggcacaaatgggaagctctgatagaagtggctaaactggggatttgtgaacaagtctaggcaagttgggaatttaggaacaagattgtcataatgtactaccatcaaaccagttttgtggagtaataaacggttcttacattactagaagcatatctgaaaatgtttcgatgtttcttttagttacggggaaaacccctgcatgcctggatgagggtattttttgttagttctcatgagtaccttgtatcgtccaaatacgtgggctaatccagcaagtcatcttttgtaaaatcatagcaactcttattgtatctggatttggtttccaattaactcattttgaaatgctcgacttaagggctaaggcatgggtataatcttggctgttaggaacatctctctctctctctctctctctctctctctctctctcttaaattaaagccttaaaatgtatggtatgaaaatatattttacgttatgtctaactatactaattttatgtcacaaatatgagtctttctatagaatatgtgaaacttaaaa

SEQ ID NO: 7024 - DNA, 3271 bp, Zea Mays
tggtaacggaatagggacaaacttcctgctcgtttcaaaaaagcttaaactggcagcaccagctttgcaagaaccctagacctaatcctgacatcaagaccctttttgttgatcattcatgtggacaaccgaatggtgcacgtgctccatcaccagcaaacagtccgttacttggatctatgcccaaacctggaggtttccctccattgggtgctcatggaccttttcaacctgcaccaacacctgtcccacctctggctgggtggatgtcaaaccctccagcaataacacatcctgctgtgtctggtggtgccattggatttggcactccaacaaatcctgccgttttgttgaagcatcctagaacacccacaactggtaatcctggtatggattatccatcaggagattctgaccacatttccaagagaactagaccggttggcatgtctgaggagagccataattaccaacaagatgatttccacaaagctgttgcacggaccttgagccaaggatcagcacctatgagcatggatttccatccacttcaacaaactcttcttcttgttggtaccaatgttggcgacattggattgtgggatgttggtaccaaagagagactcgttgtaagaaacttcaaagtctgggaccttggtaaatgtacaatgaccctacaggcagcactggttaaggacccagctgtgtcagttaatcgcataatatggagtcctgatggaaccttgtttggtgttgcttattcaaggcatattgtacagatttattcctataacggtggcgatgatattagacaacacttggagattgatgcacatgttggtggtgtaaatgacatagcatttgctcatccaaataagcagctatgtataattacatgtggagatgataagacaattaaggtatgggaggccactagtggagctaagcaatttacctttgaaggacatgaagctcctgtttattctgtgtgtccacattacaaggaaaatattcagttcatcttctcaactgctttagatgggaagatcaaggcatggctatatgataatttgggatctagagttgactatgatgcaccaggtcattggtgcactacaatggcatatagtgcagatggttcaaggttattttcatgtgggactagcaaggatggtgaatcacatctagtagaatggaatgaaagtgaaggagcagtgaagagaacatatcagggattccgtaagcgatctatgggtgttgtgcaattcgataccacccggaacaggtttttggccgcgggggacgaattcatgattaagatatgggacatggacagcacgggtcttctgactaccattgatgctgatggtggcttaactgcaagtccacggatacgcttcaacaaggagggaactctattggctgtctccactgctgacaatggtatcaagatcttagcaaatgctgatggacttcggttgctgcgcacactggaaaatcgttcttttgatgcttctcgtaatgcatctgaggctgtaacaaagcctctaataaatcccttgactgctgcggcaaatgcagctgcagcaagcagttcaggagctggtgctccgtcagctataactgcaatgaatggtgatagcagaagtttggttgatgtaaaacctagaatagctgatgagtcacttgacaagtcaaaggtatggaagcttatggagataactgagtcaagtcagtgcagatcaatcaaactggcggataacatgagaacaagcaagatttcgagattgatttacacaaactctggtcttgctatcttggctttaacttcaagcgctgttcatctactctggaaatggccacgcagtgatcggaattctggaaaggcaaccgcaagtgtatctcccactctatggcaaccaccaagtggcatcttgatgactaatgacacgactgacaataatcctgaagaagctgttcactgctttgctttgtcgaagaatgattcatatgtcatgtctgcttctggaggaaaaatctctctgttcaacatgatgactttcaagacaatgacaacgtttatgcctgcaccgccggcagcaacttttcttgcatttcatccccaagataacaacataattgcaattggaatggatgactcaaccatccaaatctataatgtccgaattgatgaggtcaaaagcaagctcagaggtcactctaagagaatcacaggtcttgccttttcaaatgtgctaaatgttttagtctcgtcaggagctgatgcccagttatgtgtttggaacacggatggatgggagaagcaaaagaacagatttttgcagataccatcaggtcgccaatccaatatcttggacactcgtgttcagttccaccaagatcaaatgcactttcttgttgtgcatgaaacccagattgccatctatgaaactacaaaactagaaccagtgaagcagtggcctgttcgagagaattcacctccaatcacacatgccacattctcgtgtgatagtcaactgatctatgcaagctttatggatgccactgttggcatatttaatgggtcgagtttgagacttcaatgtcggattcttccagcttcgtatcttcctccaaatatcagtccgagcgttcatcctgttgtggttgcggcacacccttcggaagcaagccagtttgctctagggctgactgatggtggtgtttttgtgttggaacctttggaatcggagagaaaatggggaaatcctccaccagtagagaatgggtctgctagcaacttgtccacaccgcctcctaatggagcttcaagttctgaccaaccagaaagatgattaagaagttggaactggtagatttttcgtggcacgagtctaaccaagaagggcttcaaagggtggtgcgactaaccttggcagataggttccaagggagccggacaatgcgctcaataaaaataagttcaacagaagtttgtccgttgcttgtataaatatttgtattgactatcgagtgaggagtcctagtatttcatttttgctttgtttgcggtgctgtgaaaaggatcagtagataagctgtagtacaacaactatcagactggctgtacttacctatatttatgactattagttaatgtatgttgtttcatttgcctttttggctccgttcagccgtttttgctatcataaagtgctgtttctgaactcgcattagcattgtgcgcctcttttgatgaacgaggctcaac

SEQ ID NO: 7025 - DNA, 3395 bp, Zea Mays
gaaacacaggaatagatgtgtgttcgatggttgtagcccaaaccttgatgtcgctcttcaggctgccagggaagaagccgtttgttggtcaatggctggggtgaagggtctggctttcatcaaggacaatgagctgtttgcttagaatatttgtgcagcaactctgtcttaaactggcagcaccagctttgcaagaaccctagacctaatcctgacatcaagaccctttttgttgatcattcatgtggacaaccgaatggtgcacgtgctccatcaccagcaaacagtccgttacttggatctatgcccaaacctggaggtttccctccattgggtgctcatggaccttttcaacctgcaccaacacctgtcccacctctggctgggtggatgtcaaaccctccagcaataacacatcctgctgtgtctggtggtgccattggatttggcactccaacaaatcctgccgttttgttgaagcatcctagaacacccacaactggtaatcctggtatggattatccatcaggagattctgaccacatttccaagagaactagaccggttggcatgtctgaggagagccataattaccaacaagatgatttccacaaagctgttgcacggaccttgagccaaggatcagcacctatgagcatggatttccatccacttcaacaaactcttcttcttgttggtaccaatgttggcgacattggattgtgggatgttggtaccaaagagagactcgttgtaagaaacttcaaagtctgggaccttggtaaatgtacaatgaccctacaggcagcactggttaaggacccagctgtgtcagttaatcgcataatatggagtcctgatggaaccttgtttggtgttgcttattcaaggcatattgtacagatttattcctataacggtggcgatgatattagacaacacttggagattgatgcacatgttggtggtgtaaatgacatagcatttgctcatccaaataagcagctatgtataattacatgtggagatgataagacaattaaggtatgggaggccactagtggagctaagcaatttacctttgaaggacatgaagctcctgtttattctgtgtgtccacattacaaggaaaatattcagttcatcttctcaactgctttagatgggaagatcaaggcatggctatatgataatttgggatctagagttgactatgatgcaccaggtcattggtgcactacaatggcatatagtgcagatggttcaaggttattttcatgtgggactagcaaggatggtgaatcacatctagtagaatggaatgaaagtgaaggagcagtgaagagaacatatcagggattccgtaagcgatctatgggtgttgtgcaattcgataccacccggaacaggtttttggccgcgggggacgaattcatgattaagatatgggacatggacagcacgggtcttctgactaccattgatgctgatggtggcttaactgcaagtccacggatacgcttcaacaaggagggaactctattggctgtctccactgctgacaatggtatcaagatcttagcaaatgctgatggacttcggttgctgcgcacactggaaaatcgttcttttgatgcttctcgtaatgcatctgaggctgtaacaaagcctctaataaatcccttgactgctgcggcaaatgcagctgcagcaagcagttcaggagctggtgctccgtcagctataactgcaatgaatggtgatagcagaagtttggttgatgtaaaacctagaatagctgatgagtcacttgacaagtcaaaggtatggaagcttatggagataactgagtcaagtcagtgcagatcaatcaaactggcggataacatgagaacaagcaagatttcgagattgatttacacaaactctggtcttgctatcttggctttaacttcaagcgctgttcatctactctggaaatggccacgcagtgatcggaattctggaaaggcaaccgcaagtgtatctcccactctatggcaaccaccaagtggcatcttgatgactaatgacacgactgacaataatcctgaagaagctgttcactgctttgctttgtcgaagaatgattcatatgtcatgtctgcttctggaggaaaaatctctctgttcaacatgatgactttcaagacaatgacaacgtttatgcctgcaccgccggcagcaacttttcttgcatttcatccccaagataacaacataattgcaattggaatggatgactcaaccatccaaatctataatgtccgaattgatgaggtcaaaagcaagctcagaggtcactctaagagaatcacaggtcttgccttttcaaatgtgctaaatgttttagtctcgtcaggagctgatgcccagttatgtgtttggaacacggatggatgggagaagcaaaagaacagatttttgcagataccatcaggtcgccaatccaatatcttggacactcgtgttcagttccaccaagatcaaatgcactttcttgttgtgcatgaaacccagattgccatctatgaaactacaaaactagaaccagtgaagcagtggcctgttcgagagaattcacctccaatcacacatgccacattctcgtgtgatagtcaactgatctatgcaagctttatggatgccactgttggcatatttaatgggtcgagtttgagacttcaatgtcggattcttccagcttcgtatcttcctccaaatatcagtccgagcgttcatcctgttgtggttgcggcacacccttcggaagcaagccagtttgctctagggctgactgatggtggtgtttttgtgttggaacctttggaatcggagagaaaatggggaaatcctccaccagtagagaatgggtctgctagcaacttgtccacaccgcctcctaatggagcttcaagttctgaccaaccagaaagatgattaagaagttggaactggtagatttttcgtggcacgagtctaaccaagaagggcttcaaagggtggtgcgactaaccttggcagataggttccaagggagccggacaatgcgctcaataaaaataagttcaacagaagtttgtccgttgcttgtataaatatttgtattgactatcgagtgaggagtcctagtatttcatttttgctttgtttgcggtgctgtgaaaaggatcagtagataagctgtagtacaacaactatcagactggctgtacttacctatatttatgactattagttaatgtatgttgtttcatttgcctttttggctccgttcagccgtttttgctatcataaagtgctgtttctgaactcgcattagcattgtgcgcctcttttgatgaacgaggctcaac

SEQ ID NO: 7026 - DNA, 3297 bp, Zea Mays
ctctcttccaaggggcaatagggttcgagcctgcagaaagagtatggaaaacctgggcacccggaaagtcttaaactggcagcaccagctttgcaagaaccctagacctaatcctgacatcaagaccctttttgttgatcattcatgtggacaaccgaatggtgcacgtgctccatcaccagcaaacagtccgttacttggatctatgcccaaacctggaggtttccctccattgggtgctcatggaccttttcaacctgcaccaacacctgtcccacctctggctgggtggatgtcaaaccctccagcaataacacatcctgctgtgtctggtggtgccattggatttggcactccaacaaatcctgccgttttgttgaagcatcctagaacacccacaactggtaatcctggtatggattatccatcaggagattctgaccacatttccaagagaactagaccggttggcatgtctgaggagagccataattaccaacaagatgatttccacaaagctgttgcacggaccttgagccaaggatcagcacctatgagcatggatttccatccacttcaacaaactcttcttcttgttggtaccaatgttggcgacattggattgtgggatgttggtaccaaagagagactcgttgtaagaaacttcaaagtctgggaccttggtaaatgtacaatgaccctacaggcagcactggttaaggacccagctgtgtcagttaatcgcataatatggagtcctgatggaaccttgtttggtgttgcttattcaaggcatattgtacagatttattcctataacggtggcgatgatattagacaacacttggagattgatgcacatgttggtggtgtaaatgacatagcatttgctcatccaaataagcagctatgtataattacatgtggagatgataagacaattaaggtatgggaggccactagtggagctaagcaatttacctttgaaggacatgaagctcctgtttattctgtgtgtccacattacaaggaaaatattcagttcatcttctcaactgctttagatgggaagatcaaggcatggctatatgataatttgggatctagagttgactatgatgcaccaggtcattggtgcactacaatggcatatagtgcagatggttcaaggttattttcatgtgggactagcaaggatggtgaatcacatctagtagaatggaatgaaagtgaaggagcagtgaagagaacatatcagggattccgtaagcgatctatgggtgttgtgcaattcgataccacccggaacaggtttttggccgcgggggacgaattcatgattaagatatgggacatggacagcacgggtcttctgactaccattgatgctgatggtggcttaactgcaagtccacggatacgcttcaacaaggagggaactctattggctgtctccactgctgacaatggtatcaagatcttagcaaatgctgatggacttcggttgctgcgcacactggaaaatcgttcttttgatgcttctcgtaatgcatctgaggctgtaacaaagcctctaataaatcccttgactgctgcggcaaatgcagctgcagcaagcagttcaggagctggtgctccgtcagctataactgcaatgaatggtgatagcagaagtttggttgatgtaaaacctagaatagctgatgagtcacttgacaagtcaaaggtatggaagcttatggagataactgagtcaagtcagtgcagatcaatcaaactggcggataacatgagaacaagcaagatttcgagattgatttacacaaactctggtcttgctatcttggctttaacttcaagcgctgttcatctactctggaaatggccacgcagtgatcggaattctggaaaggcaaccgcaagtgtatctcccactctatggcaaccaccaagtggcatcttgatgactaatgacacgactgacaataatcctgaagaagctgttcactgctttgctttgtcgaagaatgattcatatgtcatgtctgcttctggaggaaaaatctctctgttcaacatgatgactttcaagacaatgacaacgtttatgcctgcaccgccggcagcaacttttcttgcatttcatccccaagataacaacataattgcaattggaatggatgactcaaccatccaaatctataatgtccgaattgatgaggtcaaaagcaagctcagaggtcactctaagagaatcacaggtcttgccttttcaaatgtgctaaatgttttagtctcgtcaggagctgatgcccagttatgtgtttggaacacggatggatgggagaagcaaaagaacagatttttgcagataccatcaggtcgccaatccaatatcttggacactcgtgttcagttccaccaagatcaaatgcactttcttgttgtgcatgaaacccagattgccatctatgaaactacaaaactagaaccagtgaagcagtggcctgttcgagagaattcacctccaatcacacatgccacattctcgtgtgatagtcaactgatctatgcaagctttatggatgccactgttggcatatttaatgggtcgagtttgagacttcaatgtcggattcttccagcttcgtatcttcctccaaatatcagtccgagcgttcatcctgttgtggttgcggcacacccttcggaagcaagccagtttgctctagggctgactgatggtggtgtttttgtgttggaacctttggaatcggagagaaaatggggaaatcctccaccagtagagaatgggtctgctagcaacttgtccacaccgcctcctaatggagcttcaagttctgaccaaccagaaagatgattaagaagttggaactggtagatttttcgtggcacgagtctaaccaagaagggcttcaaagggtggtgcgactaaccttggcagataggttccaagggagccggacaatgcgctcaataaaaataagttcaacagaagtttgtccgttgcttgtataaatatttgtattgactatcgagtgaggagtcctagtatttcatttttgctttgtttgcggtgctgtgaaaaggatcagtagataagctgtagtacaacaactatcagactggctgtacttacctatatttatgactattagttaatgtatgttgtttcatttgcctttttggctccgttcagccgtttttgctatcataaagtgctgtttctgaactcgcattagcattgtgcgcctcttttgatgaacgaggctcaac

SEQ ID NO: 7027 - DNA, 4163 bp, Zea Mays
cgatagtgatttcatcttcctctaccaggcggctccgtggtccgtgctgatcaactgcatcaaggatcgtcgccggcggcgcgctggcagcagttcgcacggcgagatcggattgatcgagatcttctaggcctggacctgcgctagacctcgaagcctcgatcgcaccgcatcttctctctctgctgctggtccgctccgtcgccgccgaccccgccgccagcttccccttccacctaaaaggacgacctctggccgcccttgtcccgccccgacgcctcggtttccactgcataggcgtggtgcggcgatccgtccgggcctagggttgcgagagacactatagggtacgaccctaggagcatccgcctccacgtgggtgaggcggaagagggaggatgacatcgctcagccgtgagctggtcttcctcatcctgcagttcctcgatgaggaaaaattcaaagagacagtccacaagctcgagcaggagtccggattctatttcaacataaagtactttgaggacgaagtcctcaatgggaattgggatgaggtggagcgctaccttggtggattcaccaaggttgacgataaccgctactccatgaagatattctttgagatccggaagcagaagtatctggaggctcttgataagcatgatcggtcaaaggctgttgaaatcttggtcaaggaccttaaggtctttgcatccttcaatgaggagttgttcaaggagatcacacagcttctaaccttggagaattttagggaaaatgagcagctctcgaagtatggtgatacaaaatctgcaagacaaataatgcttgctgagctgaagaagctgattgaagctaatcccttgttccgtgacaaactacaatttcccagcctgaagacttctaggttgcggacacttattaaccagagcttaaactggcagcaccagctttgcaagaaccctagacctaatcctgacatcaagaccctttttgttgatcattcatgtggacaaccgaatggtgcacgtgctccatcaccagcaaacagtccgttacttggatctatgcccaaacctggaggtttccctccattgggtgctcatggaccttttcaacctgcaccaacacctgtcccacctctggctgggtggatgtcaaaccctccagcaataacacatcctgctgtgtctggtggtgccattggatttggcactccaacaaatcctgccgttttgttgaagcatcctagaacacccacaactggtaatcctggtatggattatccatcaggagattctgaccacatttccaagagaactagaccggttggcatgtctgaggagagccataattaccaacaagatgatttccacaaagctgttgcacggaccttgagccaaggatcagcacctatgagcatggatttccatccacttcaacaaactcttcttcttgttggtaccaatgttggcgacattggattgtgggatgttggtaccaaagagagactcgttgtaagaaacttcaaagtctgggaccttggtaaatgtacaatgaccctacaggcagcactggttaaggacccagctgtgtcagttaatcgcataatatggagtcctgatggaaccttgtttggtgttgcttattcaaggcatattgtacagatttattcctataacggtggcgatgatattagacaacacttggagattgatgcacatgttggtggtgtaaatgacatagcatttgctcatccaaataagcagctatgtataattacatgtggagatgataagacaattaaggtatgggaggccactagtggagctaagcaatttacctttgaaggacatgaagctcctgtttattctgtgtgtccacattacaaggaaaatattcagttcatcttctcaactgctttagatgggaagatcaaggcatggctatatgataatttgggatctagagttgactatgatgcaccaggtcattggtgcactacaatggcatatagtgcagatggttcaaggttattttcatgtgggactagcaaggatggtgaatcacatctagtagaatggaatgaaagtgaaggagcagtgaagagaacatatcagggattccgtaagcgatctatgggtgttgtgcaattcgataccacccggaacaggtttttggccgcgggggacgaattcatgattaagatatgggacatggacagcacgggtcttctgactaccattgatgctgatggtggcttaactgcaagtccacggatacgcttcaacaaggagggaactctattggctgtctccactgctgacaatggtatcaagatcttagcaaatgctgatggacttcggttgctgcgcacactggaaaatcgttcttttgatgcttctcgtaatgcatctgaggctgtaacaaagcctctaataaatcccttgactgctgcggcaaatgcagctgcagcaagcagttcaggagctggtgctccgtcagctataactgcaatgaatggtgatagcagaagtttggttgatgtaaaacctagaatagctgatgagtcacttgacaagtcaaaggtatggaagcttatggagataactgagtcaagtcagtgcagatcaatcaaactggcggataacatgagaacaagcaagatttcgagattgatttacacaaactctggtcttgctatcttggctttaacttcaagcgctgttcatctactctggaaatggccacgcagtgatcggaattctggaaaggcaaccgcaagtgtatctcccactctatggcaaccaccaagtggcatcttgatgactaatgacacgactgacaataatcctgaagaagctgttcactgctttgctttgtcgaagaatgattcatatgtcatgtctgcttctggaggaaaaatctctctgttcaacatgatgactttcaagacaatgacaacgtttatgcctgcaccgccggcagcaacttttcttgcatttcatccccaagataacaacataattgcaattggaatggatgactcaaccatccaaatctataatgtccgaattgatgaggtcaaaagcaagctcagaggtcactctaagagaatcacaggtcttgccttttcaaatgtgctaaatgttttagtctcgtcaggagctgatgcccagttatgtgtttggaacacggatggatgggagaagcaaaagaacagatttttgcagataccatcaggtcgccaatccaatatcttggacactcgtgttcagttccaccaagatcaaatgcactttcttgttgtgcatgaaacccagattgccatctatgaaactacaaaactagaaccagtgaagcagtggcctgttcgagagaattcacctccaatcacacatgccacattctcgtgtgatagtcaactgatctatgcaagctttatggatgccactgttggcatatttaatgggtcgagtttgagacttcaatgtcggattcttccagcttcgtatcttcctccaaatatcagtccgagcgttcatcctgttgtggttgcggcacacccttcggaagcaagccagtttgctctagggctgactgatggtggtgtttttgtgttggaacctttggaatcggagagaaaatggggaaatcctccaccagtagagaatgggtctgctagcaacttgtccacaccgcctcctaatggagcttcaagttctgaccaaccagaaagatgattaagaagttggaactggtagatttttcgtggcacgagtctaaccaagaagacagggcttcaaagggtggtgcgactaaccttggcagataggttccaagggagccggacaatgcgctcaataaaaataagttcaacagaagtttgtccgttgcttgtataaatatttgtattgactatcgagtgaggagtcctagtatttcatttttgctttgtttgcggtgctgtgaaaaggatcagtagataagctgtagtacaacaactatcagactggctgtacttacctatatttatgactattagttaatgtatgttgtttcatttgcctttttggctccgttcagccgtttttgctatcataaagtgctgtttctgaactcgcattagcattgtgcgcctcttttgatgaacgaggctcaac

SEQ ID NO: 7028 - DNA, 4205 bp, Zea Mays
cgatagtgatttcatcttcctctaccaggcggctccgtggtccgtgctgatcaactgcatcaaggatcgtcgccggcggcgcgctggcagcagttcgcacggcgagatcggattgatcgagatcttctaggcctggacctgcgctagacctcgaagcctcgatcgcaccgcatcttctctctctgctgctggtccgctccgtcgccgccgaccccgccgccagcttccccttccacctaaaaggacgacctctggccgcccttgtcccgccccgacgcctcggtttccactgcataggcgtggtgcggcgatccgtccgggcctagggttgcgagagacactatagggtacgaccctaggagcatccgcctccacgtgggtgaggcggaagagggaggatgacatcgctcagccgtgagctggtcttcctcatcctgcagttcctcgatgaggaaaaattcaaagagacagtccacaagctcgagcaggagtccggattctatttcaacataaagtactttgaggacgaagtcctcaatgggaattgggatgaggtggagcgctaccttggtggattcaccaaggttgacgataaccgctactccatgaagatattctttgagatccggaagcagaagtatctggaggctcttgataagcatgatcggtcaaaggctgttgaaatcttggtcaaggaccttaaggtctttgcatccttcaatgaggagttgttcaaggagatcacacagcttctaaccttggagaattttagggaaaatgagcagctctcgaagtatggtgatacaaaatctgcaagacaaataatgcttgctgagctgaagaagctgattgaagctaatcccttgttccgtgacaaactacaatttcccagcctgaagacttctaggttgcggacacttattaaccagagcttaaactggcagcaccagctttgcaagaaccctagacctaatcctgacatcaagaccctttttgttgatcattcatgtggacaaccgaatggtgcacgtgctccatcaccagcaaacagtccgttacttggatctatgcccaaacctggaggtttccctccattgggtgctcatggaccttttcaacctgcaccaacacctgtcccacctctggctgggtggatgtcaaaccctccagcaataacacatcctgctgtgtctggtggtgccattggatttggcactccaacaaatcctgccgttttgttgaagcatcctagaacacccacaactggtaatcctggtatggattatccatcaggagattctgaccacatttccaagagaactagaccggttggcatgtctgaggagatgaatcttccggtgaacatgctgcctgtgacttatccacagagccataattaccaacaagatgatttccacaaagctgttgcacggaccttgagccaaggatcagcacctatgagcatggatttccatccacttcaacaaactcttcttcttgttggtaccaatgttggcgacattggattgtgggatgttggtaccaaagagagactcgttgtaagaaacttcaaagtctgggaccttggtaaatgtacaatgaccctacaggcagcactggttaaggacccagctgtgtcagttaatcgcataatatggagtcctgatggaaccttgtttggtgttgcttattcaaggcatattgtacagatttattcctataacggtggcgatgatattagacaacacttggagattgatgcacatgttggtggtgtaaatgacatagcatttgctcatccaaataagcagctatgtataattacatgtggagatgataagacaattaaggtatgggaggccactagtggagctaagcaatttacctttgaaggacatgaagctcctgtttattctgtgtgtccacattacaaggaaaatattcagttcatcttctcaactgctttagatgggaagatcaaggcatggctatatgataatttgggatctagagttgactatgatgcaccaggtcattggtgcactacaatggcatatagtgcagatggttcaaggttattttcatgtgggactagcaaggatggtgaatcacatctagtagaatggaatgaaagtgaaggagcagtgaagagaacatatcagggattccgtaagcgatctatgggtgttgtgcaattcgataccacccggaacaggtttttggccgcgggggacgaattcatgattaagatatgggacatggacagcacgggtcttctgactaccattgatgctgatggtggcttaactgcaagtccacggatacgcttcaacaaggagggaactctattggctgtctccactgctgacaatggtatcaagatcttagcaaatgctgatggacttcggttgctgcgcacactggaaaatcgttcttttgatgcttctcgtaatgcatctgaggctgtaacaaagcctctaataaatcccttgactgctgcggcaaatgcagctgcagcaagcagttcaggagctggtgctccgtcagctataactgcaatgaatggtgatagcagaagtttggttgatgtaaaacctagaatagctgatgagtcacttgacaagtcaaaggtatggaagcttatggagataactgagtcaagtcagtgcagatcaatcaaactggcggataacatgagaacaagcaagatttcgagattgatttacacaaactctggtcttgctatcttggctttaacttcaagcgctgttcatctactctggaaatggccacgcagtgatcggaattctggaaaggcaaccgcaagtgtatctcccactctatggcaaccaccaagtggcatcttgatgactaatgacacgactgacaataatcctgaagaagctgttcactgctttgctttgtcgaagaatgattcatatgtcatgtctgcttctggaggaaaaatctctctgttcaacatgatgactttcaagacaatgacaacgtttatgcctgcaccgccggcagcaacttttcttgcatttcatccccaagataacaacataattgcaattggaatggatgactcaaccatccaaatctataatgtccgaattgatgaggtcaaaagcaagctcagaggtcactctaagagaatcacaggtcttgccttttcaaatgtgctaaatgttttagtctcgtcaggagctgatgcccagttatgtgtttggaacacggatggatgggagaagcaaaagaacagatttttgcagataccatcaggtcgccaatccaatatcttggacactcgtgttcagttccaccaagatcaaatgcactttcttgttgtgcatgaaacccagattgccatctatgaaactacaaaactagaaccagtgaagcagtggcctgttcgagagaattcacctccaatcacacatgccacattctcgtgtgatagtcaactgatctatgcaagctttatggatgccactgttggcatatttaatgggtcgagtttgagacttcaatgtcggattcttccagcttcgtatcttcctccaaatatcagtccgagcgttcatcctgttgtggttgcggcacacccttcggaagcaagccagtttgctctagggctgactgatggtggtgtttttgtgttggaacctttggaatcggagagaaaatggggaaatcctccaccagtagagaatgggtctgctagcaacttgtccacaccgcctcctaatggagcttcaagttctgaccaaccagaaagatgattaagaagttggaactggtagatttttcgtggcacgagtctaaccaagaagacagggcttcaaagggtggtgcgactaaccttggcagataggttccaagggagccggacaatgcgctcaataaaaataagttcaacagaagtttgtccgttgcttgtataaatatttgtattgactatcgagtgaggagtcctagtatttcatttttgctttgtttgcggtgctgtgaaaaggatcagtagataagctgtagtacaacaactatcagactggctgtacttacctatatttatgactattagttaatgtatgttgtttcatttgcctttttggctccgttcagccgtttttgctatcataaagtgctgtttctgaactcgcattagcattgtgcgcctcttttgatgaacgaggctcaac

SEQ ID NO: 7029 - DNA, 4229 bp, Zea Mays
cgaacagtttatactccccaacctggttcgatagtgatttcatcttcctctaccaggcggctccgtggtccgtgctgatcaactgcatcaaggatcgtcgccggcggcgcgctggcagcagttcgcacggcgagatcggattgatcgagatcttctaggcctggacctgcgctagacctcgaagcctcgatcgcaccgcatcttctctctctgctgctggtccgctccgtcgccgccgaccccgccgccagcttccccttccacctaaaaggacgacctctggccgcccttgtcccgccccgacgcctcggtttccactgcataggcgtggtgcggcgatccgtccgggcctagggttgcgagagacactatagggtacgaccctaggagcatccgcctccacgtgggtgaggcggaagagggaggatgacatcgctcagccgtgagctggtcttcctcatcctgcagttcctcgatgaggaaaaattcaaagagacagtccacaagctcgagcaggagtccggattctatttcaacataaagtactttgaggacgaagtcctcaatgggaattgggatgaggtggagcgctaccttggtggattcaccaaggttgacgataaccgctactccatgaagatattctttgagatccggaagcagaagtatctggaggctcttgataagcatgatcggtcaaaggctgttgaaatcttggtcaaggaccttaaggtctttgcatccttcaatgaggagttgttcaaggagatcacacagcttctaaccttggagaattttagggaaaatgagcagctctcgaagtatggtgatacaaaatctgcaagacaaataatgcttgctgagctgaagaagctgattgaagctaatcccttgttccgtgacaaactacaatttcccagcctgaagacttctaggttgcggacacttattaaccagagcttaaactggcagcaccagctttgcaagaaccctagacctaatcctgacatcaagaccctttttgttgatcattcatgtggacaaccgaatggtgcacgtgctccatcaccagcaaacagtccgttacttggatctatgcccaaacctggaggtttccctccattgggtgctcatggaccttttcaacctgcaccaacacctgtcccacctctggctgggtggatgtcaaaccctccagcaataacacatcctgctgtgtctggtggtgccattggatttggcactccaacaaatcctgccgttttgttgaagcatcctagaacacccacaactggtaatcctggtatggattatccatcaggagattctgaccacatttccaagagaactagaccggttggcatgtctgaggagatgaatcttccggtgaacatgctgcctgtgacttatccacagagccataattaccaacaagatgatttccacaaagctgttgcacggaccttgagccaaggatcagcacctatgagcatggatttccatccacttcaacaaactcttcttcttgttggtaccaatgttggcgacattggattgtgggatgttggtaccaaagagagactcgttgtaagaaacttcaaagtctgggaccttggtaaatgtacaatgaccctacaggcagcactggttaaggacccagctgtgtcagttaatcgcataatatggagtcctgatggaaccttgtttggtgttgcttattcaaggcatattgtacagatttattcctataacggtggcgatgatattagacaacacttggagattgatgcacatgttggtggtgtaaatgacatagcatttgctcatccaaataagcagctatgtataattacatgtggagatgataagacaattaaggtatgggaggccactagtggagctaagcaatttacctttgaaggacatgaagctcctgtttattctgtgtgtccacattacaaggaaaatattcagttcatcttctcaactgctttagatgggaagatcaaggcatggctatatgataatttgggatctagagttgactatgatgcaccaggtcattggtgcactacaatggcatatagtgcagatggttcaaggttattttcatgtgggactagcaaggatggtgaatcacatctagtagaatggaatgaaagtgaaggagcagtgaagagaacatatcagggattccgtaagcgatctatgggtgttgtgcaattcgataccacccggaacaggtttttggccgcgggggacgaattcatgattaagatatgggacatggacagcacgggtcttctgactaccattgatgctgatggtggcttaactgcaagtccacggatacgcttcaacaaggagggaactctattggctgtctccactgctgacaatggtatcaagatcttagcaaatgctgatggacttcggttgctgcgcacactggaaaatcgttcttttgatgcttctcgtaatgcatctgaggctgtaacaaagcctctaataaatcccttgactgctgcggcaaatgcagctgcagcaagcagttcaggagctggtgctccgtcagctataactgcaatgaatggtgatagcagaagtttggttgatgtaaaacctagaatagctgatgagtcacttgacaagtcaaaggtatggaagcttatggagataactgagtcaagtcagtgcagatcaatcaaactggcggataacatgagaacaagcaagatttcgagattgatttacacaaactctggtcttgctatcttggctttaacttcaagcgctgttcatctactctggaaatggccacgcagtgatcggaattctggaaaggcaaccgcaagtgtatctcccactctatggcaaccaccaagtggcatcttgatgactaatgacacgactgacaataatcctgaagaagctgttcactgctttgctttgtcgaagaatgattcatatgtcatgtctgcttctggaggaaaaatctctctgttcaacatgatgactttcaagacaatgacaacgtttatgcctgcaccgccggcagcaacttttcttgcatttcatccccaagataacaacataattgcaattggaatggatgactcaaccatccaaatctataatgtccgaattgatgaggtcaaaagcaagctcagaggtcactctaagagaatcacaggtcttgccttttcaaatgtgctaaatgttttagtctcgtcaggagctgatgcccagttatgtgtttggaacacggatggatgggagaagcaaaagaacagatttttgcagataccatcaggtcgccaatccaatatcttggacactcgtgttcagttccaccaagatcaaatgcactttcttgttgtgcatgaaacccagattgccatctatgaaactacaaaactagaaccagtgaagcagtggcctgttcgagagaattcacctccaatcacacatgccacattctcgtgtgatagtcaactgatctatgcaagctttatggatgccactgttggcatatttaatgggtcgagtttgagacttcaatgtcggattcttccagcttcgtatcttcctccaaatatcagtccgagcgttcatcctgttgtggttgcggcacacccttcggaagcaagccagtttgctctagggctgactgatggtggtgtttttgtgttggaacctttggaatcggagagaaaatggggaaatcctccaccagtagagaatgggtctgctagcaacttgtccacaccgcctcctaatggagcttcaagttctgaccaaccagaaagatgattaagaagttggaactggtagatttttcgtggcacgagtctaaccaagaagggcttcaaagggtggtgcgactaaccttggcagataggttccaagggagccggacaatgcgctcaataaaaataagttcaacagaagtttgtccgttgcttgtataaatatttgtattgactatcgagtgaggagtcctagtatttcatttttgctttgtttgcggtgctgtgaaaaggatcagtagataagctgtagtacaacaactatcagactggctgtacttacctatatttatgactattagttaatgtatgttgtttcatttgcctttttggctccgttcagccgtttttgctatcataaagtgctgtttctgaactcgcattagcattgtgcgcctcttttgatgaacgaggctcaac

SEQ ID NO: 7030 - DNA, 1526 bp, Zea Mays
gctggttttgcagcccgggcggctggaccggaccggaggccccgacgggaggtgaaggcatcgggaaatgtgttcgggaactacttccaggttgcaacctatggcgaatcccatggagggggtgttggttgcgttatcagtggctgcccacccagaattcctctcactgaggcagacatgcaagtagaactcgatagaagacgtccgggtcaaagtagaattacaaccccaagaaaggagactgatacatgcaaaattctatcagggacacatgatgggatgactactggtacaccaattcacgtctttgtcccaaacacagatcaaaggggtggtgattacagtgaaatgtctaaggcgtacagaccatcccatgcagatgcaacctatgacttcaagtatggagttagagctgtgcagggaggtggaaggtcatcagccagagaaaccattggcagggtggctgcaggagctcttgcaaagaaaattctaaagctcaaatcaggagtggagatcttggcatttgtttctaaagtgcaccaagtcgtacttccagaagatgcagttgattatgagactgtaaccttggaacatatagagagcaacatcgttagatgtcctgatccagaatatgcagagaagatgattgctgccattgatacggtacgagttagaggagattcaattggtggggtcgtcacatgcattgcaagaaatgttcctcgtggtcttggctctcctgtttttgacaaacttgaagctgaactggcaaaagccatgctttctcttcctgcaagcaaggggtttgagattggcagtgggttcgctggtacggactttactggaagtgagcataatgatgagttctatatggatgaggctggaaatgtgaggacacgaactaatcgctcaggcggtgttcagggagggatatcaaatggtgaaattatttacttcaaagtggcttttaagccaacagcaactatcggaaagaagcaaaatactgtgtcaagggagcatgaggatgttgaacttttggcaagggggcgccatgacccctgtgttgtccctcgagctgttcctatggtggaatccatggctgcgctggtcctgatggaccagctcatggcgcatattgcccagtgtgagatgtttccgctgaaccttgccctacaagagcccattggctctgctagcagtgcatctgaactgtcaccaaacctatcataatgtttgtcgtggaacatgtcccagctttccttctatcgaaattctggtctttgctaagcagtttgcaattcggaacccccataaaccctcgactattgtacctagagataaagtgaacggatatcaagatagaaatgcattaatgtttttgtgatgtgtagtataactgatatttaccccttttctttttttgagagaggacgcatgatgtcgtttgagcaataaagtttaatttgggagagataacagtgtcttcatatgatcagcacttgaacggtctatataaaggaattctg

SEQ ID NO: 7031 - DNA, 1701 bp, Zea Mays
cgcaaccctccattataacgcccaaaatacaggcggaaaagcaagaagcgtgaccacttccttatcgtctcctcctttcctcccctcaactccaatcgaatcgctcgaaccattcccaggtttgtgcgtcgatctaggcttgcgcgaggatccaattgcatcccgctcccctttgagcttgtgatcttgggagccggagttcttcgcgagcctcctcccacccccacccccaccccaccccccgatttcttttggtttatttgtgcgagttttctcaagagcagaaaaggctgtttgcaattccggtgcactcaggcctcaagatccaactctgaggcctttcccgcgctatccgcatcgatctacgcaagaggatgggcaacgcgggtagcaacggtggaggcgctgccgctggtcaccgccgtcggagctccggccacggccaccaccaccaggcgccgccgcctcaccagccgcaggagactgcggccaaccgctacgtgttcgcggccgccacgccgtacccgccccagtaccctaaccccaacccgccgcagtactacccgcagtacgggaactactacccaccaccaccaccatccgtgccggtgccccttccggcgccgtacgaccaccaccacaggccacccaccgccgcccccggcgagttcccgcccccgcccctcacccacccccaccactaccctggctgggctgggcggtatccctcctacggacaacatctgcctatgcccactccctacgttgagcaccagaaggccgtcactatccgcaacgacgtcaaccttaagaaggagacgcttaggatcgagcctgatgaagagtgccctggccacttcctcgttgccttcacctttgacgccacggtcgctggcagcatgactgtttacttgtttgcaaaggaagagctcaactgcaatctaacagcagtgaaagaagacctaatgaagcccgttactgttagcttcaaagagggtcttggtcaaaaattcaggcaaccttcaggaacaggaattgacttttcagtgtttgaagaatcagatttattaaagcagggggacatggatgtatatccacttgcagttaaagctgaaacaacattgcttgttgatcacccaccagaaggggatgaccaaaagatgaaaactcctaactcacagatcacccaggccgtgtttgaaaagaaagaaaatggggattatcatgtaagagttgtttgccagatcctttgggtcaatggaactaggtatgaactgcaagaaatatatggcatagggaactccgtggaaggtgatgctgatgcaaatgatccagggaaagaatgtgttatttgcctctcagaaccaagggatactactgtcctcccatgtaggcatatgtgcatgtgcagtgagtgcgccaaggtcctgaggtaccaaaccactcggtgccccatctgcaggcagcctgttgagcgtctcctcgagatcaaagtgaacaacaaatctgaagatcagcaacagatgccccaatcgccaccgctcccagcactggatccgcagcaggaagaggtgtagccatgatcaaagtcagttctgaaacattatatggctctcgtttgcggaccttcaggccttccctaaaggttttgaatatattatcctctttctctttgctgatgagaagtcaacaagcttgctt

SEQ ID NO: 7032 - DNA, 2789 bp, Zea Mays
ctccgttcacctctccccacttcctacatttgaatggactagtcaggcagccaaagtggggccacctaagggatgtgcacaaggccataaagctctgcgaaccagcgctcatagcaactgatccgtcatacacttctctaggtccaaatgttgaggcagcagtatacaaagttggttcagtttgcgcagcattccttgccaacatagatggtcaatctgataaaaccgtcaccttcaatgggaagatgtacaggcttcccgcctggtctgtcagcatccttcctgactgcaagaatgtggtacttaatacagctcagatcaattctcaaacgacaggttcagaaatgagatacttggagtcgagcaacgtcgcatcagatggctcatttgtcacgccagaactggcagtatctgactggagctacgccatagagcctgtaggtatcacaaaggacaatgcacttacaaaggctggactgatggagcagataaacaccacagcagatgccagtgatttcctctggtactcaacaaggtacatgccttattgcaattatgcatatggtaacgtgcactaataaaacaattatttgctcaccgtttgtgctaataatggtgcagcatcacagttaaaggtgatgaaccctatctaaatggcagccagtctaatctggcagtcaactcacttggacatgttcttcaggtctacatcaatggtaaaattgcaggaagtgcacaaggtagtgcaagcagctcactcatctcatggcagaaaccaattgaacttgtacctgggaagaacaaaatagatcttctaagtgcaacagttgggctgtcgaattatggtgcattctttgacctggtaggtgctggaattactggcccagtaaaactgagtggactaaacggtgcgctcgatctgtcttctgcagaatggacatatcagattggactcagaggagaagatttgcacctatatgatccttcagaagcttcaccagaatgggtctcagccaatgcttatccaatcaatcatccactgatttggtacaaggtgatgatcctgtcgcgattgacttcacgggaatggggaaaggtgaagcatgggtgaatggacagagcattggtcgatactggccaacaaatctggctccacagagcggttgcgtcaactcttgcaactatagaggagcctacagttcaagcaaatgcctcaagaagtgtggccagccatcacagactttgtaccatgttccccgttcgtttctccaaccaggcagcaatgatctagtccttttcgagcattttggtggtgacccaagcaagatatcctttgtgatgaggcagacaggaagtgtgtgcgcacaagtatcagaggcacatccagcccaaattgatagttggagttctcaacagccgatgcagagatatggacctgcacttcgcctggaatgcccaaaagaaggccaggtcatcagcagcgtcaagtttgcaagctttgggacaccgagtggcacatgtggaagctacagccatggcgaatgcagcagcactcaggctctctcaattgttcaggaggcttgcatcggagtgagcagctgcagcgtgccagtgtcgtcgaattattttggaaatccatgtacaggggtcacaaaaagccttgcagttgaagctgcatgctcgtgacatgtctgattaatattggttcataggaagcaaatcacctaggacaaggtgaaaccttctctgtaggcaagcaggcaaaaaggaataaatgttcccatcctgatcaaaaggaataaaaatattctgaaaattgccacatccaagctattagatggtatgcttaggaagtattgttattgttaagatataaatccatccatcatgacaaagaaggtgatctttttgtaatccttcttgaaaaaatagaatgatttgaatttcgacaagttaactatacatccttgccaaaaaaaattgaattacacttctcaacgaatggacagttttgtcataccaagagacatctggaatcctgaagagcaagcaacgttgggagtccgcactactttgtaccgcagaaaaaaattaatacctcactaaaacctccaggttgcatgatctctttagcataatggttcagcttgcagttgtttcagcttccatcctccaggtggcttacctctaggggcagcccacttggaagttggaaatttggaatggaaagactttcaccacgatgatattgtagggcatgtcacaacgatgagcattcattttcatcttgctacaaagctcaatgatagaagaacaccaattggcaagaaaaattcaatgggattgaaccaacaagagatcaaggacatcataatacattcaacttgtttacaccaaaggaatccaggacaatagttttaaacaaacatggaaaactgcagtcaatattaactggaaatgggtcaaaagtggtatgtcaatataaagtgggcaaatattgattcacagctcattcaaaagaaagcagcaatcagcaacaagcaataacagaacatgtccactcatgatctagaggctttgtgtgcaatggacagctgtaaaaaatgccatctctgaacaataaaaattagcaaggtacatcttgtaacacagctacaaccaaaaattcactttcctaatctcacaccaagcgcatcaaaaggaacacattgccaagacagagatagagaagcacaatagactgtcaacttgcataatcatcgacatcaacatagccttttggttccaag

SEQ ID NO: 7033 - DNA, 2726 bp, Zea Mays
cttcgacatgcatgtatggttccttcgacactgctgcagcagtgttatgacactttcaggactagtcaggcagccaaagtggggccacctaagggatgtgcacaaggccataaagctctgcgaaccagcgctcatagcaactgatccgtcatacacttctctaggtccaaatgttgaggcagcagtatacaaagttggttcagtttgcgcagcattccttgccaacatagatggtcaatctgataaaaccgtcaccttcaatgggaagatgtacaggcttcccgcctggtctgtcagcatccttcctgactgcaagaatgtggtacttaatacagctcagatcaattctcaaacgacaggttcagaaatgagatacttggagtcgagcaacgtcgcatcagatggctcatttgtcacgccagaactggcagtatctgactggagctacgccatagagcctgtaggtatcacaaaggacaatgcacttacaaaggctggactgatggagcagataaacaccacagcagatgccagtgatttcctctggtactcaacaagcatcacagttaaaggtgatgaaccctatctaaatggcagccagtctaatctggcagtcaactcacttggacatgttcttcaggtctacatcaatggtaaaattgcaggaagtgcacaaggtagtgcaagcagctcactcatctcatggcagaaaccaattgaacttgtacctgggaagaacaaaatagatcttctaagtgcaacagttgggctgtcgaattatggtgcattctttgacctggtaggtgctggaattactggcccagtaaaactgagtggactaaacggtgcgctcgatctgtcttctgcagaatggacatatcagattggactcagaggagaagatttgcacctatatgatccttcagaagcttcaccagaatgggtctcagccaatgcttatccaatcaatcatccactgatttggtacaaggtgatgatcctgtcgcgattgacttcacgggaatggggaaaggtgaagcatgggtgaatggacagagcattggtcgatactggccaacaaatctggctccacagagcggttgcgtcaactcttgcaactatagaggagcctacagttcaagcaaatgcctcaagaagtgtggccagccatcacagactttgtaccatgttccccgttcgtttctccaaccaggcagcaatgatctagtccttttcgagcattttggtggtgacccaagcaagatatcctttgtgatgaggcagacaggaagtgtgtgcgcacaagtatcagaggcacatccagcccaaattgatagttggagttctcaacagccgatgcagagatatggacctgcacttcgcctggaatgcccaaaagaaggccaggtcatcagcagcgtcaagtttgcaagctttgggacaccgagtggcacatgtggaagctacagccatggcgaatgcagcagcactcaggctctctcaattgttcaggaggcttgcatcggagtgagcagctgcagcgtgccagtgtcgtcgaattattttggaaatccatgtacaggggtcacaaaaagccttgcagttgaagctgcatgctcgtgacatgtctgattaatattggttcataggaagcaaatcacctaggacaaggtgaaaccttctctgtaggcaagcaggcaaaaaggaataaatgttcccatcctgatcaaaaggaataaaaatattctgaaaattgccacatccaagctattagatggtatgcttaggaagtattgttattgttaagatataaatccatccatcatgacaaagaaggtgatctttttgtaatccttcttgaaaaaatagaatgatttgaatttcgacaagttaactatacatccttgccaaaaaaaattgaattacacttctcaacgaatggacagttttgtcataccaagagacatctggaatcctgaagagcaagcaacgttgggagtccgcactactttgtaccgcagaaaaaaattaatacctcactaaaacctccaggttgcatgatctctttagcataatggttcagcttgcagttgtttcagcttccatcctccaggtggcttacctctaggggcagcccacttggaagttggaaatttggaatggaaagactttcaccacgatgatattgtagggcatgtcacaacgatgagcattcattttcatcttgctacaaagctcaatgatagaagaacaccaattggcaagaaaaattcaatgggattgaaccaacaagagatcaaggacatcataatacattcaacttgtttacaccaaaggaatccaggacaatagttttaaacaaacatggaaaactgcagtcaatattaactggaaatgggtcaaaagtggtatgtcaatataaagtgggcaaatattgattcacagctcattcaaaagaaagcagcaatcagcaacaagcaataacagaacatgtccactcatgatctagaggctttgtgtgcaatggacagctgtaaaaaatgccatctctgaacaataaaaattagcaaggtacatcttgtaacacagctacaaccaaaaattcactttcctaatctcacaccaagcgcatcaaaaggaacacattgccaagacagagatagagaagcacaatagactgtcaacttgcataatcatcgacatcaacatagccttttggttccaag

SEQ ID NO: 7034 - DNA, 2771 bp, Zea Mays
ccttcgacatgcatgtatggttccttcgacatgcatgtatggttccttcgacactgctgcagcagtgttatgacactttcaggactagtcaggcagccaaagtggggccacctaagggatgtgcacaaggccataaagctctgcgaaccagcgctcatagcaactgatccgtcatacacttctctaggtccaaatgttgaggcagcagtatacaaagttggttcagtttgcgcagcattccttgccaacatagatggtcaatctgataaaaccgtcaccttcaatgggaagatgtacaggcttcccgcctggtctgtcagcatccttcctgactgcaagaatgtggtacttaatacagctcagatcaattctcaaacgacaggttcagaaatgagatacttggagtcgagcaacgtcgcatcagatggctcatttgtcacgccagaactggcagtatctgactggagctacgccatagagcctgtaggtatcacaaaggacaatgcacttacaaaggctggactgatggagcagataaacaccacagcagatgccagtgatttcctctggtactcaacaagcatcacagttaaaggtgatgaaccctatctaaatggcagccagtctaatctggcagtcaactcacttggacatgttcttcaggtctacatcaatggtaaaattgcaggaagtgcacaaggtagtgcaagcagctcactcatctcatggcagaaaccaattgaacttgtacctgggaagaacaaaatagatcttctaagtgcaacagttgggctgtcgaattatggtgcattctttgacctggtaggtgctggaattactggcccagtaaaactgagtggactaaacggtgcgctcgatctgtcttctgcagaatggacatatcagattggactcagaggagaagatttgcacctatatgatccttcagaagcttcaccagaatgggtctcagccaatgcttatccaatcaatcatccactgatttggtacaagaccaagttcacacctcctgcaggtgatgatcctgtcgcgattgacttcacgggaatggggaaaggtgaagcatgggtgaatggacagagcattggtcgatactggccaacaaatctggctccacagagcggttgcgtcaactcttgcaactatagaggagcctacagttcaagcaaatgcctcaagaagtgtggccagccatcacagactttgtaccatgttccccgttcgtttctccaaccaggcagcaatgatctagtccttttcgagcattttggtggtgacccaagcaagatatcctttgtgatgaggcagacaggaagtgtgtgcgcacaagtatcagaggcacatccagcccaaattgatagttggagttctcaacagccgatgcagagatatggacctgcacttcgcctggaatgcccaaaagaaggccaggtcatcagcagcgtcaagtttgcaagctttgggacaccgagtggcacatgtggaagctacagccatggcgaatgcagcagcactcaggctctctcaattgttcaggaggcttgcatcggagtgagcagctgcagcgtgccagtgtcgtcgaattattttggaaatccatgtacaggggtcacaaaaagccttgcagttgaagctgcatgctcgtgacatgtctgattaatattggttcataggaagcaaatcacctaggacaaggtgaaaccttctctgtaggcaagcaggcaaaaaggaataaatgttcccatcctgatcaaaaggaataaaaatattctgaaaattgccacatccaagctattagatggtatgcttaggaagtattgttattgttaagatataaatccatccatcatgacaaagaaggtgatctttttgtaatccttcttgaaaaaatagaatgatttgaatttcgacaagttaactatacatccttgccaaaaaaaattgaattacacttctcaacgaatggacagttttgtcataccaagagacatctggaatcctgaagagcaagcaacgttgggagtccgcactactttgtaccgcagaaaaaaattaatacctcactaaaacctccaggttgcatgatctctttagcataatggttcagcttgcagttgtttcagcttccatcctccaggtggcttacctctaggggcagcccacttggaagttggaaatttggaatggaaagactttcaccacgatgatattgtagggcatgtcacaacgatgagcattcattttcatcttgctacaaagctcaatgatagaagaacaccaattggcaagaaaaattcaatgggattgaaccaacaagagatcaaggacatcataatacattcaacttgtttacaccaaaggaatccaggacaatagttttaaacaaacatggaaaactgcagtcaatattaactggaaatgggtcaaaagtggtatgtcaatataaagtgggcaaatattgattcacagctcattcaaaagaaagcagcaatcagcaacaagcaataacagaacatgtccactcatgatctagaggctttgtgtgcaatggacagctgtaaaaaatgccatctctgaacaataaaaattagcaaggtacatcttgtaacacagctacaaccaaaaattcactttcctaatctcacaccaagcgcatcaaaaggaacacattgccaagacagagatagagaagcacaatagactgtcaacttgcataatcatcgacatcaacatagccttttggttccaag

SEQ ID NO: 7035 - DNA, 3424 bp, Zea Mays
cttctctgcagtgataccttctcttctccgtcgtctatttactttttcctaaccatctaatcttatgctcctgccatgccatgccatcatcgtctgtcggttacgacttcgagggccgcaaggacctggccgcgttcgtcaagaccgtcgccgacgccggcctgtacgtgcacctccgcatcggaccctacgtctgcgccgagtggaactacggaggcttcccgctgtggctgcacttcatccccggcatcaagttccgcaccgacaacgagcctttcaaggcggagatgcagcgcttcacagccaagatcgagaacgaatacggcaacatcgactcggcgtacggggcgcccggaaaggcgtacatgcggtgggcggccgggatggccgtctcgctcgacaccggcgtgccctgggtcatgtgccagcaggccgacgcgccggaccccctcatcaacacctgcaacggcttctactgcgaccagttcacgcccaactccgccgccaagcccaagatgtggaccgagaactggagcggctggttcctctcgtttggcggcgccgtcccctaccgccccgtcgaggacctggccttcgccgtcgccaggttctaccagcgcggcggcaccttccagaactactacatgtaccatggagggaccaacctcgaccgcagctcgggggggcccttcatcgccaccagttacgactacgatgcccccatcgacgagtacggactagtcaggcagccaaagtggggccacctaagggatgtgcacaaggccataaagctctgcgaaccagcgctcatagcaactgatccgtcatacacttctctaggtccaaatgttgaggcagcagtatacaaagttggttcagtttgcgcagcattccttgccaacatagatggtcaatctgataaaaccgtcaccttcaatgggaagatgtacaggcttcccgcctggtctgtcagcatccttcctgactgcaagaatgtggtacttaatacagctcagatcaattctcaaacgacaggttcagaaatgagatacttggagtcgagcaacgtcgcatcagatggctcatttgtcacgccagaactggcagtatctgactggagctacgccatagagcctgtaggtatcacaaaggacaatgcacttacaaaggctggactgatggagcagataaacaccacagcagatgccagtgatttcctctggtactcaacaagcatcacagttaaaggtgatgaaccctatctaaatggcagccagtctaatctggcagtcaactcacttggacatgttcttcaggtctacatcaatggtaaaattgcaggaagtgcacaaggtagtgcaagcagctcactcatctcatggcagaaaccaattgaacttgtacctgggaagaacaaaatagatcttctaagtgcaacagttgggctgtcgaattatggtgcattctttgacctggtaggtgctggaattactggcccagtaaaactgagtggactaaacggtgcgctcgatctgtcttctgcagaatggacatatcagattggactcagaggagaagatttgcacctatatgatccttcagaagcttcaccagaatgggtctcagccaatgcttatccaatcaatcatccactgatttggtacaagaccaagttcacacctcctgcaggtgatgatcctgtcgcgattgacttcacgggaatggggaaaggtgaagcatgggtgaatggacagagcattggtcgatactggccaacaaatctggctccacagagcggttgcgtcaactcttgcaactatagaggagcctacagttcaagcaaatgcctcaagaagtgtggccagccatcacagactttgtaccatgttccccgttcgtttctccaaccaggcagcaatgatctagtccttttcgagcattttggtggtgacccaagcaagatatcctttgtgatgaggcagacaggaagtgtgtgcgcacaagtatcagaggcacatccagcccaaattgatagttggagttctcaacagccgatgcagagatatggacctgcacttcgcctggaatgcccaaaagaaggccaggtcatcagcagcgtcaagtttgcaagctttgggacaccgagtggcacatgtggaagctacagccatggcgaatgcagcagcactcaggctctctcaattgttcaggaggcttgcatcggagtgagcagctgcagcgtgccagtgtcgtcgaattattttggaaatccatgtacaggggtcacaaaaagccttgcagttgaagctgcatgctcgtgacatgtctgattaatattggttcataggaagcaaatcacctaggacaaggtgaaaccttctctgtaggcaagcaggcaaaaaggaataaatgttcccatcctgatcaaaaggaataaaaatattctgaaaattgccacatccaagctattagatggtatgcttaggaagtattgttattgttaagatataaatccatccatcatgacaaagaaggtgatctttttgtaatccttcttgaaaaaatagaatgatttgaatttcgacaagttaactatacatccttgccaaaaaaaattgaattacacttctcaacgaatggacagttttgtcataccaagagacatctggaatcctgaagagcaagcaacgttgggagtccgcactactttgtaccgcagaaaaaaattaatacctcactaaaacctccaggttgcatgatctctttagcataatggttcagcttgcagttgtttcagcttccatcctccaggtggcttacctctaggggcagcccacttggaagttggaaatttggaatggaaagactttcaccacgatgatattgtagggcatgtcacaacgatgagcattcattttcatcttgctacaaagctcaatgatagaagaacaccaattggcaagaaaaattcaatgggattgaaccaacaagagatcaaggacatcataatacattcaacttgtttacaccaaaggaatccaggacaatagttttaaacaaacatggaaaactgcagtcaatattaactggaaatgggtcaaaagtggtatgtcaatataaagtgggcaaatattgattcacagctcattcaaaagaaagcagcaatcagcaacaagcaataacagaacatgtccactcatgatctagaggctttgtgtgcaatggacagctgtaaaaaatgccatctctgaacaataaaaattagcaaggtacatcttgtaacacagctacaaccaaaaattcactttcctaatctcacaccaagcgcatcaaaaggaacacattgccaagacagagatagagaagcacaatagactgtcaacttgcataatcatcgacatcaacatagccttttggttccaag

SEQ ID NO: 7036 - DNA, 4290 bp, Zea Mays
cgccaccatcaacttcgtactggccgtctccctctcctccatttcttctccttctcgccgcagcagccaagcagacttggccctgctccatccatcccacacagcgccagcatttgctgttgcttgcgagtagcggcggccctctttttgcttgccccccagagggccttattttaaccacggcgcgccgcgcgctggcgcactcaggaggagcataggctgcatagcatccacgacccccatctcccacgcccaccgccacaacacgccgcgcggcaaagaaacaacgccagaaagcgatcggatcggatccggatcggcagcagtcagtgcagtgcatccagagcggcagagccccgtcgtcccgtggccgccaggtcgatcccccagcggccggccggccggccagtccaggccctcccgcgcggggagttttcctttttcttaattttccttcccctggcgtgccgcccccaccacgtagcgagcaactcctccccgcgctcatcgctcactccacctccaggctccagctactactaatacccgggcggtgcgaagctttgcctttaggctttagctagtacaccgaacgcgccaagtcccggaggcggaggcggtgatctttgttcgtttcctcgcctctcctcccctcccctctcctctcctttcattccctgtcccgtgggcggcaatggcgggcaccgcgcggattcttcctgccgccgcggcggcgctgctgctgctgctctgcatcgcgggcggcgcgcgggcggccaacgtgacgtacgaccaccgcgcgctggtcatcgacggcgtgcggcgcgtgctcgtctccggctccatccactatccgcggagcacacccgacatgtggccggggctgatccagaaggccaaggacggcggtctggacgtcatcgagacctacgtcttctgggacatccacgagcccgtgaggggacagtacgacttcgagggccgcaaggacctggccgcgttcgtcaagaccgtcgccgacgccggcctgtacgtgcacctccgcatcggaccctacgtctgcgccgagtggaactacggaggcttcccgctgtggctgcacttcatccccggcatcaagttccgcaccgacaacgagcctttcaaggcggagatgcagcgcttcacagccaagatcgagaacgaatacggcaacatcgactcggcgtacggggcgcccggaaaggcgtacatgcggtgggcggccgggatggccgtctcgctcgacaccggcgtgccctgggtcatgtgccagcaggccgacgcgccggaccccctcatcaacacctgcaacggcttctactgcgaccagttcacgcccaactccgccgccaagcccaagatgtggaccgagaactggagcggctggttcctctcgtttggcggcgccgtcccctaccgccccgtcgaggacctggccttcgccgtcgccaggttctaccagcgcggcggcaccttccagaactactacatgtaccatggagggaccaacctcgaccgcagctcgggggggcccttcatcgccaccagttacgactacgatgcccccatcgacgagtacggactagtcaggcagccaaagtggggccacctaagggatgtgcacaaggccataaagctctgcgaaccagcgctcatagcaactgatccgtcatacacttctctaggtccaaatgttgaggcagcagtatacaaagttggttcagtttgcgcagcattccttgccaacatagatggtcaatctgataaaaccgtcaccttcaatgggaagatgtacaggcttcccgcctggtctgtcagcatccttcctgactgcaagaatgtggtacttaatacagctcagatcaattctcaaacgacaggttcagaaatgagatacttggagtcgagcaacgtcgcatcagatggctcatttgtcacgccagaactggcagtatctgactggagctacgccatagagcctgtaggtatcacaaaggacaatgcacttacaaaggctggactgatggagcagataaacaccacagcagatgccagtgatttcctctggtactcaacaagcatcacagttaaaggtgatgaaccctatctaaatggcagccagtctaatctggcagtcaactcacttggacatgttcttcaggtctacatcaatggtaaaattgcaggaagtgcacaaggtagtgcaagcagctcactcatctcatggcagaaaccaattgaacttgtacctgggaagaacaaaatagatcttctaagtgcaacagttgggctgtcgaattatggtgcattctttgacctggtaggtgctggaattactggcccagtaaaactgagtggactaaacggtgcgctcgatctgtcttctgcagaatggacatatcagattggactcagaggagaagatttgcacctatatgatccttcagaagcttcaccagaatgggtctcagccaatgcttatccaatcaatcatccactgatttggtacaagaccaagttcacacctcctgcaggtgatgatcctgtcgcgattgacttcacgggaatggggaaaggtgaagcatgggtgaatggacagagcattggtcgatactggccaacaaatctggctccacagagcggttgcgtcaactcttgcaactatagaggagcctacagttcaagcaaatgcctcaagaagtgtggccagccatcacagactttgtaccatgttccccgttcgtttctccaaccaggcagcaatgatctagtccttttcgagcattttggtggtgacccaagcaagatatcctttgtgatgaggcagacaggaagtgtgtgcgcacaagtatcagaggcacatccagcccaaattgatagttggagttctcaacagccgatgcagagatatggacctgcacttcgcctggaatgcccaaaagaaggccaggtcatcagcagcgtcaagtttgcaagctttgggacaccgagtggcacatgtggaagctacagccatggcgaatgcagcagcactcaggctctctcaattgttcaggaggcttgcatcggagtgagcagctgcagcgtgccagtgtcgtcgaattattttggaaatccatgtacaggggtcacaaaaagccttgcagttgaagctgcatgctcgtgacatgtctgattaatattggttcataggaagcaaatcacctaggacaaggtgaaaccttctctgtaggcaagcaggcaaaaaggaataaatgttcccatcctgatcaaaaggaataaaaatattctgaaaattgccacatccaagctattagatggtatgcttaggaagtattgttattgttaagatataaatccatccatcatgacaaagaaggtgatctttttgtaatccttcttgaaaaaatagaatgatttgaatttcgacaagttaactatacatccttgccaaaaaaaattgaattacacttctcaacgaatggacagttttgtcataccaagagacatctggaatcctgaagagcaagcaacgttgggagtccgcactactttgtaccgcagaaaaaaattaatacctcactaaaacctccaggttgcatgatctctttagcataatggttcagcttgcagttgtttcagcttccatcctccaggtggcttacctctaggggcagcccacttggaagttggaaatttggaatggaaagactttcaccacgatgatattgtagggcatgtcacaacgatgagcattcattttcatcttgctacaaagctcaatgatagaagaacaccaattggcaagaaaaattcaatgggattgaaccaacaagagatcaaggacatcataatacattcaacttgtttacaccaaaggaatccaggacaatagttttaaacaaacatggaaaactgcagtcaatattaactggaaatgggtcaaaagtggtatgtcaatataaagtgggcaaatattgattcacagctcattcaaaagaaagcagcaatcagcaacaagcaataacagaacatgtccactcatgatctagaggctttgtgtgcaatggacagctgtaaaaaatgccatctctgaacaataaaaattagcaaggtacatcttgtaacacagctacaaccaaaaattcactttcctaatctcacaccaagcgcatcaaaaggaacacattgccaagacagagatagagaagcacaatagactgtcaacttgcataatcatcgacatcaacatagccttttggttccaag

SEQ ID NO: 7037 - DNA, 1414 bp, Zea Mays
cttcaatctcctgagaatcaaagacaatggaggtgcattcgtttaatggaggatctctaagatggagggcaacttgagtctaagatattcaggtattgctagagatgttgggtcatgatctagcaaccgatccctctagtactttgcgtatggttacctcaagggtatcaagtgcaccgttggggcttgtctgttcgttgagttttgacaggggattcaaggaaaagaacaatatcttcatcaacgtggatagatgcatgaagtacagtactttctgttatgcacccagaaatcccaatatcacaccactggcaactgcatcgtttggggacatggctgattcttcaatttttacctttcccagaatccatgtgaaggatccatatcagcgcctcggaatcagcagggaagcatcggaagaagaaattcgggctgctaggatttatctgataagcaagtatggaggccatagtcaagcgctgatgcaattgagtgtgcccatgataggattatcatgcagagtttctttgataggaaaaaaaccaaaaacgaacctcaagaaaaaaattagagaacttagtcagtcacgtgccgtgaaggctattcaaggcagatttcaaacaccacgtagcaaagtcatttggcagacagctattacttttgtcttgcttggagtgcttacccttgctttccctactgaagaagggccaaccctccaggtggccatctcttgtgcagcaaatatctatttcatttatcagagggtcaaaagtggatggcgagcattcttttatgggcttggttctttctttgcttccttgttcctgggcaccttcttgatggtatccctaattcctcctgtactccccggcccaagaaacttggaagtgagcaccgcgtgtgttacttacgtgctccttttcgtatcgccgacattcttgaagagttgtgtggaggcctgtcaacttgcttccgaatagatcatgtatcgtaatatccatgctgaagtcatcggtcgtcttttggatggacatcacgtcacctcgggacattacaacccgtcctccctgaatgctgcggctgaactgtactgatcgcgtttgcaagacaggaactggagggatttcttagggttgctacgcctgatctgatcttggcatcgctcgagttgttgcgctggctttgtcgtctcgtaaaacaatgtgcagcccaccagtgcatcggtgactggcgcatcatcatctgtctcggctatccatccattatctaaggagcgtggaagtccgtgacccagggccactagtggatcaattactgtactggggctggcttctgtcattttggactattaaatagcctgatccggcctctacataagatcactattctacttattagactatagcacatcaat

SEQ ID NO: 7038 - DNA, 1676 bp, Zea Mays
cggatgttaagtcttcaatctcctgagaatcaaagacaatggaggtgcattcgtttaatggaggatctctaagatggagggcaacttgagtctaagatattcaggtattgctagagatgttgggtcatgatctagcaaccgatccctctagtactttgcgtatggttacctcaagggtatcaagtgcaccgttggggcttgtctgttcgttgagttttgacaggggattcaaggaaaagaacaatatcttcatcaacgtggatagatgcatgaagtacagtactttctgttatgcacccagaaatcccaatatcacaccactggcaactgcatcgtttggggacatggctgattcttcaatttttacctttcccagaatccatgtgaaggatccatatcagcgcctcggaatcagcagggaagcatcggaagaagaaattcgggctgctaggatttatctgataagcaagtatggaggccatagtcaagcgctgatgcaattgagtgtgcccatgataggattatcatgcagagtttctttgataggaaaaaaaccaaaaacgaacctcaagaaaaaaattagagaacttagtcagtcacgtgccgtgaaggctattcaaggcagatttcaaacaccacgtagcaaagtcatttggcagacagctattacttttgtcttgcttggagtgcttacccttgctttccctactgaagaagggccaaccctccaggtggccatctcttgtgcagcaaatatctatttcatttatcagagggtcaaaagtggatggcgagcattcttttatgggcttggttctttctttgcttccttgttcctgggcaccttcttgatggtatccctaattcctcctgtactccccggcccaagaaacttggaagtgagcaccgcgtgtgttacttacgtgctccttttcgtatcgccgacattcttgaagtaagagatctccgtgcttccttccatgttagcccaaagtcttgcagaagttataatcatggtatcctgcttcaaatagcttgtacaatccatcagctttttgtttgtttgtttcacgttcgtggagttggaaatggtagcccctcggtgagttgatagtagttttcaggttgccatgtgatatgtagaactttttttttgcccttggaccgtgaggtcttaagcacaaagagtaacacctctctcgtaggagttgtgtggaggcctgtcaacttgcttccgaatagatcatgtatcgtaatatccatgctgaagtcatcggtcgtcttttggatggacatcacgtcacctcgggacattacaacccgtcctccctgaatgctgcggctgaactgtactgatcgcgtttgcaagacaggaactggagggatttcttagggttgctacgcctgatctgatcttggcatcgctcgagttgttgcgctggctttgtcgtctcgtaaaacaatgtgcagcccaccagtgcatcggtgactggcgcatcatcatctgtctcggctatccatccattatctaaggagcgtggaagtccgtgacccagggccactagtggatcaattactgtactggggctggcttctgtcattttggactattaaatagcctgatccggcctctacataagatcactattctacttattagactatagcacatcaat

SEQ ID NO: 7039 - DNA, 811 bp, Zea Mays
gcacgcggcacgaccgtcacggtacggcgtgggcaagaggatcaggcttccctacaccagaaagatcatcgacgccatccactccggcgagctcctcaccgccaactaccagaagaccgaggtgtttggcctggagatccccactgagatcaacggcgtgccgtcggaaatcctcgacccgatcaacacctggacggacaaggccgcgtacaaggagaatctcctgaggctcggcgggctcttcaagaagaacttcgaggtgttcgccagctacaagatcggggacgacagcagcctgactgacgagatcctcgccgcaggccccaacttctgaactaaagcaatggatccggatgaataaaacgatggcgtgcgtgcgtgggtgcgtgtgaagatgattacgacgacgacgacgaaaaaaaaggtgttggatcgatgagccaacatagtaatagattagctgggtattgtcatgggtgcgtctggtgttgttatctataaggctgtctgcctgtctcaagcagctatcatattctatttcaaattctattctgtaagcgtgtagttcaaaacaatgctttacacaaccatatgcacagtctatctaaggttggtctgttctatcagcttgttgggaaaagtttgcgtgtgcttgtatcttgccccctgtactctctctggtttctgaatttgaatacgaaacagcttgatcgcaatcaccattggttcggtgtgtgtgtgtgtgtgtcatggcaggagagtagcaattgattctgcctggaactgtcatagtttgaggccatcggtacga

SEQ ID NO: 7040 - DNA, 1248 bp, Zea Mays
ggagaaagaacctgatatttggaacgccatcaagtttggaacttgctggagaacgtggtctttgatgagcatactcgtgaagtcgactacgccgacaactctgtcaccgagaacactcgggctgcctacccgatcgagtacatccccaacgccaagataccatgcgtcggcccgcaccccaagaacgtgatcctcctggcgtgcgacgccttcggcgtgctcccgccggtgagcaagctgaacctggcgcagaccatgtaccacttcatcagcggctacaccgctctggtcgccggcacggaggacggcatcaaggagccgcaggccaccttctccgcctgcttcggcgcggccttcatcatgctccacccgaccaagtacgccgccatgctcgccgagaagatgcagaagtacggcgccaccgggtggctcgtcaacaccggctggtcgggtggcaggtacggcgtgggcaagaggatcaggcttccctacaccagaaagatcatcgacgccatccactccggcgagctcctcaccgccaactaccagaagaccgaggtgtttggcctggagatccccactgagatcaacggcgtgccgtcggaaatcctcgacccgatcaacacctggacggacaaggccgcgtacaaggagaatctcctgaggctcggcgggctcttcaagaagaacttcgaggtgttcgccagctacaagatcggggacgacagcagcctgactgacgagatcctcgccgcaggccccaacttctgaactaaagcaatggatccggatgaataaaacgatggcgtgcgtgcgtgggtgcgtgtgaagatgattacgacgacgacgacgaaaaaaaaggtgttggatcgatgagccaacatagtaatagattagctgggtattgtcatgggtgcgtctggtgttgttatctataaggctgtctgcctgtctcaagcagctatcatattctatttcaaattctattctgtaagcgtgtagttcaaaacaatgctttacacaaccatatgcacagtctatctaaggttggtctgttctatcagcttgttgggaaaagtttgcgtgtgcttgtatcttgccccctgtactctctctggtttctgaatttgaatacgaaacagcttgatcgcaatcaccattggttcggtgtgtgtgtgtgtgtgtcatggcaggagagtagcaattgattctgcctggaactgtcatagtttgaggccatcggtacga

SEQ ID NO: 7041 - DNA, 2506 bp, Zea Mays
gccgccgccgttgaatggtcgggtagaggacgtaaccatggttcactgccgggccctttaaaagccgagccgggctcgtcccatccgccccacgaccgcttggcgcttcatcactcgttccctttcgaaagcccgcgcacgcacgtcggtcgtcccgagcaggacctcgatcggccgagatggcgacgccgaacgggcttgcgcggatcgagacgaccgggaagaagaagcaggacaacggcgtgtggtacgacgacagctcggcgccggtgcgcgcgcagaccatcgacgagctgcactcgctgcagcggaagcggtcggcgcccagcacgcccaagcggtcggcgcccaccacgcccatcaagggcggtgcccactcgcccttcgccgtcgcgatctccgaggaggagcgccacacgcagcagatgcagtccatcagtgcgtcgttggcgtctctgacgcgtgaaaccgggccgaaagtggtcaagggcgacccggccgcgaagggcgaggccgccgcgcagggcgcgccatcgacgccgagggcgcaccagcagcaccgccaccccgccgcccccgccatcgccgtcagcgacagctccctcaagttcactcatgtgctcaacaacctctcgcctgctggggctcgcccaacatcgagatggacgagaagacgttcctgatcaacagggagagggccgtcgactacctcaactccctggagaaggtgttcgtcaacgaccagtacctcaactgggaccccgagaaccggatcaaggtccgcatcatctccgccagggcgtaccactccctcttcatgcacaacatgtgcatccgccccacagacgaggagctggaggacttcggcacgccggacttcaccatctacaacgcagggcagttcccctgcaaccgctacacccactacatgacgtcgtccacgagcatagacctcaacctcgccaggagggagatggtcatcatgggcacgcagtacgccggcgagatgaagaaggggctcttcggcgtcatgcactacctcatgcccaagcgcggcatcctctcgctgcactccggctgcaatatgggcaaggacggcgacgtcgccctcttctttggcctctcaggtaccgggaagacgacgctgtcgacggatcacaacaggcttctgatcggcgacgacgagcactgctggagcgacaatggcgtgtccaacatcgagggcggctgctacgccaagtgcatcgacctggcgcaggagaaagaacctgatatttggaacgccatcaagtttggaactgtgctggagaacgtggtctttgatgagcatactcgtgaagtcgactacgccgacaactctgtcaccgagaacactcgggctgcctacccgatcgagtacatccccaacgccaagataccatgcgtcggcccgcaccccaagaacgtgatcctcctggcgtgcgacgccttcggcgtgctcccgccggtgagcaagctgaacctggcgcagaccatgtaccacttcatcagcggctacaccgctctggtcgccggcacggaggacggcatcaaggagccgcaggccaccttctccgcctgcttcggcgcggccttcatcatgctccacccgaccaagtacgccgccatgctcgccgagaagatgcagaagtacggcgccaccgggtggctcgtcaacaccggctggtcgggtggcaggtacggcgtgggcaagaggatcaggcttccctacaccagaaagatcatcgacgccatccactccggcgagctcctcaccgccaactaccagaagaccgaggtgtttggcctggagatccccactgagatcaacggcgtgccgtcggaaatcctcgacccgatcaacacctggacggacaaggccgcgtacaaggagaatctcctgaggctcggcgggctcttcaagaagaacttcgaggtgttcgccagctacaagatcggggacgacagcagcctgactgacgagatcctcgccgcaggccccaacttctgaactaaagcaatggatccggatgaataaaacgatggcgtgcgtgcgtgggtgcgtgtgaagatgattacgacgacgacgacgaaaaaaaaggtgttggatcgatgagccaacatagtaatagattagctgggtattgtcatgggtgcgtctggtgttgttatctataaggctgtctgcctgtctcaagcagctatcatattctatttcaaattctattctgtaagcgtgtagttcaaaacaatgctttacacaaccatatgcacagtctatctaaggttggtctgttctatcagcttgttgggaaaagtttgcgtgtgcttgtatcttgccccctgtactctctctggtttctgaatttgaatacgaaacagcttgatcgcaatcaccattggttcggtgtgtgtgtgtgtgtgtcatggcaggagagtagcaattgattctgcctggaactgtcatagtttgaggccatcggtacga

SEQ ID NO: 7042 - DNA, 2804 bp, Zea Mays
gccgccgccgttgaatggtcgggtagaggacgtaaccatggttcactgccgggccctttaaaagccgagccgggctcgtcccatccgccccacgaccgcttggcgcttcatcactcgttccctttcgaaagcccgcgcacgcacgtcggtcgtcccgtacgtgtgcccgtctatctatcctcctcgactccgtcgtgtctcttcaactccgtcgtgtcgtgtgcaatcgttgcatgcggcgaacgctatacatggtgctccgagagtgtccgggagcagagagcatcgatcaatggcggggagcaggacctcgatcggccgagatggcgacgccgaacgggcttgcgcggatcgagacgaccgggaagaagaagcaggacaacggcgtgtggtacgacgacagctcggcgccggtgcgcgcgcagaccatcgacgagctgcactcgctgcagcggaagcggtcggcgcccagcacgcccaagcggtcggcgcccaccacgcccatcaagggcggtgcccactcgcccttcgccgtcgcgatctccgaggaggagcgccacacgcagcagatgcagtccatcagtgcgtcgttggcgtctctgacgcgtgaaaccgggccgaaagtggtcaagggcgacccggccgcgaagggcgaggccgccgcgcagggcgcgccatcgacgccgagggcgcaccagcagcaccgccaccccgccgcccccgccatcgccgtcagcgacagctccctcaagttcactcatgtgctcaacaacctctcgcctgctgagctgtacgagcaggccatcaagtacgagaaggggtcgttcatcacgtccaccggcgcgctggcgacgctgtccggtgccaagaccgggcggtctcccagggacaagcgcgtcgtcaaggacgaggtcaccgcgcaggacctgtggtggggcaagggctcgcccaacatcgagatggacgagaagacgttcctgatcaacagggagagggccgtcgactacctcaactccctggagaaggtgttcgtcaacgaccagtacctcaactgggaccccgagaaccggatcaaggtccgcatcatctccgccagggcgtaccactccctcttcatgcacaacatgtgcatccgccccacagacgaggagctggaggacttcggcacgccggacttcaccatctacaacgcagggcagttcccctgcaaccgctacacccactacatgacgtcgtccacgagcatagacctcaacctcgccaggagggagatggtcatcatgggcacgcagtacgccggcgagatgaagaaggggctcttcggcgtcatgcactacctcatgcccaagcgcggcatcctctcgctgcactccggctgcaatatgggcaaggacggcgacgtcgccctcttctttggcctctcaggtaccgggaagacgacgctgtcgacggatcacaacaggcttctgatcggcgacgacgagcactgctggagcgacaatggcgtgtccaacatcgagggcggctgctacgccaagtgcatcgacctggcgcaggagaaagaacctgatatttggaacgccatcaagtttggaactgtgctggagaacgtggtctttgatgagcatactcgtgaagtcgactacgccgacaactctgtcaccgagaacactcgggctgcctacccgatcgagtacatccccaacgccaagataccatgcgtcggcccgcaccccaagaacgtgatcctcctggcgtgcgacgccttcggcgtgctcccgccggtgagcaagctgaacctggcgcagaccatgtaccacttcatcagcggctacaccgctctggtcgccggcacggaggacggcatcaaggagccgcaggccaccttctccgcctgcttcggcgcggccttcatcatgctccacccgaccaagtacgccgccatgctcgccgagaagatgcagaagtacggcgccaccgggtggctcgtcaacaccggctggtcgggtggcaggtacggcgtgggcaagaggatcaggcttccctacaccagaaagatcatcgacgccatccactccggcgagctcctcaccgccaactaccagaagaccgaggtgtttggcctggagatccccactgagatcaacggcgtgccgtcggaaatcctcgacccgatcaacacctggacggacaaggccgcgtacaaggagaatctcctgaggctcggcgggctcttcaagaagaacttcgaggtgttcgccagctacaagatcggggacgacagcagcctgactgacgagatcctcgccgcaggccccaacttctgaactaaagcaatggatccggatgaataaaacgatggcgtgcgtgcgtgggtgcgtgtgaagatgattacgacgacgacgacgaaaaaaaaggtgttggatcgatgagccaacatagtaatagattagctgggtattgtcatgggtgcgtctggtgttgttatctataaggctgtctgcctgtctcaagcagctatcatattctatttcaaattctattctgtaagcgtgtagttcaaaacaatgctttacacaaccatatgcacagtctatctaaggttggtctgttctatcagcttgttgggaaaagtttgcgtgtgcttgtatcttgccccctgtactctctctggtttctgaatttgaatacgaaacagcttgatcgcaatcaccattggttcggtgtgtgtgtgtgtgtgtcatggcaggagagtagcaattgattctgcctggaactgtcatagtttgaggccatcggtacga

SEQ ID NO: 7043 - DNA, 2531 bp, Zea Mays
atttctacttgcaattcacttctccaggagcaggacctcgatcggccgagatggcgacgccgaacgggcttgcgcggatcgagacgaccgggaagaagaagcaggacaacggcgtgtggtacgacgacagctcggcgccggtgcgcgcgcagaccatcgacgagctgcactcgctgcagcggaagcggtcggcgcccagcacgcccaagcggtcggcgcccaccacgcccatcaagggcggtgcccactcgcccttcgccgtcgcgatctccgaggaggagcgccacacgcagcagatgcagtccatcagtgcgtcgttggcgtctctgacgcgtgaaaccgggccgaaagtggtcaagggcgacccggccgcgaagggcgaggccgccgcgcagggcgcgccatcgacgccgagggcgcaccagcagcaccgccaccccgccgcccccgccatcgccgtcagcgacagctccctcaagttcactcatgtgctcaacaacctctcgcctgctgagctgtacgagcaggccatcaagtacgagaaggggtcgttcatcacgtccaccggcgcgctggcgacgctgtccggtgccaagaccgggcggtctcccagggacaagcgcgtcgtcaaggacgaggtcaccgcgcaggacctgtggtggggcaagggctcgcccaacatcgagatggacgagaagacgttcctgatcaacagggagagggccgtcgactacctcaactccctggagaaggtgttcgtcaacgaccagtacctcaactgggaccccgagaaccggatcaaggtccgcatcatctccgccagggcgtaccactccctcttcatgcacaacatgtgcatccgccccacagacgaggagctggaggacttcggcacgccggacttcaccatctacaacgcagggcagttcccctgcaaccgctacacccactacatgacgtcgtccacgagcatagacctcaacctcgccaggagggagatggtcatcatgggcacgcagtacgccggcgagatgaagaaggggctcttcggcgtcatgcactacctcatgcccaagcgcggcatcctctcgctgcactccggctgcaatatgggcaaggacggcgacgtcgccctcttctttggcctctcaggtaccgggaagacgacgctgtcgacggatcacaacaggcttctgatcggcgacgacgagcactgctggagcgacaatggcgtgtccaacatcgagggcggctgctacgccaagtgcatcgacctggcgcaggagaaagaacctgatatttggaacgccatcaagtttggaactgtgctggagaacgtggtctttgatgagcatactcgtgaagtcgactacgccgacaactctgtcaccgagaacactcgggctgcctacccgatcgagtacatccccaacgccaagataccatgcgtcggcccgcaccccaagaacgtgatcctcctggcgtgcgacgccttcggcgtgctcccgccggtgagcaagctgaacctggcgcagaccatgtaccacttcatcagcggctacaccgctctggtcgccggcacggaggacggcatcaaggagccgcaggccaccttctccgcctgcttcggcgcggccttcatcatgctccacccgaccaagtacgccgccatgctcgccgagaagatgcagaagtacggcgccaccgggtggctcgtcaacaccggctggtcgggtggcaggtacggcgtgggcaagaggatcaggcttccctacaccagaaagatcatcgacgccatccactccggcgagctcctcaccgccaactaccagaagaccgaggtgtttggcctggagatccccactgagatcaacggcgtgccgtcggaaatcctcgacccgatcaacacctggacggacaaggccgcgtacaaggagaatctcctgaggctcggcgggctcttcaagaagaacttcgaggtgttcgccagctacaagatcggggacgacagcagcctgactgacgagatcctcgccgcaggccccaacttctgaactaaagcaatggatccggatgaataaaacgatggcgtgcgtgcgtgggtgcgtgtgaagatgattacgacgacgacgacgaaaaaaaaggtgttggatcgatgagccaacatagtaatagattagctgggtattgtcatgggtgcgtctggtgttgttatctataaggctgtctgcctgtctcaagcagctatcatattctatttcaaattctattctgtaagcgtgtagttcaaaacaatgctttacacaaccatatgcacagtctatctaaggttggtctgttctatcagcttgttgggaaaagtttgcgtgtgcttgtatcttgccccctgtactctctctggtttctgaatttgaatacgaaacagcttgatcgcaatcaccattggttcggtgtgtgtgtgtgtgtgtcatggcaggagagtagcaattgattctgcctggaactgtcatagtttgaggccatcggtacga

SEQ ID NO: 7044 - DNA, 856 bp, Zea Mays
gctcaatggcatcatcgattggtttcaagtcatgagtctttagaacagttccagggttgtcatttcggctgtagttgtcagtattgatcctcgacgggtatatgtcaaaagtcaagaagatgtgccatttaaaactgtaaaggtgtccactaaaggtccatcgggagaagaatatgcatggtaccagtgcacagtgaatggtggacgtgatagccgagctataggagcatatgaactagcgaaagctgtggaagaattgggcgcaggagaaatacttcttaactgcattgattgtgatggccaaggttgtggatttgacatagatttggttaaaatggtttctgatgctgtgacaatccctgtcattgcgagcagtggtgctggagctgttcaacatttttctgaaatttttgagaaaacaaatgcttctgctgcccttgctgctggcattttccaccggaaagaggttcctatactagcagtgaaagagcatctggtcaatgctggtgtggaggtcagggtgtaacagggagatccttcggtttattgaaatattcttgtttgatgtcacaactgctatcagttctgtttctctgatgtcgcaactgctatcagatctgttggtggcagctggcagtgcataggcccctgtcgagaactgcagtttggtaataaattaataatgtgatgcttaacagattaagcatccgcttcttttgcttgtgtttctatttcccggtgtggattgaccgcctccgacctgtcttgcgtcatattcgtcagctttgtagcatgttaatgttggaggccacgttgctcattcagatagaacaaactaactagcgatgaaaacgag

SEQ ID NO: 7045 - DNA, 2290 bp, Zea Mays
aagaaaaggcccgctagggcgccgagacagcggaacgttctctgagtttgagcacgatctccccgggccccggcgccgccgtacgtcccccttcggcgtcgccagccgcctcctggctccggctccttcatcgcctgctccagcgtgcctgcgtgacataagcgtcgattgattggcgagaaaggggacgaatgcagccgccgttgcaggcgcagggagcaatggctaacgtcgccgctatcctcaccgtcccctgctccgcgggccgccgcccgaagcggagcagccagccccgcggatgcggctccgtctccgtctccgtctccgtccgtgcgtcctccggcgcaaacacggtgactctgctggactacggcgcggggaacgtacgcagcgtgcgcaacgcaattcgctacctcggcttcgacatccgcgacgtgcagagcccggaggacatcgtcgccgcggaacggctcgtctttcccggtgtcggcgccttcggctccgccatggacgtcctcaacaggacgggcatggccaacgcactccgtgagtacatccaaagggaccgccccttcctaggcatctgcctcggtctccagctgctcttcgattccagcgaggagaacggcccggtgagcggcctcggtgtgataccaggcgtggtcaggcgattcgactcctcaaatggcctcatagttccacatattggctggaacgctctccagatcaccaaggacacaccactgttgcagggagctgatggccagcatgtgtactttgttcactcctaccgcgtactgccttcagatgctaatagaaactggatttcctccatatgcaactatggtgacagctttatatcctccatctcaatgggcaacattcaggcagttcaatttcacccagaaaagagtggagctaccggactttctattctaaaagaatttctcagacctaactctcttgggaccaaggtcccagcacgtaggaaagcatcaaaacttgcgaagagagtgatagcatgccttgatgttcgttcaaatgataaaggagatcttgtggtaacaaaaggcgatcaatatgatgtaagagatcatactagcagcaaagaggtaagaaaccttggcaagccagtcgatttagcaagccagtactacatagacggtgctgatgaggtcagcttcttgaatataactggtttccgtgactttccattgggtgatttgccaatgctagaggtactgcgttgtgcctctgaaaaggtttttgtgccacttacagttggtgggggcatacgagacttcacagatgcaaatggaagatactactcaagtttggaggtagcatcagaatatttcaggtccggtgctgacaaaatttcaattggaagtgatgctgtttatgctgctgaagcctttttacagactggtttctttctgtgtatcaggtaaagacagggaaaagcagcttggagcaaatctctagagtatatggcaatcaggctgtagttgtcagtattgatcctcgacgggtatatgtcaaaagtcaagaagatgtgccatttaaaactgtaaaggtgtccactaaaggtccatcgggagaagaatatgcatggtaccagtgcacagtgaatggtggacgtgatagccgagctataggagcatatgaactagcgaaagctgtggaagaattgggcgcaggagaaatacttcttaactgcattgattgtgatggccaaggttgtggatttgacatagatttggttaaaatggtttctgatgctgtgacaatccctgtcattgcgagcagtggtgctggagctgttcaacatttttctgaaatttttgagaaaacaaatgcttctgctgcccttgctgctggcattttccaccggaaagaggttcctatactagcagtgaaagagcatctggtcaatgctggtgtggaggtcagggtgtaacagggagatccttcggtttattgaaatattcttgtttgatgtcacaactgctatcagttctgtttctctgatgtcgcaactgctatcagatctgttggtggcagctggcagtgcataggcccctgtcgagaactgcagtttggtaataaattaataatgtgatgcttaacagattaagcatccgcttcttttgcttgtgtttctatttcccggtgtggattgaccgcctccgacctgtcttgcgtcatattcgtcagctttgtagcatgttaatgttggaggccacgttgctcattcagatagaacaaactaactagcgatgaaaacgag

SEQ ID NO: 7046 - DNA, 2269 bp, Zea Mays
aagaaaaggcccgctagggcgccgagacagcggaacgttctctgagtttgagcacgatctccccgggccccggcgccgccgtacgtcccccttcggcgtcgccagccgcctcctggctccggctccttcatcgcctgctccagcgtgcctgcgtgacataagcgtcgattgattggcgagaaaggggacgaatgcagccgccgttgcaggcgcagggagcaatggctaacgtcgccgctatcctcaccgtcccctgctccgcgggccgccgcccgaagcggagcagccagccccgcggatgcggctccgtctccgtctccgtctccgtccgtgcgtcctccggcgcaaacacggtgactctgctggactacggcgcggggaacgtacgcagcgtgcgcaacgcaattcgctacctcggcttcgacatccgcgacgtgcagagcccggaggacatcgtcgccgcggaacggctcgtctttcccggtgtcggcgccttcggctccgccatggacgtcctcaacaggacgggcatggccaacgcactccgtgagtacatccaaagggaccgccccttcctaggcatctgcctcggtctccagctgctcttcgattccagcgaggagaacggcccggtgagcggcctcggtgtgataccaggcgtggtcaggcgattcgactcctcaaatggcctcatagttccacatattggctggaacgctctccagatcaccaaggacacaccactgttgcagggagctgatggccagcatgtgtactttgttcactcctaccgcgtactgcctatgctaatagaaactggatttcctccatatgcaactatggtgacagctttatatcctccatctcaatgggcaacattcaggcagttcaatttcacccagaaaagagtggagctaccggactttctattctaaaagaatttctcagacctaactctcttgggaccaaggtcccagcacgtaggaaagcatcaaaacttgcgaagagagtgatagcatgccttgatgttcgttcaaatgataaaggagatcttgtggtaacaaaaggcgatcaatatgatgtaagagatcatactagcagcaaagaggtaagaaaccttggcaagccagtcgatttagcaagccagtactacatagacggtgctgatgaggtcagcttcttgaatataactggtttccgtgactttccattgggtgatttgccaatgctagaggtactgcgttgtgcctctgaaaaggtttttgtgccacttacagttggtgggggcatacgagacttcacagatgcaaatggaagatactactcaagtttggaggtagcatcagaatatttcaggtccggtgctgacaaaatttcaattggaagtgatgctgtttatgctgctgaagcctttttacagactggtgtaaagacagggaaaagcagcttggagcaaatctctagagtatatggcaatcaggctgtagttgtcagtattgatcctcgacgggtatatgtcaaaagtcaagaagatgtgccatttaaaactgtaaaggtgtccactaaaggtccatcgggagaagaatatgcatggtaccagtgcacagtgaatggtggacgtgatagccgagctataggagcatatgaactagcgaaagctgtggaagaattgggcgcaggagaaatacttcttaactgcattgattgtgatggccaaggttgtggatttgacatagatttggttaaaatggtttctgatgctgtgacaatccctgtcattgcgagcagtggtgctggagctgttcaacatttttctgaaatttttgagaaaacaaatgcttctgctgcccttgctgctggcattttccaccggaaagaggttcctatactagcagtgaaagagcatctggtcaatgctggtgtggaggtcagggtgtaacagggagatccttcggtttattgaaatattcttgtttgatgtcacaactgctatcagttctgtttctctgatgtcgcaactgctatcagatctgttggtggcagctggcagtgcataggcccctgtcgagaactgcagtttggtaataaattaataatgtgatgcttaacagattaagcatccgcttcttttgcttgtgtttctatttcccggtgtggattgaccgcctccgacctgtcttgcgtcatattcgtcagctttgtagcatgttaatgttggaggccacgttgctcattcagatagaacaaactaactagcgatgaaaacgag

SEQ ID NO: 7047 - DNA, 2186 bp, Zea Mays
aagaaaaggcccgctagggcgccgagacagcggaacgttctctgagtttgagcacgatctccccgggccccggcgccgccgtacgtcccccttcggcgtcgccagccgcctcctggctccggctccttcatcgcctgctccagcgtgcctgcgtgacataagcgtcgattgattggcgagaaaggggacgaatgcagccgccgttgcaggcgcagggagcaatggctaacgtcgccgctatcctcaccgtcccctgctccgcgggccgccgcccgaagcggagcagccagccccgcggatgcggctccgtctccgtctccgtctccgtccgtgcgtcctccggcgcaaacacggtgactctgctggactacggcgcggggaacgtacgcagcgtgcgcaacgcaattcgctacctcggcttcgacatccgcgacgtgcagagcccggaggacatcgtcgccgcggaacggctcgtctttcccggtgtcggcgccttcggctccgccatggacgtcctcaacaggacgggcatggccaacgcactccgtgagtacatccaaagggaccgccccttcctaggcatctgcctcggtctccagctgctcttcgattccagcgaggagaacggcccggtgagcggcctcggtgtgataccaggcgtggtcaggcgattcgactcctcaaatggcctcatagttccacatattggctggaacgctctccagatcaccaaggacacaccactgttgcagggagctgatggccagcatgtgtactttgttcactcctaccgcgtactgcctatgctaatagaaactggatttcctccatatgcaactatggtgacagctttatatcctccatctcaatgggcaacattcaggcagttcaatttcacccagaaaagagtggagctaccggactttctattctaaaagaatttctcagacctaactctcttgggaccaaggtcccagcacgtaggaaagcatcaaaacttgcgaagagagtgatagcatgccttgatgttcgttcaaatgataaaggagatcttgtggtaacaaaaggcgatcaatatgatgtaagagatcatactagcagcaaagaggtaagaaaccttggcaagccagtcgatttagcaagccagtactacatagacggtgctgatgaggtcagcttcttgaatataactggtttccgtgactttccattgggtgatttgccaatgctagagatactactcaagtttggaggtagcatcagaatatttcaggtccggtgctgacaaaatttcaattggaagtgatgctgtttatgctgctgaagcctttttacagactggtgtaaagacagggaaaagcagcttggagcaaatctctagagtatatggcaatcaggctgtagttgtcagtattgatcctcgacgggtatatgtcaaaagtcaagaagatgtgccatttaaaactgtaaaggtgtccactaaaggtccatcgggagaagaatatgcatggtaccagtgcacagtgaatggtggacgtgatagccgagctataggagcatatgaactagcgaaagctgtggaagaattgggcgcaggagaaatacttcttaactgcattgattgtgatggccaaggttgtggatttgacatagatttggttaaaatggtttctgatgctgtgacaatccctgtcattgcgagcagtggtgctggagctgttcaacatttttctgaaatttttgagaaaacaaatgcttctgctgcccttgctgctggcattttccaccggaaagaggttcctatactagcagtgaaagagcatctggtcaatgctggtgtggaggtcagggtgtaacagggagatccttcggtttattgaaatattcttgtttgatgtcacaactgctatcagttctgtttctctgatgtcgcaactgctatcagatctgttggtggcagctggcagtgcataggcccctgtcgagaactgcagtttggtaataaattaataatgtgatgcttaacagattaagcatccgcttcttttgcttgtgtttctatttcccggtgtggattgaccgcctccgacctgtcttgcgtcatattcgtcagctttgtagcatgttaatgttggaggccacgttgctcattcagatagaacaaactaactagcgatgaaaacgag

SEQ ID NO: 7048 - DNA, 2268 bp, Zea Mays
aagaaaaggcccgctagggcgccgagacagcggaacgttctctgagtttgagcacgatctccccgggccccggcgccgccgtacgtcccccttcggcgtcgccagccgcctcctggctccggctccttcatcgcctgctccagcgtgcctgcgtgacataagcgtcgattgattggcgagaaaggggacgaatgcagccgccgttgcaggcgcagggagcaatggctaacgtcgccgctatcctcaccgtcccctgctccgcgggccgccgcccgaagcggagcagccagccccgcggatgcggctccgtctccgtctccgtctccgtccgtgcgtcctccggcgcaaacacggtgactctgctggactacggcgcggggaacgtacgcagcgtgcgcaacgcaattcgctacctcggcttcgacatccgcgacgtgcagagcccggaggacatcgtcgccgcggaacggctcgtctttcccggtgtcggcgccttcggctccgccatggacgtcctcaacaggacgggcatggccaacgcactccgtgagtacatccaaagggaccgccccttcctaggcatctgcctcggtctccagctgctcttcgattccagcgaggagaacggcccggtgagcggcctcggtgtgataccaggcgtggtcaggcgattcgactcctcaaatggcctcatagttccacatattggctggaacgctctccagatcaccaaggacacaccactgttgcagggagctgatggccagcatgtgtactttgttcactcctaccgcgtactgccttcagatgctaatagaaactggatttcctccatatgcaactatggtgacagctttatatcctccatctcaatgggcaacattcaggcagttcaatttcacccagaaaagagtggagctaccggactttctattctaaaagaatttctcagacctaactctcttgggaccaaggtcccagcacgtaggaaagcatcaaaacttgcgaagagagtgatagcatgccttgatgttcgttcaaatgataaaggagatcttgtggtaacaaaaggcgatcaatatgatgtaagagatcatactagcagcaaagaggtaagaaaccttggcaagccagtcgatttagcaagccagtactacatagacggtgctgatgagcttcttgaatataactggtttccgtgactttccattgggtgatttgccaatgctagaggtactgcgttgtgcctctgaaaaggtttttgtgccacttacagttggtgggggcatacgagacttcacagatgcaaatggaagatactactcaagtttggaggtagcatcagaatatttcaggtccggtgctgacaaaatttcaattggaagtgatgctgtttatgctgctgaagcctttttacagactggtgtaaagacagggaaaagcagcttggagcaaatctctagagtatatggcaatcaggctgtagttgtcagtattgatcctcgacgggtatatgtcaaaagtcaagaagatgtgccatttaaaactgtaaaggtgtccactaaaggtccatcgggagaagaatatgcatggtaccagtgcacagtgaatggtggacgtgatagccgagctataggagcatatgaactagcgaaagctgtggaagaattgggcgcaggagaaatacttcttaactgcattgattgtgatggccaaggttgtggatttgacatagatttggttaaaatggtttctgatgctgtgacaatccctgtcattgcgagcagtggtgctggagctgttcaacatttttctgaaatttttgagaaaacaaatgcttctgctgcccttgctgctggcattttccaccggaaagaggttcctatactagcagtgaaagagcatctggtcaatgctggtgtggaggtcagggtgtaacagggagatccttcggtttattgaaatattcttgtttgatgtcacaactgctatcagttctgtttctctgatgtcgcaactgctatcagatctgttggtggcagctggcagtgcataggcccctgtcgagaactgcagtttggtaataaattaataatgtgatgcttaacagattaagcatccgcttcttttgcttgtgtttctatttcccggtgtggattgaccgcctccgacctgtcttgcgtcatattcgtcagctttgtagcatgttaatgttggaggccacgttgctcattcagatagaacaaactaactagcgatgaaaacgag

SEQ ID NO: 7049 - DNA, 2190 bp, Zea Mays
aagaaaaggcccgctagggcgccgagacagcggaacgttctctgagtttgagcacgatctccccgggccccggcgccgccgtacgtcccccttcggcgtcgccagccgcctcctggctccggctccttcatcgcctgctccagcgtgcctgcgtgacataagcgtcgattgattggcgagaaaggggacgaatgcagccgccgttgcaggcgcagggagcaatggctaacgtcgccgctatcctcaccgtcccctgctccgcgggccgccgcccgaagcggagcagccagccccgcggatgcggctccgtctccgtctccgtctccgtccgtgcgtcctccggcgcaaacacggtgactctgctggactacggcgcggggaacgtacgcagcgtgcgcaacgcaattcgctacctcggcttcgacatccgcgacgtgcagagcccggaggacatcgtcgccgcggaacggctcgtctttcccggtgtcggcgccttcggctccgccatggacgtcctcaacaggacgggcatggccaacgcactccgtgagtacatccaaagggaccgccccttcctaggcatctgcctcggtctccagctgctcttcgattccagcgaggagaacggcccggtgagcggcctcggtgtgataccaggcgtggtcaggcgattcgactcctcaaatggcctcatagttccacatattggctggaacgctctccagatcaccaaggacacaccactgttgcagggagctgatggccagcatgtgtactttgttcactcctaccgcgtactgccttcagatgctaatagaaactggatttcctccatatgcaactatggtgacagctttatatcctccatctcaatgggcaacattcaggcagttcaatttcacccagaaaagagtggagctaccggactttctattctaaaagaatttctcagacctaactctcttgggaccaaggtcccagcacgtaggaaagcatcaaaacttgcgaagagagtgatagcatgccttgatgttcgttcaaatgataaaggagatcttgtggtaacaaaaggcgatcaatatgatgtaagagatcatactagcagcaaagaggtaagaaaccttggcaagccagtcgatttagcaagccagtactacatagacggtgctgatgaggtcagcttcttgaatataactggtttccgtgactttccattgggtgatttgccaatgctagagatactactcaagtttggaggtagcatcagaatatttcaggtccggtgctgacaaaatttcaattggaagtgatgctgtttatgctgctgaagcctttttacagactggtgtaaagacagggaaaagcagcttggagcaaatctctagagtatatggcaatcaggctgtagttgtcagtattgatcctcgacgggtatatgtcaaaagtcaagaagatgtgccatttaaaactgtaaaggtgtccactaaaggtccatcgggagaagaatatgcatggtaccagtgcacagtgaatggtggacgtgatagccgagctataggagcatatgaactagcgaaagctgtggaagaattgggcgcaggagaaatacttcttaactgcattgattgtgatggccaaggttgtggatttgacatagatttggttaaaatggtttctgatgctgtgacaatccctgtcattgcgagcagtggtgctggagctgttcaacatttttctgaaatttttgagaaaacaaatgcttctgctgcccttgctgctggcattttccaccggaaagaggttcctatactagcagtgaaagagcatctggtcaatgctggtgtggaggtcagggtgtaacagggagatccttcggtttattgaaatattcttgtttgatgtcacaactgctatcagttctgtttctctgatgtcgcaactgctatcagatctgttggtggcagctggcagtgcataggcccctgtcgagaactgcagtttggtaataaattaataatgtgatgcttaacagattaagcatccgcttcttttgcttgtgtttctatttcccggtgtggattgaccgcctccgacctgtcttgcgtcatattcgtcagctttgtagcatgttaatgttggaggccacgttgctcattcagatagaacaaactaactagcgatgaaaacgag

SEQ ID NO: 7050 - DNA, 2267 bp, Zea Mays
ggctaggccattgaggcccaacgtctatttattccgttatctaaaagcggcctaccgggcccgcaagaaaaggcccgctagggcgccgagacagcggaacgttctctgagtttgagcacgatctccccgggccccggcgccgccgtacgtcccccttcggcgtcgccagccgcctcctggctccggctccttcatcgcctgctccagcgtgcctgcgtgacataagcgtcgattgattggcgagaaaggggacgaatgcagccgccgttgcaggcgcagggagcaatggctaacgtcgccgctatcctcaccgtcccctgctccgcgggccgccgcccgaagcggagcagccagccccgcggatgcggctccgtctccgtctccgtctccgtccgtgcgtcctccggcgcaaacacggtgactctgctggactacggcgcggggaacgtacgcagcgtgcgcaacgcaattcgctacctcggcttcgacatccgcgacgtgcagagcccggaggacatcgtcgccgcggaacggctcgtctttcccggtgtcggcgccttcggctccgccatggacgtcctcaacaggacgggcatggccaacgcactccgtgagtacatccaaagggaccgccccttcctaggcatctgcctcggtctccagctgctcttcgattccagcgaggagaacggcccggtgagcggcctcggtgtgataccaggcgtggtcaggcgattcgactcctcaaatggcctcatagttccacatattggctggaacgctctccagatcaccaaggacacaccactgttgcagggagctgatggccagcatgtgtactttgttcactcctaccgcgtactgccttcagatgctaatagaaactggatttcctccatatgcaactatggtgacagctttatatcctccatctcaatgggcaacattcaggcagttcaatttcacccagaaaagagtggagctaccggactttctattctaaaagaatttctcagacctaactctcttgggaccaaggtcccagcacgtaggaaagcatcaaaacttgcgaagagagtgatagcatgccttgatgttcgttcaaatgataaaggagatcttgtggtaacaaaaggcgatcaatatgatgtaagagatcatactagcagcaaagaggtaagaaaccttggcaagccagtcgatttagcaagccagtactacatagacggtgctgatgaggtcagcttcttgaatataactggtttccgtgactttccattgggtgatttgccaatgctagaggtactgcgttgtgcctctgaaaaggtttttgtgccacttacagttggtgggggcatacgagacttcacagatgcaaatggaagatactactcaagtttggaggtagcatcagaatatttcaggtaaagacagggaaaagcagcttggagcaaatctctagagtatatggcaatcaggctgtagttgtcagtattgatcctcgacgggtatatgtcaaaagtcaagaagatgtgccatttaaaactgtaaaggtgtccactaaaggtccatcgggagaagaatatgcatggtaccagtgcacagtgaatggtggacgtgatagccgagctataggagcatatgaactagcgaaagctgtggaagaattgggcgcaggagaaatacttcttaactgcattgattgtgatggccaaggttgtggatttgacatagatttggttaaaatggtttctgatgctgtgacaatccctgtcattgcgagcagtggtgctggagctgttcaacatttttctgaaatttttgagaaaacaaatgcttctgctgcccttgctgctggcattttccaccggaaagaggttcctatactagcagtgaaagagcatctggtcaatgctggtgtggaggtcagggtgtaacagggagatccttcggtttattgaaatattcttgtttgatgtcacaactgctatcagttctgtttctctgatgtcgcaactgctatcagatctgttggtggcagctggcagtgcataggcccctgtcgagaactgcagtttggtaataaattaataatgtgatgcttaacagattaagcatccgcttcttttgcttgtgtttctatttcccggtgtggattgaccgcctccgacctgtcttgcgtcatattcgtcagctttgtagcatgttaatgttggaggccacgttgctcattcagatagaacaaactaactagcgatgaaaacgag

SEQ ID NO: 7051 - DNA, 5558 bp, Zea Mays
gtcaggtccgggtcatgtgactgggtccgtaggaagtgcgggcgtgagggacgaggccgagcggtgtgaggaaatagaaccgggagactggagcggaggcgggaggaggaggagggagaggggatcgagaggaacgcgcgcgaacagaagagaggaaggaagaggaggtggcaggctcggttccgcgcgcgccgacgtgagattccgggccgcacgtgcccgcagtgtgatagatatcatcttgaggtcttcataagtcagcaacctagagcagaaaatgtcagctccggaattcaggacttcttaccagcaatcccctgagaatgtcggtcaactcaaggtctgccaatgtgggtcgggcgactccaattttcagatcacaaataaatccgacggtggcgaaaattcaccaacaacttgtccaaactgtcaggtccttaagagtggaaatttactgctttcatctaaagggattggctggacagtatggaaaaagcgttggtttattcttacaaggacatcattagtgttcttcaggagcgatcctaatgttccccctcccagaggaagtgaaccaattgttacacttggtggaattgacttgaataacactgcaagtatgatagtcaaagaagaaaggaaacttataacagtcgtgtttcctgatggccgtgacggacgcactttcacccttaaggcagaaactacagaagacctaaatgagtggagaagtgcattggagaatgctctggctcaggcacccagtgttgtgaatacagcgggacaacttccagtagtcagcactgacataacagaacctgttgaagctgctgttgaacaatcagagaataagtctgtaattggcagaccagcagaatttgcacttgtcgatgctgatggcactacagcattcctgcagaaggccttaaagttcatcgaagattatggtgttaaggtcgaaggaattcttcgtcagtctgctgatgttgaagaagtcaaacgcagggttcaggattacgaaaagggaaagaatgagttctccccagaagaggatgcacatgttatcggtgactgtattaagtgcattcttcgagagatgccatcttctccaattccggcaccatgttgcactgccctggttagagcttaccgaactgacaagacaaaaagactcgatgctatgaatagagtgatatatgaagtattcccagaaccaaatcgtcaattgttgcagaggattctcaaaatgatgcagattgttggatcacacaaagctgtaaataggatgtcttcatctgctttggcagcttgcatggcaccgcttcttctccgtcctcttcttcttggtgaatgtgaaattgatagtgaattcagtatggctggggatggttcattccagttgcttcaagctgctgctgctgccaaccatgcccaagctattgttattattatgcttgaggaatatgatcagatatttgatgtacctgcttttccctggacgtgcttttctttgcaagcttgttctatttgaacccatactgtattgttatggattttaatccaacaattacctgtttaggatattgaagacggttcgtactcttcagatgcttataccgagtctgacattgacaaggaatattctacagacaatgacatccctgaagattatgatggctcctctggttctggtgaagatgttgaagaagatttgaatgatgatactgaacactcttatggcatgaaggtcgaatgtgatagtaacattaggattgataatgcaaatgataaggcaagaaaaggcttgccaacagaggaggatggctgttccagtgataacgacaaggctcatattacgaagcttgaaaacaagaagactcatctccaatctaaacttacggaggaggagaaagaaaatacagtcctccaggcaaatttagaaaaacgaaaagaagcattacacaagcgccgtgtagcacttgaaaaagaagtggaaaatttacgagaccagctactgaaggagagaagtttgagggcttctctggagtctgggctaatgaatatgcgaagaggacaagtgtccttcccctcaacgatagacaccaagactaaggctgatcttgaggaagttgctgccgttgaagctgatattatgaacttgaagcaaaaggtttctgatcttcggggacaactcaacaaccaagttcagttgagttccacctcgttatgtgaatcatgcaacaacaagcgatccataaatgcagacaagcttgtcgaaggtgaacaaaacgctgccctttctccacagattgcctcagtcgaagcaccacctattgtagggtcttattctgtacctgacatgttctgggctacaaaccaaatggttcagaagatgttgtattcaaagggtgagattgcgaaggatggccaagacggatcacttacatcaagatggaactttgcacagagaccacactcaaatagtccagtcatgagcagggttcaaggttccgatgcctattcaagtactaaaaccgaggaatctggaggcgcaccttcctctgcattagcgaagctgactacccgactcaactttttgaaagaaagaagggccttgcttgccagtgagatgcaaaacttagatctgggccgctcccaggcccagaggcatacagctcctccgaaagctgagactccaactgagaagtagaatcgttttactgcatcgttgttaggccacaagctcaggtaggattgcaggcagtaacagaaaacttcgattcgacaatgcacagagactatctagctatagagtaacttgatttgtacatcgcacaggcattcatgtcttcaccctgatgattcatatgtcaagttttttagcgacaccgacgaacaacctggtttgtactattttatctccaaataaacaatactcctactctgggacaaagccaaagtgcgtttgcaaattatttgtcggtctgtctggtactctggtttgtacatcaacttcacttacgatcaagctaagtaaaaataccgtaccatgtgtatctatgccttcagtgtaacctaatagcaattccagtaaaacttggcagtcccagtgccaaaaagagcgaccagtatacctgcttgaacatcgtgctccgttaagttggcagttccagtgccaaaaagagcgaccgattcttctttctgctggaaatcattactccggctaggccattgaggcccaacgtctatttattccgttatctaaaagcggcctaccgggcccgcaagaaaaggcccgctagggcgccgagacagcggaacgttctctgagtttgagcacgatctccccgggccccggcgccgccgtacgtcccccttcggcgtcgccagccgcctcctggctccggctccttcatcgcctgctccagcgtgcctgcgtgacataagcgtcgattgattggcgagaaaggggacgaatgcagccgccgttgcaggcgcagggagcaatggctaacgtcgccgctatcctcaccgtcccctgctccgcgggccgccgcccgaagcggagcagccagccccgcggatgcggctccgtctccgtctccgtctccgtccgtgcgtcctccggcgcaaacacggtgactctgctggactacggcgcggggaacgtacgcagcgtgcgcaacgcaattcgctacctcggcttcgacatccgcgacgtgcagagcccggaggacatcgtcgccgcggaacggctcgtctttcccggtgtcggcgccttcggctccgccatggacgtcctcaacaggacgggcatggccaacgcactccgtgagtacatccaaagggaccgccccttcctaggcatctgcctcggtctccagctgctcttcgattccagcgaggagaacggcccggtgagcggcctcggtgtgataccaggcgtggtcaggcgattcgactcctcaaatggcctcatagttccacatattggctggaacgctctccagatcaccaaggacacaccactgttgcagggagctgatggccagcatgtgtactttgttcactcctaccgcgtactgccttcagatgctaatagaaactggatttcctccatatgcaactatggtgacagctttatatcctccatctcaatgggcaacattcaggcagttcaatttcacccagaaaagagtggagctaccggactttctattctaaaagaatttctcagacctaactctcttgggaccaaggtcccagcacgtaggaaagcatcaaaacttgcgaagagagtgatagcatgccttgatgttcgttcaaatgataaaggagatcttgtggtaacaaaaggcgatcaatatgatgtaagagatcatactagcagcaaagaggtaagaaaccttggcaagccagtcgatttagcaagccagtactacatagacggtgctgatgaggtcagcttcttgaatataactggtttccgtgactttccattgggtgatttgccaatgctagaggtactgcgttgtgcctctgaaaaggtttttgtgccacttacagttggtgggggcatacgagacttcacagatgcaaatggaagatactactcaagtttggaggtagcatcagaatatttcaggtccggtgctgacaaaatttcaattggaagtgatgctgtttatgctgctgaagcctttttacagactggtgtaaagacagggaaaagcagcttggagcaaatctctagagtatatggcaatcaggctgtagttgtcagtattgatcctcgacgggtatatgtcaaaagtcaagaagatgtgccatttaaaactgtaaaggtgtccactaaaggtccatcgggagaagaatatgcatggtaccagtgcacagtgaatggtggacgtgatagccgagctataggagcatatgaactagcgaaagctgtggaagaattgggcgcaggagaaatacttcttaactgcattgattgtgatggccaaggttgtggatttgacatagatttggttaaaatggtttctgatgctgtgacaatccctgtcattgcgagcagtggtgctggagctgttcaacatttttctgaaatttttgagaaaacaaatgcttctgctgcccttgctgctggcattttccaccggaaagaggttcctatactagcagtgaaagagcatctggtcaatgctggtgtggaggtcagggtgtaacagggagatccttcggtttattgaaatattcttgtttgatgtcacaactgctatcagttctgtttctctgatgtcgcaactgctatcagatctgttggtggcagctggcagtgcataggcccctgtcgagaactgcagtttggtaataaattaataatgtgatgcttaacagattaagcatccgcttcttttgcttgtgtttctatttcccggtgtggattgaccgcctccgacctgtcttgcgtcatattcgtcagctttgtagcatgttaatgttggaggccacgttgctcattcagatagaacaaactaactagcgatgaaaacgag

SEQ ID NO: 7052 - DNA, 5180 bp, Zea Mays
gtcaggtccgggtcatgtgactgggtccgtaggaagtgcgggcgtgagggacgaggccgagcggtgtgaggaaatagaaccgggagactggagcggaggcgggaggaggaggagggagaggggatcgagaggaacgcgcgcgaacagaagagaggaaggaagaggaggtggcaggctcggttccgcgcgcgccgacgtgagattccgggccgcacgtgcccgcagtgtgatagatatcatcttgaggtcttcataagtcagcaacctagagcagaaaatgtcagctccggaattcaggacttcttaccagcaatcccctgagaatgtcggtcaactcaaggtctgccaatgtgggtcgggcgactccaattttcagatcacaaataaatccgacggtggcgaaaattcaccaacaacttgtccaaactgtcaggtccttaagagtggaaatttactgctttcatctaaagggattggctggacagtatggaaaaagcgttggtttattcttacaaggacatcattagtgttcttcaggagcgatcctaatgttccccctcccagaggaagtgaaccaattgttacacttggtggaattgacttgaataacactgcaagtatgatagtcaaagaagaaaggaaacttataacagtcgtgtttcctgatggccgtgacggacgcactttcacccttaaggcagaaactacagaagacctaaatgagtggagaagtgcattggagaatgctctggctcaggcacccagtgttgtgaatacagcgggacaacttccagtagtcagcactgacataacagaacctgttgaagctgctgttgaacaatcagagaataagtctgtaattggcagaccagcagaatttgcacttgtcgatgctgatggcactacagcattcctgcagaaggccttaaagttcatcgaagattatggtgttaaggtcgaaggaattcttcgtcagtctgctgatgttgaagaagtcaaacgcagggttcaggattacgaaaagggaaagaatgagttctccccagaagaggatgcacatgttatcggtgactgtattaagtgcattcttcgagagatgccatcttctccaattccggcaccatgttgcactgccctggttagagcttaccgaactgacaagacaaaaagactcgatgctatgaatagagtgatatatgaagtattcccagaaccaaatcgtcaattgttgcagaggattctcaaaatgatgcagattgttggatcacacaaagctgtaaataggatgtcttcatctgctttggcagcttgcatggcaccgcttcttctccgtcctcttcttcttggtgaatgtgaaattgatagtgaattcagtatggctggggatggttcattccagttgcttcaagctgctgctgctgccaaccatgcccaagctattgttattattatgcttgaggaatatgatcagatatttgatgtacctgcttttccctggacgtgcttttctttgcaagcttgttctatttgaacccatactgtattgttatggattttaatccaacaattacctgtttaggatattgaagacggttcgtactcttcagatgcttataccgagtctgacattgacaaggaatattctacagacaatgacatccctgaagattatgatggctcctctggttctggtgaagatgttgaagaagatttgaatgatgatactgaacactcttatggcatgaaggtcgaatgtgatagtaacattaggattgataatgcaaatgataaggcaagaaaaggcttgccaacagaggaggatggctgttccagtgataacgacaaggctcatattacgaagcttgaaaacaagaagactcatctccaatctaaacttacggaggaggagaaagaaaatacagtcctccaggcaaatttagaaaaacgaaaagaagcattacacaagcgccgtgtagcacttgaaaaagaagtggaaaatttacgagaccagctactgaaggagagaagtttgagggcttctctggagtctgggctaatgaatatgcgaagaggacaagtgtccttcccctcaacgatagacaccaagactaaggctgatcttgaggaagttgctgccgttgaagctgatattatgaacttgaagcaaaaggtttctgatcttcggggacaactcaacaaccaagttcagttgagttccacctcgttatgtgaatcatgcaacaacaagcgatccataaatgcagacaagcttgtcgaaggtgaacaaaacgctgccctttctccacagattgcctcagtcgaagcaccacctattgtagggtcttattctgtacctgacatgttctgggctacaaaccaaatggttcagaagatgttgtattcaaagggtgagattgcgaaggatggccaagacggatcacttacatcaagatggaactttgcacagagaccacactcaaatagtccagtcatgagcagggttcaaggttccgatgcctattcaagtactaaaaccgaggaatctggaggcgcaccttcctctgcattagcgaagctgactacccgactcaactttttgaaagaaagaagggccttgcttgccagtgagatgcaaaacttagatctgggccgctcccaggcccagaggcatacagctcctccgaaagctgagactccaactgagaagtagaatcgttttactgcatcgttgttaggccacaagctcaggcattcatgtcttcaccctgatgattcatatgtcaagttttttagcgacaccgacgaacaacctgattcttctttctgctggaaatcattactccggctaggccattgaggcccaacgtctatttattccgttatctaaaagcggcctaccgggcccgcaagaaaaggcccgctagggcgccgagacagcggaacgttctctgagtttgagcacgatctccccgggccccggcgccgccgtacgtcccccttcggcgtcgccagccgcctcctggctccggctccttcatcgcctgctccagcgtgcctgcgtgacataagcgtcgattgattggcgagaaaggggacgaatgcagccgccgttgcaggcgcagggagcaatggctaacgtcgccgctatcctcaccgtcccctgctccgcgggccgccgcccgaagcggagcagccagccccgcggatgcggctccgtctccgtctccgtctccgtccgtgcgtcctccggcgcaaacacggtgactctgctggactacggcgcggggaacgtacgcagcgtgcgcaacgcaattcgctacctcggcttcgacatccgcgacgtgcagagcccggaggacatcgtcgccgcggaacggctcgtctttcccggtgtcggcgccttcggctccgccatggacgtcctcaacaggacgggcatggccaacgcactccgtgagtacatccaaagggaccgccccttcctaggcatctgcctcggtctccagctgctcttcgattccagcgaggagaacggcccggtgagcggcctcggtgtgataccaggcgtggtcaggcgattcgactcctcaaatggcctcatagttccacatattggctggaacgctctccagatcaccaaggacacaccactgttgcagggagctgatggccagcatgtgtactttgttcactcctaccgcgtactgccttcagatgctaatagaaactggatttcctccatatgcaactatggtgacagctttatatcctccatctcaatgggcaacattcaggcagttcaatttcacccagaaaagagtggagctaccggactttctattctaaaagaatttctcagacctaactctcttgggaccaaggtcccagcacgtaggaaagcatcaaaacttgcgaagagagtgatagcatgccttgatgttcgttcaaatgataaaggagatcttgtggtaacaaaaggcgatcaatatgatgtaagagatcatactagcagcaaagaggtaagaaaccttggcaagccagtcgatttagcaagccagtactacatagacggtgctgatgaggtcagcttcttgaatataactggtttccgtgactttccattgggtgatttgccaatgctagaggtactgcgttgtgcctctgaaaaggtttttgtgccacttacagttggtgggggcatacgagacttcacagatgcaaatggaagatactactcaagtttggaggtagcatcagaatatttcaggtccggtgctgacaaaatttcaattggaagtgatgctgtttatgctgctgaagcctttttacagactggtgtaaagacagggaaaagcagcttggagcaaatctctagagtatatggcaatcaggctgtagttgtcagtattgatcctcgacgggtatatgtcaaaagtcaagaagatgtgccatttaaaactgtaaaggtgtccactaaaggtccatcgggagaagaatatgcatggtaccagtgcacagtgaatggtggacgtgatagccgagctataggagcatatgaactagcgaaagctgtggaagaattgggcgcaggagaaatacttcttaactgcattgattgtgatggccaaggttgtggatttgacatagatttggttaaaatggtttctgatgctgtgacaatccctgtcattgcgagcagtggtgctggagctgttcaacatttttctgaaatttttgagaaaacaaatgcttctgctgcccttgctgctggcattttccaccggaaagaggttcctatactagcagtgaaagagcatctggtcaatgctggtgtggaggtcagggtgtaacagggagatccttcggtttattgaaatattcttgtttgatgtcacaactgctatcagttctgtttctctgatgtcgcaactgctatcagatctgttggtggcagctggcagtgcataggcccctgtcgagaactgcagtttggtaataaattaataatgtgatgcttaacagattaagcatccgcttcttttgcttgtgtttctatttcccggtgtggattgaccgcctccgacctgtcttgcgtcatattcgtcagctttgtagcatgttaatgttggaggccacgttgctcattcagatagaacaaactaactagcgatgaaaacgag

SEQ ID NO: 7053 - DNA, 1513 bp, Zea Mays
atggagttggaatataaggaaattcaatctgttgcagcagagaataagtctgtaattggcagaccagcagaatttgcacttgtcgatgctgatggcactacagcattcctgcagaaggccttaaagttcatcgaagattatggaaagaatgagttctccccagaagaggatgcacatgttatcggtgactgtattaagtgcattcttcgagagatgccatcttctccaattccggcaccatgttgcactgccctggttagagcttaccgaactgacaagacaaaaagactcgatgctatgaatagagtgatatatgaagtattcccagaaccaaatcgtcaattgttgcagaggatattgaagacggttcgtactcttcagatgcttataccgagtctgacattgacaaggaatattctacagacaatgacatccctgaagattatgatggctcctctggttctggtgaagatgttgaagaagatttgaatgatgatactgaacactcttatggcatgaaggtcgaatgtgatagtaacattaggattgataatgcaaatgataaggtggaaaatttacgagaccagctactgaaggagagaagtttgagggcttctctggagtctgggctaatgaatatgcgaagaggacaagtgtccttcccctcaacgatagacaccaagactaaggctgatcttgaggaagttgctgccgttgaagctgatattatgaacttgaagcaaaaggtttctgatcttcggggacaactcaacaaccaagttcagttgagttccacctcgttatgtgaatcatgcaacaacaagcgatccataaatgcagacaagcttgtcgaattgcctcagtcgaagcaccacctattgtagggtcttattctgtacctgacatgttctgggctacaaaccaaatggttcagaagatgttgtattcaaagggtgagattgcgaaggatggccaagacggatcacttacatcaagatggaactttgcacagagaccacactcaaatagtccagtcatgagcagggttcaaggttccgatgcctattcaagtactaaaaccgaggaatctggaggcgcaccttcctctgcattagcgaagctgactacccgactcaactttttgaaagaaagaagggccttgcttgccagtgagatgcaaaacttagatctgggccgctcccaggcccagaggcatacagctcctccgaaagctgagactccaactgagaagtagaatcgttttactgcatcgttgttaggccacaagctcaggcattcatgtcttcaccctgatgattcatatgtcaagttttttagcgacaccgacgaacaacctggtttgtactattttatctccaaataaacaatactcctactctgggacaaagccaaagtgcgtttgcaaattatttgtcggtctgtctggtactctggtttgtacatcaacttcacttacgatcaagctaagtaaaaataccgtaccatgtgtatc

SEQ ID NO: 7054 - DNA, 2072 bp, Zea Mays
atggagttggaatataaggaaattcaatctgttgcagcagagaataagtctgtaattggcagaccagcagaatttgcacttgtcgatgctgatggcactacagcattcctgcagaaggccttaaagttcatcgaagattatggaaagaatgagttctccccagaagaggatgcacatgttatcggtgactgtattaagtgcattcttcgagagatgccatcttctccaattccggcaccatgttgcactgccctggaactgacaagacaaaaagactcgatgctatgaatagagtgatatatgaagtattcccagaaccaaatcgtcaattgttgcagaggattctcaaaatgatgcagattgttggatcacacaaagctgtaaataggatgtcttcatctgctttggcagcttgcatggcaccgcttcttctccgtcctcttcttcttggtgaatgtgaaattgatagtgaattcagtatggctggggatggttcattccagttgcttcaagctgctgctgctgccaaccatgcccaagctattgttattattatgcttgaggaatatgatcagatatttgatgtacctgcttttccctggacgtgcttttctttgcaagcttgttctatttgaacccatactgtattgttatggattttaatccaacaattacctgtttaggatattgaagacggttcgtactcttcagatgcttataccgagtctgacattgacaaggaatattctacagacaatgacatccctgaagattatgatggctcctctggttctggtgaagatgttgaagaagatttgaatgatgatactgaacactcttatggcatgaaggtcgaatgtgatagtaacattaggattgataatgcaaatgataaggcaagaaaaggcttgccaacagaggaggatggctgttccagtgataacgacaaggctcatattacgaagcttgaaaacaagaagactcatctccaatctaaacttacggaggaggagaaagaaaatacagtcctccaggcaaatttagaaaaacgaaaagaagcattacacaagcgccgtgtagcacttgaaaaagaagtggaaaatttacgagaccagctactgaaggagagaagtttgagggcttctctggagtctgggctaatgaatatgcgaagaggacaagtgtccttcccctcaacgatagacaccaagactaaggctgatcttgaggaagttgctgccgttgaagctgatattatgaacttgaagcaaaaggtttctgatcttcggggacaactcaacaaccaagttcagttgagttccacctcgttatgtgaatcatgcaacaacaagcgatccataaatgcagacaagcttgtcgaaggtgaacaaaacgctgccctttctccacagattgcctcagtcgaagcaccacctattgtagggtcttattctgtacctgacatgttctgggctacaaaccaaatggttcagaagatgttgtattcaaagggtgagattgcgaaggatggccaagacggatcacttacatcaagatggaactttgcacagagaccacactcaaatagtccagtcatgagcagggttcaaggttccgatgcctattcaagtactaaaaccgaggaatctggaggcgcaccttcctctgcattagcgaagctgactacccgactcaactttttgaaagaaagaagggccttgcttgccagtgagatgcaaaacttagatctgggccgctcccaggcccagaggcatacagctcctccgaaagctgagactccaactgagaagtagaatcgttttactgcatcgttgttaggccacaagctcaggcattcatgtcttcaccctgatgattcatatgtcaagttttttagcgacaccgacgaacaacctggtttgtactattttatctccaaataaacaatactcctactctgggacaaagccaaagtgcgtttgcaaattatttgtcggtctgtctggtactctggtttgtacatcaacttcacttacgatcaagctaagtaaaaataccgtaccatgtgtatc

SEQ ID NO: 7055 - DNA, 1672 bp, Zea Mays
atggagttggaatataaggaaattcaatctgttgcagcagagaataagtctgtaattggcagaccagcagaatttgcacttgtcgatgctgatggcactacagcattcctgcagaaggccttaaagttcatcgaagattatggaaagaatgagttctccccagaagaggatgcacatgttatcggtgactgtattaagtgcattcttcgagagatgccatcttctccaattccggcaccatgttgcactgccctggttagagcttaccgaactgacaagacaaaaagactcgatgctatgaatagagtgatatatgaagtattcccagaaccaaatcgtcaattgttgcagagacaatgacatccctgaagattatgatggctcctctggttctggtgaagatgttgaagaagatttgaatgatgatactgaacactcttatggcatgaaggtcgaatgtgatagtaacattaggattgataatgcaaatgataaggcaagaaaaggcttgccaacagaggaggatggctgttccagtgataacgacaaggctcatattacgaagcttgaaaacaagaagactcatctccaatctaaacttacggaggaggagaaagaaaatacagtcctccaggcaaatttagaaaaacgaaaagaagcattacacaagcgccgtgtagcacttgaaaaagaagtggaaaatttacgagaccagctactgaaggagagaagtttgagggcttctctggagtctgggctaatgaatatgcgaagaggacaagtgtccttcccctcaacgatagacaccaagactaaggctgatcttgaggaagttgctgccgttgaagctgatattatgaacttgaagcaaaaggtttctgatcttcggggacaactcaacaaccaagttcagttgagttccacctcgttatgtgaatcatgcaacaacaagcgatccataaatgcagacaagcttgtcgaaggtgaacaaaacgctgccctttctccacagattgcctcagtcgaagcaccacctattgtagggtcttattctgtacctgacatgttctgggctacaaaccaaatggttcagaagatgttgtattcaaagggtgagattgcgaaggatggccaagacggatcacttacatcaagatggaactttgcacagagaccacactcaaatagtccagtcatgagcagggttcaaggttccgatgcctattcaagtactaaaaccgaggaatctggaggcgcaccttcctctgcattagcgaagctgactacccgactcaactttttgaaagaaagaagggccttgcttgccagtgagatgcaaaacttagatctgggccgctcccaggcccagaggcatacagctcctccgaaagctgagactccaactgagaagtagaatcgttttactgcatcgttgttaggccacaagctcaggcattcatgtcttcaccctgatgattcatatgtcaagttttttagcgacaccgacgaacaacctggtttgtactattttatctccaaataaacaatactcctactctgggacaaagccaaagtgcgtttgcaaattatttgtcggtctgtctggtactctggtttgtacatcaacttcacttacgatcaagctaagtaaaaataccgtaccatgtgtatc

SEQ ID NO: 7056 - DNA, 1940 bp, Zea Mays
atggagttggaatataaggaaattcaatctgttgcagcagagaataagtctgtaattggcagaccagcagaatttgcacttgtcgatgctgatggcactacagcattcctgcagaaggccttaaagttcatcgaagattatggaaagaatgagttctccccagaagaggatgcacatgttatcggtgactgtattaagtgcattcttcgagagatgccatcttctccaattccggcaccatgttgcactgccctggttagagcttaccgaactgacaagacaaaaagactcgatgctatgaatagagtgatatatgaagtattcccagaaccaaatcgtcaattgttgcagaggattctcaaaatgatgcagattgttggatcacacaaagctgtaaataggatgtcttcatctgctttggcagcttgcatggcaccgcttcttctccgtcctcttcttcttggtgaatgtgaaattgatagtgaattcagtatggctggggatggttcattccagttgcttcaagctgctgctgctgccaaccatgcccaagctattgttattattatgcttgaggaatatgatcagatatttgatgtacctgcttttccctggacgtgcttttctttgcaagcttgttctatttgaacccatactgtattgttatggattttaatccaacaattacctgtttaggatattgaagacggttcgtactcttcagatgcttataccgagtctgacattgacaaggaatattctacagacaatgacatccctgaagattatgatggctcctctggttctggtgaagatgttgaagaagatttgaatgatgatactgaacactcttatggcatgaaggtcgaatgtgatagtaacattaggattgataatgcaaatgataaggcaagaaaaggcttgccaacagaggaggatggctgttccagtgataacgacaagtggaaaatttacgagaccagctactgaaggagagaagtttgagggcttctctggagtctgggctaatgaatatgcgaagaggacaagtgtccttcccctcaacgatagacaccaagactaaggctgatcttgaggaagttgctgccgttgaagctgatattatgaacttgaagcaaaaggtttctgatcttcggggacaactcaacaaccaagttcagttgagttccacctcgttatgtgaatcatgcaacaacaagcgatccataaatgcagacaagcttgtcgaaggtgaacaaaacgctgccctttctccacagattgcctcagtcgaagcaccacctattgtagggtcttattctgtacctgacatgttctgggctacaaaccaaatggttcagaagatgttgtattcaaagggtgagattgcgaaggatggccaagacggatcacttacatcaagatggaactttgcacagagaccacactcaaatagtccagtcatgagcagggttcaaggttccgatgcctattcaagtactaaaaccgaggaatctggaggcgcaccttcctctgcattagcgaagctgactacccgactcaactttttgaaagaaagaagggccttgcttgccagtgagatgcaaaacttagatctgggccgctcccaggcccagaggcatacagctcctccgaaagctgagactccaactgagaagtagaatcgttttactgcatcgttgttaggccacaagctcaggcattcatgtcttcaccctgatgattcatatgtcaagttttttagcgacaccgacgaacaacctggtttgtactattttatctccaaataaacaatactcctactctgggacaaagccaaagtgcgtttgcaaattatttgtcggtctgtctggtactctggtttgtacatcaacttcacttacgatcaagctaagtaaaaataccgtaccatgtgtatc

SEQ ID NO: 7057 - DNA, 1977 bp, Zea Mays
atggagttggaatataaggaaattcaatctgttgcagcagagaataagtctgtaattggcagaccagcagaatttgcacttgtcgatgctgatggcactacagcattcctgcagaaggccttaaagttcatcgaagattatggaaagaatgagttctccccagaagaggatgcacatgttatcggtgactgtattaagtgcattcttcgagagatgccatcttctccaattccggcaccatgttgcactgccctggttagagcttaccgaactgacaagacaaaaagactcgatgctatgaatagagtgatatatgaagtattcccagaaccaaatcgtcaattgttgcagaggattctcaaaatgatgcagattgttggatcacacaaagctgtaaataggatgtcttcatctgctttggcagcttgcatggcaccgcttcttctccgtcctcttcttcttggtgaatgtgaaattgatagtgaattcagtatggctggggatggttcattccagttgcttcaagctgctgctgctgccaaccatgcccaagctattgttattattatgcttgaggaatatgatcagatatttgatgtacctgcttttccctggacgtgcttttctttgcaagcttgttctatttgaacccatactgtattgttatggattttaatccaacaattacctgtttaggatattgaagacggttcgtactcttcagatgcttataccgagtctgacattgacaaggaatattctacagacaatgacatccctgaagattatgatggctcctctggttctggtgaagatgttgaagaagatttgaatgatgatactgaacactcttatggcatgaaggtcgaatgtgatagtaacattaggattgataatgcaaatgataaggtggaaaatttacgagaccagctactgaaggagagaagtttgagggcttctctggagtctgggctaatgaatatgcgaagaggacaagtgtccttcccctcaacgatagacaccaagactaaggctgatcttgaggaagttgctgccgttgaagctgatattatgaacttgaagcaaaaggtttctgatcttcggggacaactcaacaaccaagttcagttgagttccacctcgttatgtgaatcatgcaacaacaagcgatccataaatgcagacaagcttgtcgaaggtgaacaaaacgctgccctttctccacagattgcctcagtcgaagcaccacctattgtagggtcttattctgtacctgacatgttctgggctacaaaccaaatggttcagaagatgttgtattcaaagggtgagattgcgaaggatggccaagacggatcacttacatcaagatggaactttgcacagagaccacactcaaatagtccagtcatgagcagggttcaaggttccgatgcctattcaagtactaaaaccgaggaatctggaggcgcaccttcctctgcattagcgaagctgactacccgactcaactttttgaaagaaagaagggccttgcttgccagtgagatgcaaaacttagatctgggccgctcccaggcccagaggcatacagctcctccgaaagctgagactccaactgagaagtagaatcgttttactgcatcgttgttaggccacaagctcaggtaggattgcaggcagtaacagaaaacttcgattcgacaatgcacagagactatctagctatagagtaacttgatttgtacatcgcacaggcattcatgtcttcaccctgatgattcatatgtcaagttttttagcgacaccgacgaacaacctggtttgtactattttatctccaaataaacaatactcctactctgggacaaagccaaagtgcgtttgcaaattatttgtcggtctgtctggtactctggtttgtacatcaacttcacttacgatcaagctaagtaaaaataccgtaccatgtgtatc

SEQ ID NO: 7058 - DNA, 2689 bp, Zea Mays
cacgtgcccgcaggtttaaacggtggaataaaaacttaagctcacacttgtggtttatgctgaattcaatccagtgaatccgaagctgaccatgaagaactaaaataagctatatgtttcagtaccttctgatatcatcttgaggtcttcataagtcagcaacctagagcagaaaatgtcagctccggaattcaggacttcttaccagcaatcccctgagaatgtcggtcaactcaaggtctgccaatgtgggtcgggcgactccaattttcagatcacaaataaatccgacggtggcgaaaattcaccaacaacttgtccaaactgtcaggtccttaagagtggaaatttactgctttcatctaaagggattggctggacagtatggaaaaagcgttggtttattcttacaaggacatcattagtgttcttcaggagcgatcctaatgttccccctcccagaggaagtgaaccaattgttacacttggtggaattgacttgaataacactgcaagtatgatagtcaaagaagaaaggaaacttataacagtcgtgtttcctgatggccgtgacggacgcactttcacccttaaggcagaaactacagaagacctaaatgagtggagaagtgcattggagaatgctctggctcaggcacccagtgttgtgaatacagcgggacaacttccagtagtcagcactgacataacagaacctgttgaagctgctgttgaacaatcagagaataagtctgtaattggcagaccagcagaatttgcacttgtcgatgctgatggcactacagcattcctgcagaaggccttaaagttcatcgaagattatggaaagaatgagttctccccagaagaggatgcacatgttatcggtgactgtattaagtgcattcttcgagagatgccatcttctccaattccggcaccatgttgcactgccctggttagagcttaccgaactgacaagacaaaaagactcgatgctatgaatagagtgatatatgaagtattcccagaaccaaatcgtcaattgttgcagaggattctcaaaatgatgcagattgttggatcacacaaagctgtaaataggatgtcttcatctgctttggcagcttgcatggcaccgcttcttctccgtcctcttcttcttggtgaatgtgaaattgatagtgaattcagtatggctggggatggttcattccagttgcttcaagctgctgctgctgccaaccatgcccaagctattgttattattatgcttgaggaatatgatcagatatttgatgatattgaagacggttcgtactcttcagatgcttataccgagtctgacattgacaaggaatattctacagacaatgacatccctgaagattatgatggctcctctggttctggtgaagatgttgaagaagatttgaatgatgatactgaacactcttatggcatgaaggtcgaatgtgatagtaacattaggattgataatgcaaatgataaggcaagaaaaggcttgccaacagaggaggatggctgttccagtgataacgacaaggctcatattacgaagcttgaaaacaagaagactcatctccaatctaaacttacggaggaggagaaagaaaatacagtcctccaggcaaatttagaaaaacgaaaagaagcattacacaagcgccgtgtagcacttgaaaaagaagtggaaaatttacgagaccagctactgaaggagagaagtttgagggcttctctggagtctgggctaatgaatatgcgaagaggacaagtgtccttcccctcaacgatagacaccaagactaaggctgatcttgaggaagttgctgccgttgaagctgatattatgaacttgaagcaaaaggtttctgatcttcggggacaactcaacaaccaagttcagttgagttccacctcgttatgtgaatcatgcaacaacaagcgatccataaatgcagacaagcttgtcgaaggtgaacaaaacgctgccctttctccacagattgcctcagtcgaagcaccacctattgtagggtcttattctgtacctgacatgttctgggctacaaaccaaatggttcagaagatgttgtattcaaagggtgagattgcgaaggatggccaagacggatcacttacatcaagatggaactttgcacagagaccacactcaaatagtccagtcatgagcagggttcaaggttccgatgcctattcaagtactaaaaccgaggaatctggaggcgcaccttcctctgcattagcgaagctgactacccgactcaactttttgaaagaaagaagggccttgcttgccagtgagatgcaaaacttagatctgggccgctcccaggcccagaggcatacagctcctccgaaagctgagactccaactgagaagtagaatcgttttactgcatcgttgttaggccacaagctcaggcattcatgtcttcaccctgatgattcatatgtcaagttttttagcgacaccgacgaacaacctggtttgtactattttatctccaaataaacaatactcctactctgggacaaagccaaagtgcgtttgcaaattatttgtcggtctgtctggtactctggtttgtacatcaacttcacttacgatcaagctaagtaaaaataccgtaccatgtgtatc

SEQ ID NO: 7059 - DNA, 2890 bp, Zea Mays
gtcaggtccgggtcatgtgactgggtccgtaggaagtgcgggcgtgagggacgaggccgagcggtgtgaggaaatagaaccgggagactggagcggaggcgggaggaggaggagggagaggggatcgagaggaacgcgcgcgaacagaagagaggaaggaagaggaggtggcaggctcggttccgcgcgcgccgacgtgagattccgggccgcacgtgcccgcagtgtgatagatatcatcttgaggtcttcataagtcagcaacctagagcagaaaatgtcagctccggaattcaggacttcttaccagcaatcccctgagaatgtcggtcaactcaaggtctgccaatgtgggtcgggcgactccaattttcagatcacaaataaatccgacggtggcgaaaattcaccaacaacttgtccaaactgtcaggtccttaagagtggaaatttactgctttcatctaaagggattggctggacagtatggaaaaagcgttggtttattcttacaaggacatcattagtgttcttcaggagcgatcctaatgttccccctcccagaggaagtgaaccaattgttacacttggtggaattgacttgaataacactgcaagtatgatagtcaaagaagaaaggaaacttataacagtcgtgtttcctgatggccgtgacggacgcactttcacccttaaggcagaaactacagaagacctaaatgagtggagaagtgcattggagaatgctctggctcaggcacccagtgttgtgaatacagcgggacaacttccagtagtcagcactgacataacagaacctgttgaagctgctgttgaacaatcagagaataagtctgtaattggcagaccagcagaatttgcacttgtcgatgctgatggcactacagcattcctgcagaaggccttaaagttcatcgaagattatggaaagaatgagttctccccagaagaggatgcacatgttatcggtgactgtattaagtgcattcttcgagagatgccatcttctccaattccggcaccatgttgcactgccctggttagagcttaccgaactgacaagacaaaaagactcgatgctatgaatagagtgatatatgaagtattcccagaaccaaatcgtcaattgttgcagaggattctcaaaatgatgcagattgttggatcacacaaagctgtaaataggatgtcttcatctgctttggcagcttgcatggcaccgcttcttctccgtcctcttcttcttggtgaatgtgaaattgatagtgaattcagtatggctggggatggttcattccagttgcttcaagctgctgctgctgccaaccatgcccaagctattgttattattatgcttgaggaatatgatcagatatttgatgtacctgcttttccctggacgtgcttttctttgcaagcttgttctatttgaacccatactgtattgttatggattttaatccaacaattacctgtttaggatattgaagacggttcgtactcttcagatgcttataccgagtctgacattgacaaggaatattctacagacaatgacatccctgaagattatgatggctcctctggttctggtgaagatgttgaagaagatttgaatgatgatactgaacactcttatggcatgaaggtcgaatgtgatagtaacattaggattgataatgcaaatgataaggcaagaaaaggcttgccaacagaggaggatggctgttccagtgataacgacaaggctcatattacgaagcttgaaaacaagaagactcatctccaatctaaacttacggaggaggagaaagaaaatacagtcctccaggcaaatttagaaaaacgaaaagaagcattacacaagcgccgtgtagcacttgaaaaagaagtggaaaatttacgagaccagctactgaaggagagaagtttgagggcttctctggagtctgggctaatgaatatgcgaagaggacaagtgtccttcccctcaacgatagacaccaagactaaggctgatcttgaggaagttgctgccgttgaagctgatattatgaacttgaagcaaaaggtttctgatcttcggggacaactcaacaaccaagttcagttgagttccacctcgttatgtgaatcatgcaacaacaagcgatccataaatgcagacaagcttgtcgaaggtgaacaaaacgctgccctttctccacagattgcctcagtcgaagcaccacctattgtagggtcttattctgtacctgacatgttctgggctacaaaccaaatggttcagaagatgttgtattcaaagggtgagattgcgaaggatggccaagacggatcacttacatcaagatggaactttgcacagagaccacactcaaatagtccagtcatgagcagggttcaaggttccgatgcctattcaagtactaaaaccgaggaatctggaggcgcaccttcctctgcattagcgaagctgactacccgactcaactttttgaaagaaagaagggccttgcttgccagtgagatgcaaaacttagatctgggccgctcccaggcccagaggcatacagctcctccgaaagctgagactccaactgagaagtagaatcgttttactgcatcgttgttaggccacaagctcaggcattcatgtcttcaccctgatgattcatatgtcaagttttttagcgacaccgacgaacaacctggtttgtactattttatctccaaataaacaatactcctactctgggacaaagccaaagtgcgtttgcaaattatttgtcggtctgtctggtactctggtttgtacatcaacttcacttacgatcaagctaagtaaaaataccgtaccatgtgtatc

SEQ ID NO: 7060 - DNA, 2800 bp, Zea Mays
gtcaggtccgggtcatgtgactgggtccgtaggaagtgcgggcgtgagggacgaggccgagcggtgtgaggaaatagaaccgggagactggagcggaggcgggaggaggaggagggagaggggatcgagaggaacgcgcgcgaacagaagagaggaaggaagaggaggtggcaggctcggttccgcgcgcgccgacgtgagattccgggccgcacgtgcccgcagtgtgatagatatcatcttgaggtcttcataagtcagcaacctagagcagaaaatgtcagctccggaattcaggacttcttaccagcaatcccctgagaatgtcggtcaactcaaggtctgccaatgtgggtcgggcgactccaattttcagatcacaaataaatccgacggtggcgaaaattcaccaacaacttgtccaaactgtcaggtccttaagagtggaaatttactgctttcatctaaagggattggctggacagtatggaaaaagcgttggtttattcttacaaggacatcattagtgttcttcaggagcgatcctaatgttccccctcccagaggaagtgaaccaattgttacacttggtggaattgacttgaataacactgcaagtatgatagtcaaagaagaaaggaaacttataacagtcgtgtttcctgatggccgtgacggacgcactttcacccttaaggttgcttgtgcagaaactacagaagacctaaatgagtggagaagtgcattggagaatgctctggctcaggcacccagtgttgtgaatacagcgggacaacttccagtagtcagcactgacataacagaacctgttgaagctgctgttgaacaatcagagaataagtctgtaattggcagaccagcagaatttgcacttgtcgatgctgatggcactacagcattcctgcagaaggccttaaagttcatcgaagattatggaaagaatgagttctccccagaagaggatgcacatgttatcggtgactgtattaagtgcattcttcgagagatgccatcttctccaattccggcaccatgttgcactgccctggttagagcttaccgaactgacaagacaaaaagactcgatgctatgaatagagtgatatatgaagtattcccagaaccaaatcgtcaattgttgcagaggattctcaaaatgatgcagattgttggatcacacaaagctgtaaataggatgtcttcatctgctttggcagcttgcatggcaccgcttcttctccgtcctcttcttcttggtgaatgtgaaattgatagtgaattcagtatggctggggatggttcattccagttgcttcaagctgctgctgctgccaaccatgcccaagctattgttattattatgcttgaggaatatgatcagatatttgatgatattgaagacggttcgtactcttcagatgcttataccgagtctgacattgacaaggaatattctacagacaatgacatccctgaagattatgatggctcctctggttctggtgaagatgttgaagaagatttgaatgatgatactgaacactcttatggcatgaaggtcgaatgtgatagtaacattaggattgataatgcaaatgataaggcaagaaaaggcttgccaacagaggaggatggctgttccagtgataacgacaaggctcatattacgaagcttgaaaacaagaagactcatctccaatctaaacttacggaggaggagaaagaaaatacagtcctccaggcaaatttagaaaaacgaaaagaagcattacacaagcgccgtgtagcacttgaaaaagaagtggaaaatttacgagaccagctactgaaggagagaagtttgagggcttctctggagtctgggctaatgaatatgcgaagaggacaagtgtccttcccctcaacgatagacaccaagactaaggctgatcttgaggaagttgctgccgttgaagctgatattatgaacttgaagcaaaaggtttctgatcttcggggacaactcaacaaccaagttcagttgagttccacctcgttatgtgaatcatgcaacaacaagcgatccataaatgcagacaagcttgtcgaaggtgaacaaaacgctgccctttctccacagattgcctcagtcgaagcaccacctattgtagggtcttattctgtacctgacatgttctgggctacaaaccaaatggttcagaagatgttgtattcaaagggtgagattgcgaaggatggccaagacggatcacttacatcaagatggaactttgcacagagaccacactcaaatagtccagtcatgagcagggttcaaggttccgatgcctattcaagtactaaaaccgaggaatctggaggcgcaccttcctctgcattagcgaagctgactacccgactcaactttttgaaagaaagaagggccttgcttgccagtgagatgcaaaacttagatctgggccgctcccaggcccagaggcatacagctcctccgaaagctgagactccaactgagaagtagaatcgttttactgcatcgttgttaggccacaagctcaggcattcatgtcttcaccctgatgattcatatgtcaagttttttagcgacaccgacgaacaacctggtttgtactattttatctccaaataaacaatactcctactctgggacaaagccaaagtgcgtttgcaaattatttgtcggtctgtctggtactctggtttgtacatcaacttcacttacgatcaagctaagtaaaaataccgtaccatgtgtatc

SEQ ID NO: 7061 - DNA, 2977 bp, Zea Mays
gtcaggtccgggtcatgtgactgggtccgtaggaagtgcgggcgtgagggacgaggccgagcggtgtgaggaaatagaaccgggagactggagcggaggcgggaggaggaggagggagaggggatcgagaggaacgcgcgcgaacagaagagaggaaggaagaggaggtggcaggctcggttccgcgcgcgccgacgtgagattccgggccgcacgtgcccgcagtgtgatagatatcatcttgaggtcttcataagtcagcaacctagagcagaaaatgtcagctccggaattcaggacttcttaccagcaatcccctgagaatgtcggtcaactcaaggtctgccaatgtgggtcgggcgactccaattttcagatcacaaataaatccgacggtggcgaaaattcaccaacaacttgtccaaactgtcaggtccttaagagtggaaatttactgctttcatctaaagggattggctggacagtatggaaaaagcgttggtttattcttacaaggacatcattagtgttcttcaggagcgatcctaatgttccccctcccagaggaagtgaaccaattgttacacttggtggaattgacttgaataacactgcaagtatgatagtcaaagaagaaaggaaacttataacagtcgtgtttcctgatggccgtgacggacgcactttcacccttaaggcagaaactacagaagacctaaatgagtggagaagtgcattggagaatgctctggctcaggcacccagtgttgtgaatacagcgggacaacttccagtagtcagcactgacataacagaacctgttgaagctgctgttgaacaatagaataagtctgtaattggcagaccagcagaatttgcacttgtcgatgctgatggcactacagcattcctgcagaaggccttaaagttcatcgaagattatggaaagaatgagttctccccagaagaggatgcacatgttatcggtgactgtattaagtgcattcttcgagagatgccatcttctccaattccggcaccatgttgcactgccctggttagagcttaccgaactgacaagacaaaaagactcgatgctatgaatagagtgatatatgaagtattcccagaaccaaatcgtcaattgttgcagaggattctcaaaatgatgcagattgttggatcacacaaagctgtaaataggatgtcttcatctgctttggcagcttgcatggcaccgcttcttctccgtcctcttcttcttggtgaatgtgaaattgatagtgaattcagtatggctggggatggttcattccagttgcttcaagctgctgctgctgccaaccatgcccaagctattgttattattatgcttgaggaatatgatcagatatttgatgtacctgcttttccctggacgtgcttttctttgcaagcttgttctatttgaacccatactgtattgttatggattttaatccaacaattacctgtttaggatattgaagacggttcgtactcttcagatgcttataccgagtctgacattgacaaggaatattctacagacaatgacatccctgaagattatgatggctcctctggttctggtgaagatgttgaagaagatttgaatgatgatactgaacactcttatggcatgaaggtcgaatgtgatagtaacattaggattgataatgcaaatgataaggcaagaaaaggcttgccaacagaggaggatggctgttccagtgataacgacaaggctcatattacgaagcttgaaaacaagaagactcatctccaatctaaacttacggaggaggagaaagaaaatacagtcctccaggcaaatttagaaaaacgaaaagaagcattacacaagcgccgtgtagcacttgaaaaagaagtggaaaatttacgagaccagctactgaaggagagaagtttgagggcttctctggagtctgggctaatgaatatgcgaagaggacaagtgtccttcccctcaacgatagacaccaagactaaggctgatcttgaggaagttgctgccgttgaagctgatattatgaacttgaagcaaaaggtttctgatcttcggggacaactcaacaaccaagttcagttgagttccacctcgttatgtgaatcatgcaacaacaagcgatccataaatgcagacaagcttgtcgaaggtgaacaaaacgctgccctttctccacagattgcctcagtcgaagcaccacctattgtagggtcttattctgtacctgacatgttctgggctacaaaccaaatggttcagaagatgttgtattcaaagggtgagattgcgaaggatggccaagacggatcacttacatcaagatggaactttgcacagagaccacactcaaatagtccagtcatgagcagggttcaaggttccgatgcctattcaagtactaaaaccgaggaatctggaggcgcaccttcctctgcattagcgaagctgactacccgactcaactttttgaaagaaagaagggccttgcttgccagtgagatgcaaaacttagatctgggccgctcccaggcccagaggcatacagctcctccgaaagctgagactccaactgagaagtagaatcgttttactgcatcgttgttaggccacaagctcaggtaggattgcaggcagtaacagaaaacttcgattcgacaatgcacagagactatctagctatagagtaacttgatttgtacatcgcacaggcattcatgtcttcaccctgatgattcatatgtcaagttttttagcgacaccgacgaacaacctggtttgtactattttatctccaaataaacaatactcctactctgggacaaagccaaagtgcgtttgcaaattatttgtcggtctgtctggtactctggtttgtacatcaacttcacttacgatcaagctaagtaaaaataccgtaccatgtgtatc

SEQ ID NO: 7062 - DNA, 920 bp, Zea Mays
cacgtgcccgcaggtttaaacggtggaataaaaacttaagctcacacttgtggtttatgctgaattcaatccagtgaatccgaagctgaccatgaagaactaaaataagctatatgtttcagtaccttctgatatcatcttgaggtcttcataagtcagcaacctagagcagaaaatgtcagctccggaattcaggacttcttaccagcaatcccctgagaatgtcggtcaactcaaggtctgccaatgtgggtcgggcgactccaattttcagatcacaaataaatccgacggtggcgaaaattcaccaacaacttgtccaaactgtcaggtccttaagagtggaaatttactgctttcatctaaagggattggctggacagtatggaaaaagcgttggtttattcttacaaggacatcattagtgttcttcaggagcgatcctaatgttccccctcccagaggaagtgaaccaattgttacacttggtggaattgacttgaataacactgcaagtatgatagtcaaagaagaaaggaaacttataacagtcgtgtttcctgatggccgtgacggacgcactttcacccttaaggcagaaactacagaagacctaaatgagtggagaagtgcattggagaatgctctggctcaggcacccagtgttgtgaatacagcgggacaacttccagtagtcagcactgacataacagaacctgttgaagctgctgttgaacaatagaataagtctgtaattggcagaccagcagaatttgcacttgtcgatgctgatggcactacagcattcctgcagaaggccttaaagttcatcgaagattatggtgttaaggtcgaaggaattcttcgtcagtctgctgatgttgaagaagtcaaacgcagggttcaggattacgaaaagg

SEQ ID NO: 7063 - DNA, 979 bp, Zea Mays
cgggcgtgagggacgaggccgagcggtgtgaggaaatagaaccgggagactggagcggaggcgggaggaggaggagggagaggggatcgagaggaacgcgcgcgaacagaagagaggaaggaagaggaggtggcaggctcggttccgcgcgcgccgacgtgagattccgggccgcacgtgcccgcagatatcatcttgaggtcttcataagtcagcaacctagagcagaaaatgtcagctccggaattcaggacttcttaccagcaatcccctgagaatgtcggtcaactcaaggtctgccaatgtgggtcgggcgactccaattttcagatcacaaataaatccgacggtggcgaaaattcaccaacaacttgtccaaactgtcaggtccttaagagtggaaatttactgctttcatctaaagggattggctggacagtatggaaaaagcgttggtttattcttacaaggacatcattagtgttcttcaggagcgatcctaatgttccccctcccagaggaagtgaaccaattgttacacttggtggaattgacttgaataacactgcaagtatgatagtcaaagaagaaaggaaacttataacagtcgtgtttcctgatggccgtgacggacgcactttcacccttaaggcagaaactacagaagacctaaatgagtggagaagtgcattggagaatgctctggctcaggcacccagtgttgtgaatacagcgggacaacttccagtagtcagcactgacataacagaacctgttgaagctgctgttgaacaatcagagaataagtctgtaattggcagaccagcagaatttgcacttgtcgatgctgatggcactacagcattcctgcagaaggccttaaagttcatcgaagattatggtgttaaggtcgaaggaattcttcgtcagtctgctgatgttgaagaagtcaaacgcagggttcaggattacgaaaagg

SEQ ID NO: 7064 - DNA, 1002 bp, Zea Mays
cgggcgtgagggacgaggccgagcggtgtgaggaaatagaaccgggagactggagcggaggcgggaggaggaggagggagaggggatcgagaggaacgcgcgcgaacagaagagaggaaggaagaggaggtggcaggctcggttccgcgcgcgccgacgtgagattccgggccgcacgtgcccgcagtgtgatagatatcatcttgaggtcttcataagtcagcaacctagagcagaaaatgtcagctccggaattcaggacttcttaccagcaagtatcatcttcgcagtcccctgagaatgtcggtcaactcaaggtctgccaatgtgggtcgggcgactccaattttcagatcacaaataaatccgacggtggcgaaaattcaccaacaacttgtccaaactgtcaggtccttaagagtggaaatttactgctttcatctaaagggattggctggacagtatggaaaaagcgttggtttattcttacaaggacatcattagtgttcttcaggagcgatcctaatgttccccctcccagaggaagtgaaccaattgttacacttggtggaattgacttgaataacactgcaagtatgatagtcaaagaagaaaggaaacttataacagtcgtgtttcctgatggccgtgacggacgcactttcacccttaaggcagaaactacagaagacctaaatgagtggagaagtgcattggagaatgctctggctcaggcacccagtgttgtgaatacagcgggacaacttccagtagtcagcactgacataacagaacctgttgaagctgctgttgaacaatcagagaataagtctgtaattggcagaccagcagaatttgcacttgtcgatgctgatggcactacagcattcctgcagaaggccttaaagttcatcgaagattatggtgttaaggtcgaaggaattcttcgtcagtctgctgatgttgaagaagtcaaacgcagggttcaggattacgaaaagg

SEQ ID NO: 7065 - DNA, 1357 bp, Zea Mays
agatagggctgttttgcagcggtggcccaaaacatgcagaaaggctgcaagggccgaatttttttccaaatcgttccttctacacactgtcgaggagggcagcgggaagggacgagtcgacgccggtgtgcggtggcggcggtcgcgcggtaacgtttcccttcagcttcgatcatgttggtggcggcgccggccacaaaaggctcacccaccaaggatttgacggctgtcgagcccggggacgaggtggcgcagtcggtgttcgacgcagggggagctatgggttcggtctcggtttgtcaggcgaatggcaaccaccagccgccgccgccgcaggcagaagcggagcaggtcgtcgaggatggcgttgccgtcgacaggatcaatggcaactaccagccgctggagctggtggctgaggcggggcaggtcgtcgaggagggcgatgccggcgtgaccatggaaggcgtcgcttccatcgccttgctgcctaccggtgccatctccggccatttcattcgcctccctgactccatctgctacgggctacacggcacccatcaacatttccattgttatacacagcattttttggaaacaaaatcaatatcttgcgagagggaatgtagccgaggagaggactaccgccttataaagctcaccatcattgattttaagagcaagagagagaaggtgcttgtggtggaatgcaggggccatgatgctgctcgattacaaaacattgaccatttgcatgggtgggaagatgacattgttggtttggttgagaaggagcacggaaatcagaaagtcttgctctcctttgaatgcgagacgctgaaggctgataaagacgcggaagatcatattgccaaatatatgccaaatctgtgtggactggacgcagttgtaaatatagggaaaatgagcatctcaggcatcaatctcgacgaggacgccgaaccaagaggggacaactgagcgtgtgaacagtggtcattgttcatcagcactggtaaactctgcacgaatcacatcaaacgcttacactgcactacatatggcagtttgatacgtgtctcattaccagtgcctgtacttaaaattctgtggctgtgaatcggattcaaaaccctttatacgtttcaactttcaagttaccacgtcgcttcttgcacgaatcccaagggtcggttgctcctgctgggtgcatttcttgtctgtggcggtactgtttgtcacgctttgtacgtatgactagcattgcttgtctgtttatgagagtggtgctgtgtttcgtctgttctgttgctaccatgaagagggcccccgggttcgtccgtgaggcacatggctt

SEQ ID NO: 7066 - DNA, 1886 bp, Zea Mays
agatagggctgttttgcagcggtggcccaaaacatgcagaaaggctgcaagggccgaatttttttccaaatcgttccttctacacactgtcgaggagggcagcgggaagggacgagtcgacgccggtgtgcggtggcggcggtcgcgcggtaacgtttcccttcagcttcgatcatgttggtggcggcgccggccacaaaaggctcacccaccaaggatttgacggctgtcgagcccggggacgaggtggcgcagtcggtgttcgacgcagggggagctatgggttcggtctcggtttgtcaggcgaatggcaaccaccagccgccgccgccgcaggcagaagcggagcaggtcgtcgaggatggcgttgccgtcgacaggatcaatggcaactaccagccgctggagctggtggctgaggcggggcaggtcgtcgaggagggcgatgccggcgtgaccatggaaggcgtcgcttccatcgccttgctgcctaccggtgccatctccggccatttcattcgcctccctgactccatctgctacgggctacacggcacccatgaatggtaatcttataaatcataagagggtttctcatctgttggaattatgtcacctctctttggcgccaccatcccgagcaataccagtcaccagatcaacatttccattgttatacacagcattttttggaaacaaaatgtacgtataaaagtaaaactgtataacctgttgtataacctgttgaatcaggagcttcctttttatgctactgaattattttagattcagtaaaaaagggctagattagtcactttgatctttttggtagatacggtgtatagtttcagtgagataatgtgttctttgcaccagttcaccacctgtgtctttacttttttgctatatagaacacaagataagtttgaaattatatattatcataagaagattttagcttattttgctgttttcttcctttttctattatgttagcaatatcttgcgagagggaatgtagccgaggagaggactaccgccttataaagctcaccatcattgattttaagagcaagagagagaaggtgcttgtggtggaatgcaggggccatgatgctgctcgattacaaaacattgaccatttgcatgggtgggaagatgacattgttggtttggttgagaaggagcacggaaatcagaaagtcttgctctcctttgaatgcgagacgctgaaggctgataaagacgcggaagatcatattgccaaatatatgccaaatctgtgtggactggacgcagttggtaacggcaacgtcaatggtatctaaaatcggtgcttactgttacagtgcaaaagataccgccatttgtttgattgggtgtgctaattattttcactcccttaaatcgcctccacccggcaaagggatcggatagagtaaatatagggaaaatgagcatctcaggcatcaatctcgacgaggacgccgaaccaagaggggacaactgagcgtgtgaacagtggtcattgttcatcagcactggtaaactctgcacgaatcacatcaaacgcttacactgcactacatatggcagtttgatacgtgtctcattaccagtgcctgtacttaaaattctgtggctgtgaatcggattcaaaaccctttatacgtttcaactttcaagttaccacgtcgcttcttgcacgaatcccaagggtcggttgctcctgctgggtgcatttcttgtctgtggcggtactgtttgtcacgctttgtacgtatgactagcattgcttgtctgtttatgagagtggtgctgtgtttcgtctgttctgttgctaccatgaagagggcccccgggttcgtccgtgaggcacatggctt

SEQ ID NO: 7067 - DNA, 1062 bp, Zea Mays
agatagggctgttttgcagcggtggcccaaaacatgcagaaaggctgcaagggccgaatttttttccaaatcgttccttctacacactgtcgaggagggcagcgggaagggacgagtcgacgccggtgtgcggtggcggcggtcgcgcggtaacgtttcccttcagcttcgatcatgttggtggcggcgccggccacaaaaggctcacccaccaaggatttgacggctgtcgagcccggggacgagagcaagagagagaaggtgcttgtggtggaatgcaggggccatgatgctgctcgattacaaaacattgaccatttgcatgggtgggaagatgacattgttggtttggttgagaaggagcacggaaatcagaaagtcttgctctcctttgaatgcgagacgctgaaggctgataaagacgcggaagatcatattgccaaatatatgccaaatctgtgtggactggacgcagttggtaacggcaacgtcaatggtatctaaaatcggtgcttactgttacagtgcaaaagataccgccatttgtttgattgggtgtgctaattattttcactcccttaaatcgcctccacccggcaaagggatcggatagagtaaatatagggaaaatgagcatctcaggcatcaatctcgacgaggacgccgaaccaagaggggacaactgagcgtgtgaacagtggtcattgttcatcagcactggtaaactctgcacgaatcacatcaaacgcttacactgcactacatatggcagtttgatacgtgtctcattaccagtgcctgtacttaaaattctgtggctgtgaatcggattcaaaaccctttatacgtttcaactttcaagttaccacgtcgcttcttgcacgaatcccaagggtcggttgctcctgctgggtgcatttcttgtctgtggcggtactgtttgtcacgctttgtacgtatgactagcattgcttgtctgtttatgagagtggtgctgtgtttcgtctgttctgttgctaccatgaagagggcccccgggttcgtccgtgaggcacatggctt

SEQ ID NO: 7068 - DNA, 1469 bp, Zea Mays
gtcacgaaagggccagatagggctgttttgcagcggtggcccaaaacatgcagaaaggctgcaagggccgaatttttttccaaatcgttccttctacacactgtcgaggagggcagcgggaagggacgagtcgacgccggtgtgcggtggcggcggtcgcgcggtaacgtttcccttcagcttcgatcatgttggtggcggcgccggccacaaaaggctcacccaccaaggatttgacggctgtcgagcccggggacgaggtggcgcagtcggtgttcgacgcagggggagctatgggttcggtctcggtttgtcaggcgaatggcaaccaccagccgccgccgccgcaggcagaagcggagcaggtcgtcgaggatggcgttgccgtcgacaggatcaatggcaactaccagccgctggagctggtggctgaggcggggcaggtcgtcgaggagggcgatgccggcgtgaccatggaaggcgtcgcttccatcgccttgctgcctaccggtgccatctccggccatttcattcgcctccctgactccatctgctacgggctacacggcacccatgaatggtaatcttataaatcataagagggtttctcatctgttggaattatgtcacctctctttggcgccaccatcccgagcaataccagtcaccagatcaacatttccattgttatacacagcattttttggaaacaaaatcaatatcttgcgagagggaatgtagccgaggagaggactaccgccttataaagctcaccatcattgattttaagagcaagagagagaaggtgcttgtggtggaatgcaggggccatgatgctgctcgattacaaaacattgaccatttgcatgggtgggaagatgacattgttggtttggttgagaaggagcacggaaatcagaaagtcttgctctcctttgaatgcgagacgctgaaggctgataaagacgcggaagatcatattgccaaatatatgccaaatctgtgtggactggacgcagttgtaaatatagggaaaatgagcatctcaggcatcaatctcgacgaggacgccgaaccaagaggggacaactgagcgtgtgaacagtggtcattgttcatcagcactggtaaactctgcacgaatcacatcaaacgcttacactgcactacatatggcagtttgatacgtgtctcattaccagtgcctgtacttaaaattctgtggctgtgaatcggattcaaaaccctttatacgtttcaactttcaagttaccacgtcgcttcttgcacgaatcccaagggtcggttgctcctgctgggtgcatttcttgtctgtggcggtactgtttgtcacgctttgtacgtatgactagcattgcttgtctgtttatgagagtggtgctgtgtttcgtctgttctgttgctaccatgaagagggcccccgggttcgtccgtgaggcacatggctt

SEQ ID NO: 7069 - DNA, 1040 bp, Zea Mays
ctgaacatgatttggtttcagggcgcagtcacgaaagggccagatagggctgttttgcagcggtggcccaaaacatgcagaaaggctgcaagggccgaatttttttccaaatcgttccttctacacactgtcgaggagggcagcgggaagggacgagtcgacgccggtgtgcggtggcggcggtcgcgcggtaacgtttcccttcagcttcgatcatgttggtggcggcgccggccacaaaaggctcacccaccaaggatttgacggctgtcgagcccggggacgagcaatatcttgcgagagggaatgtagccgaggagaggactaccgccttataaagctcaccatcattgattttaagagcaagagagagaaggtgcttgtggtggaatgcaggggccatgatgctgctcgattacaaaacattgaccatttgcatgggtgggaagatgacattgttggtttggttgagaaggagcacggaaatcagaaagtcttgctctcctttgaatgcgagacgctgaaggctgataaagacgcggaagatcatattgccaaatatatgccaaatctgtgtggactggacgcagttgtaaatatagggaaaatgagcatctcaggcatcaatctcgacgaggacgccgaaccaagaggggacaactgagcgtgtgaacagtggtcattgttcatcagcactggtaaactctgcacgaatcacatcaaacgcttacactgcactacatatggcagtttgatacgtgtctcattaccagtgcctgtacttaaaattctgtggctgtgaatcggattcaaaaccctttatacgtttcaactttcaagttaccacgtcgcttcttgcacgaatcccaagggtcggttgctcctgctgggtgcatttcttgtctgtggcggtactgtttgtcacgctttgtacgtatgactagcattgcttgtctgtttatgagagtggtgctgtgtttcgtctgttctgttgctaccatgaagagggcccccgggttcgtccgtgaggcacatggctt

SEQ ID NO: 7070 - DNA, 1831 bp, Zea Mays
ctgaacatgatttggtttcagggcgcagtcacgaaagggccagatagggctgttttgcagcggtggcccaaaacatgcagaaaggctgcaagggccgaatttttttccaaatcgttccttctacacactgtcgaggagggcagcgggaagggacgagtcgacgccggtgtgcggtggcggcggtcgcgcggtaacgtttcccttcagcttcgatcatgttggtggcggcgccggccacaaaaggctcacccaccaaggatttgacggctgtcgagcccggggacgagggcatgccctgagtcgtgagaggtgacaggaaacttgttcatagtcgttttcgctaccgtaggtggcgcagtcggtgttcgacgcagggggagctatgggttcggtctcggtttgtcaggcgaatggcaaccaccagccgccgccgccgcaggcagaagcggagcaggtcgtcgaggatggcgttgccgtcgacaggatcaatggcaactaccagccgctggagctggtggctgaggcggggcaggtcgtcgaggagggcgatgccggcgtgaccatggaaggcgtcgcttccatcgccttgctgcctaccggtgccatctccggccatttcattcgcctccctgactccatctgctacgggctacacggcacccgtattcatctctccccattccccttacagcagttgttggttccttccaagtttcacgcttgggaaaaatattgttatgttattctcatttctaaattctaacggaagtcactagtgtttttttttcaatgcacaagatgaatggtaatcttataaatcataagagggtttctcatctgttggaattatgtcacctctctttggcgccaccatcccgagcaataccagtcaccagatcaacatttccattgttatacacagcattttttggaaacaaaatcaatatcttgcgagagggaatgtagccgaggagaggactaccgccttataaagctcaccatcattgattttaagagcaagagagagaaggtgcttgtggtggaatgcaggggccatgatgctgctcgattacaaaacattgaccatttgcatgggtgggaagatgacattgttggtttggttgagaaggagcacggaaatcagaaagtcttgctctcctttgaatgcgagacgctgaaggctgataaagacgcggaagatcatattgccaaatatatgccaaatctgtgtggactggacgcagttggtaacggcaacgtcaatggtatctaaaatcggtgcttactgttacagtgcaaaagataccgccatttgtttgattgggtgtgctaattattttcactcccttaaatcgcctccacccggcaaagggatcggatagagtaaatatagggaaaatgagcatctcaggcatcaatctcgacgaggacgccgaaccaagaggggacaactgagcgtgtgaacagtggtcattgttcatcagcactggtaaactctgcacgaatcacatcaaacgcttacactgcactacatatggcagtttgatacgtgtctcattaccagtgcctgtacttaaaattctgtggctgtgaatcggattcaaaaccctttatacgtttcaactttcaagttaccacgtcgcttcttgcacgaatcccaagggtcggttgctcctgctgggtgcatttcttgtctgtggcggtactgtttgtcacgctttgtacgtatgactagcattgcttgtctgtttatgagagtggtgctgtgtttcgtctgttctgttgctaccatgaagagggcccccgggttcgtccgtgaggcacatggctt

SEQ ID NO: 7071 - DNA, 1828 bp, Zea Mays
cgacaatttactcgtcggtccagggaccccggggtcgaaatgccgacagatatataccactactatttgtaggggataatatgcaccgcgattttgatgtagtgagatgaaaaggtacaccaaattgtagaaatctgaacatgatttggtttcagggcgcagtcacgaaagggccagatagggctgttttgcagcggtggcccaaaacatgcagaaaggctgcaagggccgaatttttttccaaatcgttccttctacacactgtcgaggagggcagcgggaagggacgagtcgacgccggtgtgcggtggcggcggtcgcgcggtaacgtttcccttcagcttcgatcatgttggtggcggcgccggccacaaaaggctcacccaccaaggatttgacggctgtcgagcccggggacgagggcatgccctgagtcgtgagaggtgacaggaaacttgttcatagtcgttttcgctaccgtaggtggcgcagtcggtgttcgacgcagggggagctatgggttcggtctcggtttgtcaggcgaatggcaaccaccagccgccgccgccgcaggcagaagcggagcaggtcgtcgaggatggcgttgccgtcgacaggatcaatggcaactaccagccgctggagctggtggctgaggcggggcaggtcgtcgaggagggcgatgccggcgtgaccatggaaggcgtcgcttccatcgccttgctgcctaccggtgccatctccggccatttcattcgcctccctgactccatctgctacgggctacacggcacccgtattcatctctccccattccccttacagcagttgttggttccttccaagtttcacgcttgggaaaaatattgttatgttattctcatttctaaattctaacggaagtcactagtgtttttttttcaatgcacaagatgaatggtaatcttataaatcataagagggtttctcatctgttggaattatgtcacctctctttggcgccaccatcccgagcaataccagtcaccagatcaacatttccattgttatacacagcattttttggaaacaaaatcaatatcttgcgagagggaatgtagccgaggagaggactaccgccttataaagctcaccatcattgattttaagagcaagagagagaaggtgcttgtggtggaatgcaggggccatgatgctgctcgattacaaaacattgaccatttgcatgggtgggaagatgacattgttggtttggttgagaaggagcacggaaatcagaaagtcttgctctcctttgaatgcgagacgctgaaggctgataaagacgcggaagatcatattgccaaatatatgccaaatctgtgtggactggacgcagttgtaaatatagggaaaatgagcatctcaggcatcaatctcgacgaggacgccgaaccaagaggggacaactgagcgtgtgaacagtggtcattgttcatcagcactggtaaactctgcacgaatcacatcaaacgcttacactgcactacatatggcagtttgatacgtgtctcattaccagtgcctgtacttaaaattctgtggctgtgaatcggattcaaaaccctttatacgtttcaactttcaagttaccacgtcgcttcttgcacgaatcccaagggtcggttgctcctgctgggtgcatttcttgtctgtggcggtactgtttgtcacgctttgtacgtatgactagcattgcttgtctgtttatgagagtggtgctgtgtttcgtctgttctgttgctaccatgaagagggcccccgggttcgtccgtgaggcacatggctt

SEQ ID NO: 7072 - DNA, 652 bp, Zea Mays
acttcaccagttcacccactaggactaggagcaggagaggggagagaaaacctcgccgtcaatgtcagcgttcgttcccaagggcgctagggtttaaccccccaactgttcggtctctctctctccccgaatccaattcagcgtcatctagtccgggagcctgcgacatggggtacctccaggaggcccgggagaatcacgtcaagaagaaggtcgaggaagctttgcggagcaaaatgaaacaaaaggctcttcaggaatgtgatttctattgttcaaaatatgctgagtgtgcacggggaagaacattttctgtggtatggcaatgccgcaaacaagcaaaagagttgaatgagtgccttcatcaatacacaaatgatgcaatcctggaagaaatgaagaaggcttatatgattgagcaaaagagcaaggagataaatcaataagcaaaaatccaatgcgcaatgtgcatcacaatcaccctgcttcaagtaattttgcaagtggaatatagatcaatctgaagctatgcatctgtgtgaattgtgccagaggaaacatattcaattatttgggttcagcaagatggggtataaaccttatcaagttggaaagtaaggctatttccgctctccaaagagatgagtagtcc

SEQ ID NO: 7073 - DNA, 712 bp, Zea Mays
aagcacttcaccagttcacccactaggactaggagcaggagaggggagagaaaacctcgccgtcaatgtcagcgttcgttcccaagggcgctagggtttaaccccccaactgttcggtctctctctctccccgaatccaattcagcgtcatctagtccgggagcctgcgacatggggtacctccaggaggcccgggagaatcacgtcaagaagaaggtcgaggaagctttgcggagcaaaatgaaacaaaaggctcttcaggaatgtgatttctattgttcaaaatatgctgagtgtgcacggggaagaacattttctgtggtatggcaatgccgcaaacaagcaaaagagttgaatgagtgccttcatcaatacacaaatgatgcaatcctggaagaaatgaagaaggcttatatgattgagcaaaagagcaaggagataaatcaataagcaaaaatccaatgcgcaatgtgcatcacaatcaccctgcttcagctgttgttggaaagagggaaaagaaaaagatctgcaacttctcagtcgcaatgaaactgagtttgtagctgtcaagtgaatacattagtgttttgtagctgtagcagtgtttaggcatgtaataaaaggaagaaatcttggtgtacaaacaaagcgtggcaaatcaaatgtgtacataaaaatggtatatatgatgatacttgttgtacaaacgaag

SEQ ID NO: 7074 - DNA, 526 bp, Zea Mays
ctaatccacgtgcaaaagcacttcaccagttcacccactaggactaggagcaggagaggggagagaaaacctcgccgtcaatgtcagcgttcgttcccaagggcgctagggtttaaccccccaactgttcggtctctctctctccccgaatccaattcagcgtcatctagtccgggagcctgcgacatggggtacctccaggaggcccgggagaatcacgtcaagaagaaggtcgaggaagtgagccgttaattgatgttgaatctcacaaagaacaaatggttggattaatggattactgttcatcatggacagaagctttgcggagcaaaatgaaacaaaaggctcttcaggaatgtgatttctattgttcaaaatatgctgagtgtgcacggggaagaacattttctgtggtatggcaatgccgcaaacaagcaaaagagttgaatgagtgccttcatcaataaataataggagatgtgtgtatcattgcattaaggagataaatatgtaaattagaagacat

SEQ ID NO: 7075 - DNA, 482 bp, Zea Mays
ccgacggacgactcaacagcccaacttcagcaactaatccacgtgcaaaagcacttcaccagttcacccactaggactaggagcaggagaggggagagaaaacctcgccgtcaatgtcagcgttcgttcccaagggcgctagggtttaaccccccaactgttcggtctctctctctccccgaatccaattcagcgtcatctagtccgggagcctgcgacatggggtacctccaggaggcccgggagaatcacgtcaagaagaaggtcgaggaagctttgcggagcaaaatgaaacaaaaggctcttcaggaatgtgatttctattgttcaaaatatgctgagtgtgcacggggaagaacattttctgtggtatggcaatgccgcaaacaagcaaaagagttgaatgagtgccttcatcaataaataataggagatgtgtgtatcattgcattaaggagataaatatgtaaattagaagacat

SEQ ID NO: 7076 - DNA, 2636 bp, Zea Mays
aagaaggcgcacgacggagtgcgtcttcccccctctagtttatctgctgcccaagcgacaggcccacacccccgcattactgcggcaccagcacacgttgcagaagccagaagagaaggccatcccagaacgtcacgctgaaaggggcatcgatgagctgtttttgcagatgagccggagactgagcctgacaaagagtctcgtgatctataactaaggctctgcaaaacttggagactacccaattcccaaaagaagcagcatcggcgggcacagcaacacagcgcaggtttgcccgtccacagcaaacaccgtagtccacaagcaagtcacgtttcttctgcacaggcacagagcacagagcaccaatccggtgaccaatataagaagcaggccgccagcagttcaccgccacagcaccaaccccgacaccaccgttggcaaccgcaacccgcaaccagagccatgggcctcttcggcaagagcacctccaagcagaccgccaagctcaagtccctggtcaagctcgccgcggcgcgcctcgccgtcgtccgccggccgcgcctcggccgccggtccatcgcccgtagcgacgtcgggcagctcctctctatcggccatctcgaccgcgcgctcgtccgcgcggagcaggtgatcgaggaggacaacatgctggaggcgctggacgtcatcgagctctactgcaaaatcctcgtcgagcagaccgcgcagctggagaaacccaaggaatgcagcgaggagatcaaggaggcggctgcggggctgatgttcgcgtccgcgcggtgcggcgagctgccggagcttctggacgcgcgcgccatccttgcagacaagttcggccgagacttcgccagggcggccaaggagggcgcccacggcgtcgtcgaccccacgttggtgcggaagttgtccggcgagagggcgagcgtggagcagacgaggaggttggcgaaggagatcgccgccgagaacgacatcttgctggagttccctgagagcccagtagggattcacaaagatggtcgcacgacctcgcaggtcaacagtcagagagcaggagaggaaactaagaatgcaccggccagaacatttgtcgaggagagtgcagtcaagacgggtcgccgtgagggggagcggaattctgttaacggcaaggtgaacccgagccttgctcagctgagcctggatgagaaggtgttgagggagtccaagaagtaccccgacgcaaggatggcggcggaggcagccttcgcgtccgcgaagttcgccgcgatggccgcccgggctgccgtcgagctgtctcggtcggagtcccatgggaagggatcgacgggcggtggctacgacaaggtgccctccgtgcggacgaccgcggcaacggagcaggggacggcgccgccgctgtcgagaccgcacaagtcgccgtcgccgtcgccctcgtggagcgacaggagcacggcgacctcggtcgggtcggacgctgcacacaaggggaaggaggtcgtgttcgaccagagcgacgaggagctggatgacgtcgtctggcctccgccgcagcgccggccatcctaccggaggacggcctccacggtgggcacagtacatgcgtcggcccgtgacacgggcacgccggctgcacagctggcgcgcccgcagcacaggcgtcacgccacggagttatccgccggtaacgctcatgcgcccggcctccacgacgccctggcaggccagcgcaggcagcacgtgaccccgccgtacaggagggcctcaacggccagcacgggcagaaacagcgacgctgcggcgctggacgacggcggcgcgtacgagagctcgccgtacgtgcagccgccgtactcgaggatggcgtcggcgctggagcgcagcaacgggcacatcgcgcggcacgaggaggtgcgcaggatgggcacggacgcgcgggcgctccaggagcgggtgtacggcgcggcggcgccagggcaggggcacggcccgctggacccggagaggaggaccacctcggtgcgcacgcggagatgagcgttttcgtggcctggctggctagtggctactcgcctactcgtcattcgtcagttcagtgttcagcattgcaggagatcgggtccgttgcttcccgagcagagtggcggtttttggtgcggggtcgatggagatttcctgcctctggaaattaaatgcacatggggaaatgcacatgggtagaatcaaacagaagtatattttgctagaaattcaggattgttcatggagctgaatatggatggatacatgcatactggtgggtaggtggcccttttgtattgtactccctccgtctcaggatataaggcgtaaccactttttattcttgtcccacaatataaggcgtgctctctctatgcatacgcatatcgatgcagtggtatagagacaattaaatgcatttcttggtctttgaaccagaggtggttacgccttatatactgggacggagggagtacagaggaaggatcgagtattaattaattaagttgtactgtaattagctgcgagctgtgttttgtttcctgtagaaactgaggagttttgcttcatggtaggtgttcctaacctgc

SEQ ID NO: 7077 - DNA, 1293 bp, Zea Mays
atggcgccttcccaatccagagccgttgccattcttctgcatccgatctgcagcctctctgacatccaccagtggcctgctggtttgtcgtggccgtgcctcgcggcctccgccttgctggtccaccgtggtcgtgcttccccgccaccggcctgcatgttttccgtggactgcccgtccgctcctgtgctgtccggtgtccgctgcgacctccctgtccgcgccatccgtccccgccctccgtcatcctgccagttcatcgggtgcactcgtctgctgagcgctgctgctccccccatccaaagctccacactcctccagaaagtctggatagctctgctcgtgctgtattctgctcactgctctgttgctgtgctctactctgttcactgctgtgctgttgtgctctactctgctatcttcataggatggctaagacagagccaggctgctgttgttccccctgctgtgcatgccccaattgctgtgggagagaatcaaagtgatcctaaggttcatcttaaaagaaaaatcaaatgatattggatgggaatggggaaggctatttgatccaagactccaagtgacaagaataaattaaagtgcctactttgtggccataagagctccaaaggtattaattgattcaagcagcaccttgcacatgaagggagttcagttcttcagtgcacaaaattaacccccaaaattaaacagaagtgcaaagaagatcttgatcgtccaaaaaagaataaaagggacaagctaagggcggagacagatctcagagatgatgtgataattacaggaggcagagaagggtcagaggctgaatccagggctgggagcttatcagagggttccccaattcaaaatctaggtcctatggatagatgggcacgacctattgatcctaaagcaaccaaagaagaagttaagatgcaacaaagtttaaatgaaacgctttggaaggagaggacacatcaagtgcatcaagccatcaatatagtgctacattggtatacactcatggaccgtgaagaagacaagaacaaaaatggttgttcggtcatgactgatgcttggacagatatgaagaggagtatactgaatgtgtgcacacatacttcagaggggtaagttttatgaagtccaaggagatttcagatgtatcgtatcacacacaattgaggtcatatttgaaatgatggacaaaacaattaatgaattagaagcagacaatgtggtgcatgttgtgaaagataatgcctctaataacatggcagcaaaaac

SEQ ID NO: 7078 - DNA, 420 bp, Zea Mays
cagggcaagggttatatgggctgacaaaaccctggaaaaggaagtgctgattcaataggggcatgccaaaaattgaaggtagacctccaagcagcattcaatgtactgccgaaggacttgcagcaactcctgctctccaaccctaaaagagctgttcttcttcaaggtagtcaagagaaggccctgggtgccaatggcattggcacccagacaagtttgtagcagccccctctgtaacattaccattgtcactattttttgcacacataatacaaagttacacatttatatacacccacgtttgtcagatctgtctctttccttcgttcttcctctattaattttccataataaccctattggtaaggcatgtaaatcttaacagacaagcagagcggctactgcttctctacgtacgca

SEQ ID NO: 7079 - DNA, 2115 bp, Zea Mays
atcagcctcaactcctgatccgccggacgggacacacactgatccatcccgctcggctgcaacgctcacacccacacccaccacgccggctgcaggcacgcaccacggtaccagccgccagcgcacgcccgccaagccgccagcgagaaaacaccgaaccattcgccctcccggccgacatcacgaccgcccgatccggccggagcctctccctaccccttccgcgcctccgcgctgacgaccgtcgcggcgtccgcccctcgagtccaaccccaattctgccgtggccgcggctctctgaatccccaattttttcacttcccccaagggccgcggggatgaaccggatcccgtccgtctcgctgcggggcggcggggcgaacgaggacgccgcggcggcgtcgccgccccccgatcccgcggcgctgtcgcggtgggtgcgggccttctgtgtcatccggttcgacctggagcgcgggcagctggtggaggcctgcttccctcccgacgcgctgacggcgcccggcagcggcctcgaccgcctcgtcgccttctcgtccttcccggactccatgtctcaccacctcccgcgccaccgctcctccgtccacgactcgctcttctccttccgcatccccgacccgtcctccccacgccgcgccttcctctacggcttcgttttcaaccgccagcgccaggacgagcgcctcccccgcggcggcgagcagaagtccgtagtcatcctctcccacgccccctactcctcgctcttccgcctgctgctgcagatcctcggcccgctctgctttgacgtcggcccttccgcactggccatggtggcgtcgcacgttgccgtgtggccggcgccggcgccagggcacccaatggagcttccaattggcagtgccgcgctgcgcgtgcacctcccgcctgcggctgacgatcctggcccaccgcctgcgctgctgcccgccaacccctcggtgccgtacggactcttccatgatgctgatctgtttgccgcattccgtggcttactcctccacctatggaccctctgggagctcatggtggttggtgagcccattctggttgttgcgccgtccccagctcagtgctcagaggctgtgtctgcgcttgttagccttgttgctccgcttttgtatagtgtcgacttcaggccatacttcaccatccatgatcccgattttgctcgcttgaatgtgcttgcggaaggcgaggtgttcccgccgatggtacttggagtgaccaacttgtttttcttgaagagtcttaagagcattcccaatgtcgtatccgtgggaagcccaaatccatattcaacaagggtgttaccagtgggtggccaatcgccaggaaatggaatgaatgggacacctgggaaactcaagcttgagaaacttgcaatcaataagttctctccaactagcctattgaattccatcaaattgagaagagaaggtcctctttctctcatgacagagcacaaagaagcattatggagcacgtattcaccaaccacaaagcccgatacttctgttctaaataggctcattgacgctggtgtgtcaccaaggattgaggagtccatgtcagtagtcaacaatgagatattgcggcggcacttcttggagttgacgaccaacttccttgcgccttttgggccgtatctgagaactacaacaccatcagaagggacttcaccttttgttgacccaccattgctaccaccgtttcatgcagatgagttcatcaatggtttggcagctagaggtccagggaagtttttgtccaaaaggatgaggtccaattggttggacctatataggagatttctcgaaggccccaattttatgccttggttccggcaaaggcgtgctgctgcggagcaagaacagcagaggctctggaggcaggctcgcatgaatgttgacattgaaaagctaatgtcaaatatgtccgaaatagagaggattgattcttttgatgctgttgagcgttatcttctcagagagatggaggcgtcgcctaggcatctaggcgcccaaaagatccaaggcgtccccatcgcctaggtaagaatcaagaagagag

SEQ ID NO: 7080 - DNA, 517 bp, Zea Mays
ctcatttatgccttttcagtaatgatgttgccaatctcaacaagacgctatgagcgatttcctttagcacgaaacaatgctgagcaattgtagccattttctggattagccttgattattttattatgtttagctttatcatttgcttttctaaaaactacatatttcggtgactaacacgacaatgcaaccgaggatgataaatggtgagcatgcgacacttcgtcgacactgcccagctacacccagtttcattccctcctggcttctctgattatcgaatttttgtctgagcccgtgtggacgctggagccaaaagagttcccgttgaggagaagcttttcgcggtccaaagagagaggaggcatatgtgtggacgcgagatggctagagccagaggaggagtgcgcacgcagaagagtgaggaggacaacgaatcctcacacctcaccgctaggacgtcgtaggaatggctttgtgattttataatagttctttaacatgagtggattaggcg

SEQ ID NO: 7081 - DNA, 756 bp, Zea Mays
ctggcctgctcctgtccttctggtggcacccgcgacggggggtcgaggccgcgactgtgccgtctgatgctgcagcccgcatcggaggctagtaggtagaaggtgaaggcgtctttgttggtggttctacaaggtgccagccaggtcgtccacgataaccatgtgccggagcccggagtgatggaaagtgacaaagctgggaaccgtctcctcagcgtcgagcccggaatcgagatcaatggcgctcgccaaggccaaggagatcgttgcatctactcctgtcgtcgtcttcagaagtagaaaacttgtgccggtatgagcttcctaatgagagctgggaagtaaatttacctgctcaaaaggtgtctcctgagctcctagaaccaacattaggcataaactttgcaagagatggaatccaggaaaaagagtggttgtccatggttgctgcacacagtgatgcatggttactttatgttgcattttaccttggtgctcaatttggtttcaataaaaattaaaggttaattttcattccatctttatggaatatgtactacaatatctttatcttttactgcctgcctttttttgtttatccgtgatgttttcctactttatgcaaagctttcctacatgcttgctttgtcatgcaaaatattagacctattttgatacgcaacaggtacaaataatatagtataaattataagtactacttaagaactgtgaataaaaatgaatctgcacaatatc

SEQ ID NO: 7082 - DNA, 1838 bp, Zea Mays
ggtgctcacctctgccccctgcgttggatggccgattatcctcatgcccggccgcggtacaacagcaacatccatgaaaccccttcgtgtcgtgccctcgatgtgctcgatgaaataccgcagcgagctccgccccgaatctgcgcaaccctggccttgttgtcgacctcagtatgctagatgattatgtgaattggagggcatggatcaggatggatcacaaggtggctttgatgaacccatctcgatagggacgacttgatcaagtgtcaggattgttgatgctcaccaagcggacgtcatctaaccacactaacctagtgtatcccaggcaagccccagtgcatttgccacctccttgttgttataaaatttttatcacttatatgctgcattaggtgataggagttgagtgatgaaacacttgatgcattgccattccttggaatttgattaccttccttgctacctgttttacaaagagaactaatgagacttagctctgcttagaaaaactaaaagttgtttcttttaaaaaagaatgatgtggaacactgttatgggctttttgtttaaaaatcaaagcaaacttatagtgatgattccccttcggccgaagtgggttcatcattcgaaaagagtacccctgtcgggtaccaaaaatgggaaaatggttggaataaatctagaccagacgctgagcaggaaaggtcgcccgtctgtgtcgtttaaggaccgcaccgaaagtaggcttgctgatctaggaccctttaactggccacatgcctcatcatgggtaagcttagcctcggtcgaaccaataccagaatagctcgcacgcactgggagcggagagatggcgagagtaacatgtgcccacctggcaagtggttggatggtggggtgctgtgctctcgggtcgcgtgaacccgttctggtcttgagaaacccgtgggcgagttgacatatgcaagggttaagtgctacatatgtcgtgtggttggagatcctcagctgagtattaattgattcagatcgccgttacttctcggacatgaagactggatcactgccctgcatcgtagataacaagtgaaattaaagttgataaaatgaagctagtgtaggacaagtaaatgttgtagaccaagcaaatctagattcaggaaaagtacttaatttgtgaagtaaaatttttacataaggatccactactagtaagcttttctgcgaaaatgagtctttgaaatttgataagctttaccttgattcccgataaaccagcatacccttgagagtcttttctttagtcgggtaagtcttgctgagtaattgcgtactcagggttttattccctgttgtttttcaggttgtaattttgttctgttgtggatggtgctaaatgccggtgggctcggccttcttatatagatgtatcccatctttagcttctttattgaggattgttacttaagctaacatgtattttaaaacttataaatgttttatacattcaaattgtaatattttggaatcaatttcttttgtaataaactccgatgatatatattgtaatcttgttataacttgtaaaagttgtaacttgtaaccattttgtaataaagaatttccgctgcaaatgtttgtatgtgagttgtgtttacttaatcctgcgatcttggcggtaagtcgtttatccggggtcctcggggcactcggacagatcctgttaagttgtttggtgcacatgcatagccatctgaggtctttgagacaaggacatgtgcatgtgggcccgataacttggaaggttctgcgacacgtttcgcctgggcgtg

SEQ ID NO: 7083 - DNA, 1835 bp, Zea Mays
gctgccctctctggtgctcacctctgccccctgcgttggatggccggttgctcctgccctagcaacatccatgaaaccccttcgtgtcgtgccctcgatgtgctcgatgaaataccgcagcgagctccgccccgaatctgcgcaaccctggccttgttgtcgacctcagtatgctagatgattatgtgaattggagggcatggatcaggatggatcacaaggtggctttgatgaacccatctcgatagggacgacttgatcaagtgtcaggattgttgatgctcaccaagcggacgtcatctaaccacactaacctagtgtatcccaggcaagccccagtgcatttgccacctccttgttgttataaaatttttatcacttatatgctgcattaggtgataggagttgagtgatgaaacacttgatgcattgccattccttggaatttgattaccttccttgctacctgttttacaaagagaactaatgagacttagctctgcttagaaaaactaaaagttgtttcttttaaaaaagaatgatgtggaacactgttatgggctttttgtttaaaaatcaaagcaaacttatagtgatgattccccttcggccgaagtgggttcatcattcgaaaagagtacccctgtcgggtaccaaaaatgggaaaatggttggaataaatctagaccagacgctgagcaggaaaggtcgcccgtctgtgtcgtttaaggaccgcaccgaaagtaggcttgctgatctaggaccctttaactggccacatgcctcatcatgggtaagcttagcctcggtcgaaccaataccagaatagctcgcacgcactgggagcggagagatggcgagagtaacatgtgcccacctggcaagtggttggatggtggggtgctgtgctctcgggtcgcgtgaacccgttctggtcttgagaaacccgtgggcgagttgacatatgcaagggttaagtgctacatatgtcgtgtggttggagatcctcagctgagtattaattgattcagatcgccgttacttctcggacatgaagactggatcactgccctgcatcgtagataacaagtgaaattaaagttgataaaatgaagctagtgtaggacaagtaaatgttgtagaccaagcaaatctagattcaggaaaagtacttaatttgtgaagtaaaatttttacataaggatccactactagtaagcttttctgcgaaaatgagtctttgaaatttgataagctttaccttgattcccgataaaccagcatacccttgagagtcttttctttagtcgggtaagtcttgctgagtaattgcgtactcagggttttattccctgttgtttttcaggttgtaattttgttctgttgtggatggtgctaaatgccggtgggctcggccttcttatatagatgtatcccatctttagcttctttattgaggattgttacttaagctaacatgtattttaaaacttataaatgttttatacattcaaattgtaatattttggaatcaatttcttttgtaataaactccgatgatatatattgtaatcttgttataacttgtaaaagttgtaacttgtaaccattttgtaataaagaatttccgctgcaaatgtttgtatgtgagttgtgtttacttaatcctgcgatcttggcggtaagtcgtttatccggggtcctcggggcactcggacagatcctgttaagttgtttggtgcacatgcatagccatctgaggtctttgagacaaggacatgtgcatgtgggcccgataacttggaaggttctgcgacacgtttcgcctgggcgtg

SEQ ID NO: 7084 - DNA, 1752 bp, Zea Mays
cttcttccatggatgctggccgtgctgccctctctggtgctcacctctgccccctgcgttggatggccggttgctcctgccctaggtatgctagatgattatgtgaattggagggcatggatcaggatggatcacaaggtggctttgatgaacccatctcgatagggacgacttgatcaagtgtcaggattgttgatgctcaccaagcggacgtcatctaaccacactaacctagtgtatcccaggcaagccccagtgcatttgccacctccttgttgttataaaatttttatcacttatatgctgcattaggtgataggagttgagtgatgaaacacttgatgcattgccattccttggaatttgattaccttccttgctacctgttttacaaagagaactaatgagacttagctctgcttagaaaaactaaaagttgtttcttttaaaaaagaatgatgtggaacactgttatgggctttttgtttaaaaatcaaagcaaacttatagtgatgattccccttcggccgaagtgggttcatcattcgaaaagagtacccctgtcgggtaccaaaaatgggaaaatggttggaataaatctagaccagacgctgagcaggaaaggtcgcccgtctgtgtcgtttaaggaccgcaccgaaagtaggcttgctgatctaggaccctttaactggccacatgcctcatcatgggtaagcttagcctcggtcgaaccaataccagaatagctcgcacgcactgggagcggagagatggcgagagtaacatgtgcccacctggcaagtggttggatggtggggtgctgtgctctcgggtcgcgtgaacccgttctggtcttgagaaacccgtgggcgagttgacatatgcaagggttaagtgctacatatgtcgtgtggttggagatcctcagctgagtattaattgattcagatcgccgttacttctcggacatgaagactggatcactgccctgcatcgtagataacaagtgaaattaaagttgataaaatgaagctagtgtaggacaagtaaatgttgtagaccaagcaaatctagattcaggaaaagtacttaatttgtgaagtaaaatttttacataaggatccactactagtaagcttttctgcgaaaatgagtctttgaaatttgataagctttaccttgattcccgataaaccagcatacccttgagagtcttttctttagtcgggtaagtcttgctgagtaattgcgtactcagggttttattccctgttgtttttcaggttgtaattttgttctgttgtggatggtgctaaatgccggtgggctcggccttcttatatagatgtatcccatctttagcttctttattgaggattgttacttaagctaacatgtattttaaaacttataaatgttttatacattcaaattgtaatattttggaatcaatttcttttgtaataaactccgatgatatatattgtaatcttgttataacttgtaaaagttgtaacttgtaaccattttgtaataaagaatttccgctgcaaatgtttgtatgtgagttgtgtttacttaatcctgcgatcttggcggtaagtcgtttatccggggtcctcggggcactcggacagatcctgttaagttgtttggtgcacatgcatagccatctgaggtctttgagacaaggacatgtgcatgtgggcccgataacttggaaggttctgcgacacgtttcgcctgggcgtg

SEQ ID NO: 7085 - DNA, 1893 bp, Zea Mays
cctctcgccctcatcctctggctgctgccccttcctattcctggtggctgagtcttcttccatggatgctggccgtgctgccctctctgattatcctcatgcccggccgcggtacaacagcaacatccatgaaaccccttcgtgtcgtgccctcgatgtgctcgatgaaataccgcagcgagctccgccccgaatctgcgcaaccctggccttgttgtcgacctcagtatgctagatgattatgtgaattggagggcatggatcaggatggatcacaaggtggctttgatgaacccatctcgatagggacgacttgatcaagtgtcaggattgttgatgctcaccaagcggacgtcatctaaccacactaacctagtgtatcccaggcaagccccagtgcatttgccacctccttgttgttataaaatttttatcacttatatgctgcattaggtgataggagttgagtgatgaaacacttgatgcattgccattccttggaatttgattaccttccttgctacctgttttacaaagagaactaatgagacttagctctgcttagaaaaactaaaagttgtttcttttaaaaaagaatgatgtggaacactgttatgggctttttgtttaaaaatcaaagcaaacttatagtgatgattccccttcggccgaagtgggttcatcattcgaaaagagtacccctgtcgggtaccaaaaatgggaaaatggttggaataaatctagaccagacgctgagcaggaaaggtcgcccgtctgtgtcgtttaaggaccgcaccgaaagtaggcttgctgatctaggaccctttaactggccacatgcctcatcatgggtaagcttagcctcggtcgaaccaataccagaatagctcgcacgcactgggagcggagagatggcgagagtaacatgtgcccacctggcaagtggttggatggtggggtgctgtgctctcgggtcgcgtgaacccgttctggtcttgagaaacccgtgggcgagttgacatatgcaagggttaagtgctacatatgtcgtgtggttggagatcctcagctgagtattaattgattcagatcgccgttacttctcggacatgaagactggatcactgccctgcatcgtagataacaagtgaaattaaagttgataaaatgaagctagtgtaggacaagtaaatgttgtagaccaagcaaatctagattcaggaaaagtacttaatttgtgaagtaaaatttttacataaggatccactactagtaagcttttctgcgaaaatgagtctttgaaatttgataagctttaccttgattcccgataaaccagcatacccttgagagtcttttctttagtcgggtaagtcttgctgagtaattgcgtactcagggttttattccctgttgtttttcaggttgtaattttgttctgttgtggatggtgctaaatgccggtgggctcggccttcttatatagatgtatcccatctttagcttctttattgaggattgttacttaagctaacatgtattttaaaacttataaatgttttatacattcaaattgtaatattttggaatcaatttcttttgtaataaactccgatgatatatattgtaatcttgttataacttgtaaaagttgtaacttgtaaccattttgtaataaagaatttccgctgcaaatgtttgtatgtgagttgtgtttacttaatcctgcgatcttggcggtaagtcgtttatccggggtcctcggggcactcggacagatcctgttaagttgtttggtgcacatgcatagccatctgaggtctttgagacaaggacatgtgcatgtgggcccgataacttggaaggttctgcgacacgtttcgcctgggcgtg

SEQ ID NO: 7086 - DNA, 2066 bp, Zea Mays
gaacgccagtgccgaccaccatctcccatagtgcagagctcccgatcctcctcttgccagggcgccatcgctgagctcgccctgccccagccatggacgccgtcgggccacccgtctcctatctcctctcgccctcatcctctggctgctgccccttcctattcctggtggctgagtcttcttccatggatgctggccgtgctgccctctctggtgctcacctctgccccctgcgttggatggccggttgctcctgccctagattatcctcatgcccggccgcggtacaacagcaacatccatgaaaccccttcgtgtcgtgccctcgatgtgctcgatgaaataccgcagcgagctccgccccgaatctgcgcaaccctggccttgttgtcgacctcagtatgctagatgattatgtgaattggagggcatggatcaggatggatcacaaggtggctttgatgaacccatctcgatagggacgacttgatcaagtgtcaggattgttgatgctcaccaagcggacgtcatctaaccacactaacctagtgtatcccaggcaagccccagtgcatttgccacctccttgttgttataaaatttttatcacttatatgctgcattaggtgataggagttgagtgatgaaacacttgatgcattgccattccttggaatttgattaccttccttgctacctgttttacaaagagaactaatgagacttagctctgcttagaaaaactaaaagttgtttcttttaaaaaagaatgatgtggaacactgttatgggctttttgtttaaaaatcaaagcaaacttatagtgatgattccccttcggccgaagtgggttcatcattcgaaaagagtacccctgtcgggtaccaaaaatgggaaaatggttggaataaatctagaccagacgctgagcaggaaaggtcgcccgtctgtgtcgtttaaggaccgcaccgaaagtaggcttgctgatctaggaccctttaactggccacatgcctcatcatgggtaagcttagcctcggtcgaaccaataccagaatagctcgcacgcactgggagcggagagatggcgagagtaacatgtgcccacctggcaagtggttggatggtggggtgctgtgctctcgggtcgcgtgaacccgttctggtcttgagaaacccgtgggcgagttgacatatgcaagggttaagtgctacatatgtcgtgtggttggagatcctcagctgagtattaattgattcagatcgccgttacttctcggacatgaagactggatcactgccctgcatcgtagataacaagtgaaattaaagttgataaaatgaagctagtgtaggacaagtaaatgttgtagaccaagcaaatctagattcaggaaaagtacttaatttgtgaagtaaaatttttacataaggatccactactagtaagcttttctgcgaaaatgagtctttgaaatttgataagctttaccttgattcccgataaaccagcatacccttgagagtcttttctttagtcgggtaagtcttgctgagtaattgcgtactcagggttttattccctgttgtttttcaggttgtaattttgttctgttgtggatggtgctaaatgccggtgggctcggccttcttatatagatgtatcccatctttagcttctttattgaggattgttacttaagctaacatgtattttaaaacttataaatgttttatacattcaaattgtaatattttggaatcaatttcttttgtaataaactccgatgatatatattgtaatcttgttataacttgtaaaagttgtaacttgtaaccattttgtaataaagaatttccgctgcaaatgtttgtatgtgagttgtgtttacttaatcctgcgatcttggcggtaagtcgtttatccggggtcctcggggcactcggacagatcctgttaagttgtttggtgcacatgcatagccatctgaggtctttgagacaaggacatgtgcatgtgggcccgataacttggaaggttctgcgacacgtttcgcctgggcgtg

SEQ ID NO: 7087 - DNA, 1919 bp, Zea Mays
gtgcggtgagcagagagaggctctggggctctgggccggtgagcccgagcgctccccctcggcgccctacaaataccccgccgctgccgctcctcttcttatcgtgtgacctcccccgatctggagctgaagtgcttgacgccttccgcttccacttccacggcagcacgagccttcttctccttctcgcttagcggctatagcgccagccaaaggagaagtctgcgggcgagtgcgatagatagacacagagaaaccgatagatcatcaaaaaacgagcgaaaaaatcggtccaaaccccaggccggacgcgcgttagagtctccaaagcttatccttccatccactccccgcagccagcttctcttctcgttcccggttatattaataacgcggcggcgtgctctgcttcctccggtttgctctgccctgcttcctaaacacaaacgcgctctgcaccaagaactatatacaacgtagaaactagccgcgccgtcactcccttttgtggcaacctgcagcacgcacttgctgagacaggggtagccttgctataggctagctagtgtcacttgccgaggacaagcaagcaggccggggagacatggcactgacagtgttcgagaccaccgagcagcagctcctcccgtgccagcaggccgtcgagcagggcgctgggcgatggcggggccgccgctgcgggcgccgagaaggctaccgtcacgctgaaggagacggaccgcggcggcgacgacgaccggccggagagggacgacatatggaacatgattcaggcgcagaagccgccgccgcccgccgcgcccaggcaggcgccgtacgtgcacccgctcgtgcgccgctcgtccagcctgctcacccagaagagcctggagatctgcaccgagagcctgggctcggagaccggctcggacggcttctccgacgccgacggctccgcgaccgagcactcgtgccagggctccgacgacgagcgcggggagggggaggaggaggaggaggaggtggtggcccaacgcgcggccccgcccagggcgttcccgccgccgctgccgacgacgaggaggacgaggtcgaggtcgtggacaggggcaccgtggtggaggtgaaggtgagcgcgcagccgcaggcgcgcagcgggaggggcccgcgggtgcaccgctccgcgctcgtcatcaacaagttcgtgggcgccgagccggtcacctcctgcgagatcgacggcgacggcgacggcgccacggctccgcagcacccggtggccaggcgctccactgggtccaccaccacagcggtcgcggccctggcagcggcctcggcgctgagcgcggccgcagcgccgccggacagtggcgacgacgccgtccccggcgccacgtgcggcgagaacaagctcctgatgacggcgaagcggcacagcagcaaggaggagctgatgaagcacatgcgccggtgcagcggccagctcagcccgtcgcttttcgtctgggaggggtgcatcgcaacctcctcctgaacgccgcaccgcagcccagtccacgcgcccgccatcgcccatccgttccgttccatgcatgctttcgacctgctgctgtttgtttgctctgttggttttgtaacgttcgtaacgtagtgctgtcgttgttgctcgcaagtgatgatcgtcacgtcacgtgattggcttagctgtgtgtgtgagagaggtgagggagggacagagagctagcactattggtttggcatgccaccttgtgcgtgccctgcttattgcatctactactctaccaccattttacatttgcatttgcacgctgctgctgctgctgcttctagtgaccgttgttcagtaataagatggactatcttatggccaattgtctgtgtttttttatggatcggag

SEQ ID NO: 7088 - DNA, 3703 bp, Zea Mays
cgccgccaccagagccccgagccacgacgcctccaaatcgatagggttttcgctgccccgctagcccgccgcctcctcctccgccagcgcgcccggtcgcagtaaaaggaggccaccaggcggcgaccagaataagcttcaggcgggaggaatggcgcagtcgctggagctgctgctgatccagtttttgatgccggataacgacgcacgtcggcaggcggaggagcagatccggcggctggcccgtgacccgcaggtggtccccgcgctcgtccaccatctccgtacggccaagacccccaacgtccgccagctcgccgcggtgctactccgcaagaagatcacctcccactggcccaagcttcccgcggactccaaggcatcgcttaaacaagccctcatcgattcaatcacactcgaccacaggagagtggccagagctgttacctttccttttccaatgcagccaaagtccacaagaagatcatagagaagtggctttgattcttttcagctcccttactgaaactattggagctacttttcagtctcatctgaacaatttgcaacctattttactgaaatgtctgcaagacgaaactagctctcgagtcagaattgcagccctaaaggctgttggatcattcatagaatatgtcaatgatggaggtgacattgtaaaaatgtttcgggattttgttcccagtatcttgaatatatcaagacagtgtcttgctaatggagaagaagatgttgcttccattgcgtttgaaatttttgacgaactaattgaatctcctgcaccacttcttggagactctgtgaggtcaattgtgcaattctcgctggaagtttctgcaaaccaggatttggaaataaatataaggcaacaggctatccagataatttcatggctggtaaaatttaaagcatctttcttgaaaaagcacaagctggttgtacctatcctgcaagttatgtgcccattgcttacggaaacagctaatgaagatgaagattctgatctagcagcagatcgttctgctgccgaggtcattgatacaatggctatcaacttaccaaggcacgttcttgcaccagttcttgagtttgcttctctgagctttcatcacattaatccaaagtatcgtgaggctgctgtgacgtcacttggtgttatctccgagggttgttgtgaacatttgaaagataagttggaggattgtctgaaaattgttttggaagctttaaaagaccaagaacaaatggttagaggtgctgcatcttttgcacttggtcagtttgctgaacacttgcaaccagaaattttatctcattatgcgagtgtacttccatgcattctaaatgctcttgaagacccatcagatgaagttaaggagaagtcatattatgctcttgcagcattctgtgaggacatgggtgaagatatcctaccgtatctagagcccttgatatgcagattggttatgtctttgcagagcagtcctcggaacttgcaggagacatgcatgtctgcaattggttcagtggctgctgctgcggagcaggcttttaccccatatgccgaaaaagtccttgagatgatgaaaggttttatggtgctaattaatgacgaagatctgtgtgcacgtgctagggctactgaagttgttgggatagtagcaatggcagttggcagagcaagaattgaagcaatattgcctccttttattgaggcttctatttctggttttggattggattacagtgaactcagagagtacactcatggtttctttagtaacgttgctgaaattttgggtgatagttttacacagtatcttcctcatgttgtccctctcgtattttcttcctgcaacttggatgatggttctgctgtggacattgatgatgccgatagcattgaaaatggatttggcggtgtttcatctgatgacgatgttaatgatgaaccaagagttagaaatatcagtgtgaggactggagtattagatgagaaagctgctgcaacacaggctattggttttttcgcactacacacgaagagtgcctatgctccgtatcctttagggcgtctccagcagttcatccatatggaaaacaatagaagtgctactccaacaatattttgcataaaatccagaatggatgtactagagaaacagaaggatgtccttgatactgttctgaacatctacatcaagactatgacagaggatgacgataaagaggtagttgcacaagcttgcatgagtgtagcagacattgtgaaggactgtggttttgctgcaattgagccttacatgctgaggcttgctgaggtaacactggtccttttacgccaagaatcaagctgtcagcaagtagagtcagatggtgaggatgatggcgacattgaccatgatgaagtcctcatggatgcagtttcagatcttttgcctgcttttgcaaaagtgatgggatcttattttgatcccatatttgcaaaattatttgatccgttgatgaaatttgctaaatctccccatcctccccaagataagactatggttgttgcaaccttagctgaggttgctcaggaaatgggtgctccaatatctgcttatgttgataagataatgcctttggtgttgaaagagcttgcatcatctgatgctactaataggagaaatgctgctttctgtgctggcgagatatgcaagaatgggggtgctgcagcactgaaatactatggtgatatacttcgttctctgcataatttgtttagtaactcagaatcagatgatgcagtaagagataacgctgctggtgctattgctaggatgataatggtgcagcctcagtcgattcctctcaaccaggttcttccagtttttatcaaagctttgccactaaaagaagatcatgaagaatcaatgactgtctatggttgcgtctgcggtttattattatcatcacatccccagatcctccctctggtgcctgacgtcatacatgtctttgcccaagtggtggtatccccagatgagagcgatgaagtgaaaacaaatattggcaaggctatttctcacttgatatctgtctatggccagcaaatgcagccaatactgagtgcccttccaccagcccatgcaaacgcgctggcttcatttgcgagtagaagatgaccttggaggaccagcttttctttggttccttgttctgcttgattttgttttggttttgtcgacgattgccattttctgaggatctggtcacatggatcaggccagatgggagtgcttgcattgcacattggcaagggcgagcggagttgtcaggttggcgcatgattgattatatggtgagcttggtttctctttgagatacatagttgtgcttgctttggagccctgtacggttatgagtgcctgcctgtattcaggttccggatttggttatttatgctcttgttttttatatttttttgcctgtatttgcaattcattgattgctgttgtatatagaagagagttttaaatagagagaatgtacgactctgcaactggcaaattttgtatacatactgctcataccacttgctaatgttcgtccggattgcgtaccttgtgcccaagttggaaaaaaggcgctccttgtgccgccaataggaaatcatggaagcggggaaagaaagcaaaag

SEQ ID NO: 7089 - DNA, 4141 bp, Zea Mays
cgccgccaccagagccccgagccacgacgcctccaaatcgatagggttttcgctgccccgctagcccgccgcctcctcctccgccagcgcgcccggtcgcagtaaaaggaggccaccaggcggcgaccagaataagcttcaggcgggaggaatggcgcagtcgctggagctgctgctgatccagtttttgatgccggataacgacgcacgtcggcaggcggaggagcagatccggcggctggcccgtgacccgcaggtggtccccgcgctcgtccaccatctccgtacggccaagacccccaacgtccgccagctcgccgcggtgctactccgcaagaagatcacctcccactggcccaagcttcccgcggactccaaggcatcgcttaaacaagccctcatcgattcaatcacactcgaccacagtcatcctgtaaggcgagctagtgcaaatgtcgtcagcattatagctaagtatgctatccctgcaggagagtggccagagctgttacctttccttttccaatgcagccaaagtccacaagaagatcatagagaagtggctttgattcttttcagctcccttactgaaactattggagctacttttcagtctcatctgaacaatttgcaacctattttactgaaatgtctgcaagacgaaactagctctcgagtcagaattgcagccctaaaggctgttggatcattcatagaatatgtcaatgatggaggtgacattccctatcaagcaaaggaacccttagatcgtgatatgacgagtaggttaaaaggtcttcaatttgtgcctctctgcaactacttttggagtcttgtaaagcatactctgaatgcttttgagtttgaggttttggtggagcagacaccaacaaaaaggtgttccaaccctgcacatacacccattcaccacataaaacatcaagtaaagcagcaacaaaccaacaaatgtgactgtagcggggtaagcgagggagcaacaaagttcaccttcagaggaggaggaactcgtcttcaagaggcccacggatcggaggtctggagcagctgccggactggattggaggaggggcgaagtggaagagtcagaggcagactagaggaggctcgtcgtaagggaaaggagggacaagaggaggtaaaaatgtttcgggattttgttcccagtatcttgaatatatcaagacagtgtcttgctaatggagaagaagatgttgcttccattgcgtttgaaatttttgacgaactaattgaatctcctgcaccacttcttggagactctgtgaggtcaattgtgcaattctcgctggaagtttctgcaaaccaggatttggaaataaatataaggcaacaggctatccagataatttcatggctggtaaaatttaaagcatctttcttgaaaaagcacaagctggttgtacctatcctgcaagttatgtgcccattgcttacggaaacagctaatgaagatgaagattctgatctagcagcagatcgttctgctgccgaggtcattgatacaatggctatcaacttaccaaggcacgttcttgcaccagttcttgagtttgcttctctgagctttcatcacattaatccaaagtatcgtgaggctgctgtgacgtcacttggtgttatctccgagggttgttgtgaacatttgaaagataagttggaggattgtctgaaaattgttttggaagctttaaaagaccaagaacaaatggttagaggtgctgcatcttttgcacttggtcagtttgctgaacacttgcaaccagaaattttatctcattatgcgagtgtacttccatgcattctaaatgctcttgaagacccatcagatgaagttaaggagaagtcatattatgctcttgcagcattctgtgaggacatgggtgaagatatcctaccgtatctagagcccttgatatgcagattggttatgtctttgcagagcagtcctcggaacttgcaggagacatgcatgtctgcaattggttcagtggctgctgctgcggagcaggcttttaccccatatgccgaaaaagtccttgagatgatgaaaggttttatggtgctaattaatgacgaagatctgtgtgcacgtgctagggctactgaagttgttgggatagtagcaatggcagttggcagagcaagaattgaagcaatattgcctccttttattgaggcttctatttctggttttggattggattacagtgaactcagagagtacactcatggtttctttagtaacgttgctgaaattttgggtgatagttttacacagcattgaaaatggatttggcggtgtttcatctgatgacgatgttaatgatgaaccaagagttagaaatatcagtgtgaggactggagtattagatgagaaagctgctgcaacacaggctattggttttttcgcactacacacgaagagtgcctatgctccgtatctggaggagtcactgaagattttgatccggcacagtggttatttccatgaagatgtcaggctgcaggcagtcatatctttgaaacatattctaactgcagttagggcaatacctcctgcacatgctgatgtactagagaaacagaaggatgtccttgatactgttctgaacatctacatcaagactatgacagaggatgacgataaagaggtagttgcacaagcttgcatgagtgtagcagacattgtgaaggactgtggttttgctgcaattgagccttacatgctgaggcttgctgaggtaacactggtccttttacgccaagaatcaagctgtcagcaagtagagtcagatggtgaggatgatggcgacattgaccatgatgaagtcctcatggatgcagtttcagatcttttgcctgcttttgcaaaagtgatgggatcttattttgatcccatatttgcaaaattatttgatccgttgatgaaatttgctaaatctccccatcctccccaagataagactatggttgttgcaaccttagctgaggttgctcaggaaatgggtgctccaatatctgcttatgttgataagataatgcctttggtgttgaaagagcttgcatcatctgatgctactaataggagaaatgctgctttctgtgctggcgagatatgcaagaatgggggtgctgcagcactgaaatactatggtgatatacttcgttctctgcataatttgtttagtaactcagaatcagatgatgcagtaagagataacgctgctggtgctattgctaggatgataatggtgcagcctcagtcgattcctctcaaccaggttcttccagtttttatcaaagctttgccactaaaagaagatcatgaagaatcaatgactgtctatggttgcgtctgcggtttattattatcatcacatccccagatcctccctctggtgcctgacgtcatacatgtctttgcccaagtggtggtatccccagatgagagcgatgaagtgaaaacaaatattggcaaggctatttctcacttgatatctgtctatggccagcaaatgcagccaatactgagtgcccttccaccagcccatgcaaacgcgctggcttcatttgcgagtagaagatgaccttggaggaccagcttttctttggttccttgttctgcttgattttgttttggttttgtcgacgattgccattttctgaggatctggtcacatggatcaggccagatgggagtgcttgcattgcacattggcaagggcgagcggagttgtcaggttggcgcatgattgattatatggtgagcttggtttctctttgagatacatagttgtgcttgctttggagccctgtacggttatgagtgcctgcctgtattcaggttccggatttggttatttatgctcttgttttttatatttttttgcctgtatttgcaattcattgattgctgttgtatatagaagagagttttaaatagagagaatgtacgactctgcaactggcaaattttgtatacatactgctcataccacttgctaatgttcgtccggattgcgtaccttgtgcccaagttggaaaaaaggcgctccttgtgccgccaataggaaatcatggaagcggggaaagaaagcaaaag

SEQ ID NO: 7090 - DNA, 3774 bp, Zea Mays
caactactaaacccttgcggcagcgccccaaggcgcgccgccaccagagccccgagccacgacgcctccaaatcgatagggttttcgctgccccgctagcccgccgcctcctcctccgccagcgcgcccggtcgcagtaaaaggaggccaccaggcggcgaccagaataagcttcaggcgggaggaatggcgcagtcgctggagctgctgctgatccagtttttgatgccggataacgacgcacgtcggcaggcggaggagcagatccggcggctggcccgtgacccgcaggtggtccccgcgctcgtccaccatctccgtacggccaagacccccaacgtccgccagctcgccgcggtgctactccgcaagaagatcacctcccactggcccaagcttcccgcggactccaaggcatcgcttaaacaagccctcatcgattcaatcacactcgaccacagtcatcctgtaaggcgagctagtgcaaatgtcgtcagcattatagctaagtatgctatccctgcaggagagtggccagagctgttacctttccttttccaatgcagccaaagtccacaagaagatcatagagaagtggctttgattcttttcagctcccttactgaaactattggagctacttttcagtctcatctgaacaatttgcaacctattttactgaaatgtctgcaagacgaaactagctctcgagtcagaattgcagccctaaaggctgttggatcattcatagaatatgtcaatgatggaggtgacattgtaaaaatgtttcgggattttgttcccagtatcttgaatatatcaagacagtgtcttgctaatggagaagaagatgttgcttccattgcgtttgaaatttttgacgaactaattgaatctcctgcaccacttcttggagactctgtgaggtcaattgtgcaattctcgctggaagtttctgcaaaccaggatttggaaataaatataaggcaacaggctatccagataatttcatggctggtaaaatttaaagcatctttcttgaaaaagcacaagctggttgtacctatcctgcaagttatgtgcccattgcttacggaaacagctaatgaagatgaagattctgatctagcagcagatcgttctgctgccgaggtcattgatacaatggctatcaacttaccaaggcacgttcttgcaccagttcttgagtttgcttctctgagctttcatcacattaatccaaagtatcgtgaggctgctgtgacgtcacttggtgttatctccgagggttgttgtgaacatttgaaagataagttggaggattgtctgaaaattgttttggaagctttaaaagaccaagaacaaatggttagaggtgctgcatcttttgcacttggtcagtttgctgaacacttgcaaccagaaattttatctcattatgcgagtgtacttccatgcattctaaatgctcttgaagacccatcagatgaagttaaggagaagtcatattatgctcttgcagcattctgtgaggacatgggtgaagatatcctaccgtatctagagcccttgatatgcagattggttatgtctttgcagagcagtcctcggaacttgcaggagacatgcatgtctgcaattggttcagtggctgctgctgcggagcaggcttttaccccatatgccgaaaaagtccttgagatgatgaaaggttttatggtgctaattaatgacgaagatctgtgtgcacgtgctagggctactgaagttgttgggatagtagcaatggcagttggcagagcaagaattgaagcaatattgcctccttttattgaggcttctatttctggttttggattggattacagtgaactcagagagtacactcatggtttctttagtaacgttgctgaaattttgggtgatagttttacacagtatcttcctcatgttgtccctctcgtattttcttcctgcaacttggatgatggttctgctgtggacattgatgatgccgatagcattgaaaatggatttggcggtgtttcatctgatgacgatgttaatgatgaaccaagagttagaaatatcagtgtgaggactggagtattagatgagaaagctgctgcaacacaggctattggttttttcgcactacacacgaagagtgcctatgctccgtatcctttagggcgtctccagcagttcatccatatggaaaacaatagaagtgctactccaacaatattttgcataaaatccagaatgatattctaactgcagttagggcaatacctcctgcacatgctgatgtactagagaaacagaaggatgtccttgatactgttctgaacatctacatcaagactatgacagaggatgacgataaagagacatgctgaggcttgctgaggtaacactggtccttttacgccaagaatcaagctgtcagcaagtagagtcagatggtgaggatgatggcgacattgaccatgatgaagtcctcatggatgcagtttcagatcttttgcctgcttttgcaaaagtgatgggatcttattttgatcccatatttgcaaaattatttgatccgttgatgaaatttgctaaatctccccatcctccccaagataagactatggttgttgcaaccttagctgaggttgctcaggaaatgggtgctccaatatctgcttatgttgataagataatgcctttggtgttgaaagagcttgcatcatctgatgctactaataggagaaatgctgctttctgtgctggcgagatatgcaagaatgggggtgctgcagcactgaaatactatggtgatatacttcgttctctgcataatttgtttagtaactcagaatcagatgatgcagtaagagataacgctgctggtgctattgctaggatgataatggtgcagcctcagtcgattcctctcaaccaggttcttccagtttttatcaaagctttgccactaaaagaagatcatgaagaatcaatgactgtctatggttgcgtctgcggtttattattatcatcacatccccagatcctccctctggtgcctgacgtcatacatgtctttgcccaagtggtggtatccccagatgagagcgatgaagtgaaaacaaatattggcaaggctatttctcacttgatatctgtctatggccagcaaatgcagccaatactgagtgcccttccaccagcccatgcaaacgcgctggcttcatttgcgagtagaagatgaccttggaggaccagcttttctttggttccttgttctgcttgattttgttttggttttgtcgacgattgccattttctgaggatctggtcacatggatcaggccagatgggagtgcttgcattgcacattggcaagggcgagcggagttgtcaggttggcgcatgattgattatatggtgagcttggtttctctttgagatacatagttgtgcttgctttggagccctgtacggttatgagtgcctgcctgtattcaggttccggatttggttatttatgctcttgttttttatatttttttgcctgtatttgcaattcattgattgctgttgtatatagaagagagttttaaatagagagaatgtacgactctgcaactggcaaattttgtatacatactgctcataccacttgctaatgttcgtccggattgcgtaccttgtgcccaagttggaaaaaaggcgctccttgtgccgccaataggaaatcatggaagcggggaaagaaagcaaaag

SEQ ID NO: 7091 - DNA, 3826 bp, Zea Mays
aaacaagaaaagacagccattgccaactactaaacccttgcggcagcgccccaaggcgcgccgccaccagagccccgagccacgacgcctccaaatcgatagggttttcgctgccccgctagcccgccgcctcctcctccgccagcgcgcccggtcgcagtaaaaggaggccaccaggcggcgaccagaataagcttcaggcgggaggaatggcgcagtcgctggagctgctgctgatccagtttttgatgccggataacgacgcacgtcggcaggcggaggagcagatccggcggctggcccgtgacccgcaggtggtccccgcgctcgtccaccatctccgtacggccaagacccccaacgtccgccagctcgccgcggtgctactccgcaagaagatcacctcccactggcccaagcttcccgcggactccaaggcatcgcttaaacaagccctcatcgattcaatcacactcgaccacagtcatcctgtaaggcgagctagtgcaaatgtcgtcagcattatagctaagtatgctatccctgcaggagagtggccagagctgttacctttccttttccaatgcagccaaagtccacaagaagatcatagagaagtggctttgattcttttcagctcccttactgaaactattggagctacttttcagtctcatctgaacaatttgcaacctattttactgaaatgtctgcaagacgaaactagctctcgagtcagaattgcagccctaaaggctgttggatcattcatagaatatgtcaatgatggaggtgacattgtaaaaatgtttcgggattttgttcccagtatcttgaatatatcaagacagtgtcttgctaatggagaagaagatgttgcttccattgcgtttgaaatttttgacgaactaattgaatctcctgcaccacttcttggagactctgtgaggtcaattgtgcaattctcgctggaagtttctgcaaaccaggatttggaaataaatataaggcaacaggctatccagataatttcatggctggtaaaatttaaagcatctttcttgaaaaagcacaagctggttgtacctatcctgcaagttatgtgcccattgcttacggaaacagctaatgaagatgaagattctgatctagcagcagatcgttctgctgccgaggtcattgatacaatggctatcaacttaccaaggcacgttcttgcaccagttcttgagtttgcttctctgagctttcatcacattaatccaaagtatcgtgaggctgctgtgacgtcacttggtgttatctccgagggttgttgtgaacatttgaaagataagttggaggattgtctgaaaattgttttggaagctttaaaagaccaagaacaaatggttagaggtgctgcatcttttgcacttggtcagtttgctgaacacttgcaaccagaaattttatctcattatgcgagtgtacttccatgcattctaaatgctcttgaagacccatcagatgaagttaaggagaagtcatattatgctcttgcagcattctgtgaggacatgggtgaagatatcctaccgtatctagagcccttgatatgcagattggttatgtctttgcagagcagtcctcggaacttgcaggagacatgcatgtctgcaattggttcagtggctgctgctgcggagcaggcttttaccccatatgccgaaaaagtccttgagatgatgaaaggttttatggtgctaattaatgacgaagatctgtgtgcacgtgctagggctactgaagttgttgggatagtagcaatggcagttggcagagcaagaattgaagcaatattgcctccttttattgaggcttctatttctggttttggattggattacagtgaactcagagagtacactcatggtttctttagtaacgttgctgaaattttgggtgatagttttacacagtatcttcctcatgttgtccctctcgtattttcttcctgcaacttggatgatggttctgctgtggacattgatgatgccgatagcattgaaaatggatttggcggtgtttcatctgatgacgatgttaatgatgaaccaagagttagaaatatcagtgtgaggactggagtattagatgagaaagctgctgcaacacaggctattggttttttcgcactacacacgaagagtgcctatgctccgtatcctttagggcgtctccagcagttcatccatatggaaaacaatagaagtgctactccaacaatattttgcataaaatccagaatggatgtactagagaaacagaaggatgtccttgatactgttctgaacatctacatcaagactatgacagaggatgacgataaagaggtagttgcacaagcttgcatgagtgtagcagacattgtgaaggactgtggttttgctgcaattgagccttacatgctgaggcttgctgaggtaacactggtccttttacgccaagaatcaagctgtcagcaagtagagtcagatggtgaggatgatggcgacattgaccatgatgaagtcctcatggatgcagtttcagatcttttgcctgcttttgcaaaagtgatgggatcttattttgatcccatatttgcaaaattatttgatccgttgatgaaatttgctaaatctccccatcctccccaagataagactatggttgttgcaaccttagctgaggttgctcaggaaatgggtgctccaatatctgcttatgttgataagataatgcctttggtgttgaaagagcttgcatcatctgatgctactaataggagaaatgctgctttctgtgctggcgagatatgcaagaatgggggtgctgcagcactgaaatactatggtgatatacttcgttctctgcataatttgtttagtaactcagaatcagatgatgcagtaagagataacgctgctggtgctattgctaggatgataatggtgcagcctcagtcgattcctctcaaccaggttcttccagtttttatcaaagctttgccactaaaagaagatcatgaagaatcaatgactgtctatggttgcgtctgcggtttattattatcatcacatccccagatcctccctctggtgcctgacgtcatacatgtctttgcccaagtggtggtatccccagatgagagcgatgaagtgaaaacaaatattggcaaggctatttctcacttgatatctgtctatggccagcaaatgcagccaatactgagtgcccttccaccagcccatgcaaacgcgctggcttcatttgcgagtagaagatgaccttggaggaccagcttttctttggttccttgttctgcttgattttgttttggttttgtcgacgattgccattttctgaggatctggtcacatggatcaggccagatgggagtgcttgcattgcacattggcaagggcgagcggagttgtcaggttggcgcatgattgattatatggtgagcttggtttctctttgagatacatagttgtgcttgctttggagccctgtacggttatgagtgcctgcctgtattcaggttccggatttggttatttatgctcttgttttttatatttttttgcctgtatttgcaattcattgattgctgttgtatatagaagagagttttaaatagagagaatgtacgactctgcaactggcaaattttgtatacatactgctcataccacttgctaatgttcgtccggattgcgtaccttgtgcccaagttggaaaaaaggcgctccttgtgccgccaataggaaatcatggaagcggggaaagaaagcaaaag

SEQ ID NO: 7092 - DNA, 4016 bp, Zea Mays
taactaattttccttaaaaatagatttttttaaaaaaaatgggttcctaaactaaccctaaatgtaaaataaggatgtattggtttatagaataaaagttagggaataaacgtcaatccatataaaccaaacaagctcctaagtaaacaaacaagaaaagacagccattgccaactactaaacccttgcggcagcgccccaaggcgcgccgccaccagagccccgagccacgacgcctccaaatcgatagggttttcgctgccccgctagcccgccgcctcctcctccgccagcgcgcccggtcgcagtaaaaggaggccaccaggcggcgaccagaataagcttcaggcgggaggaatggcgcagtcgctggagctgctgctgatccagtttttgatgccggataacgacgcacgtcggcaggcggaggagcagatccggcggctggcccgtgacccgcaggtggtccccgcgctcgtccaccatctccgtacggccaagacccccaacgtccgccagctcgccgcggtgctactccgcaagaagatcacctcccactggcccaagcttcccgcggactccaaggcatcgcttaaacaagccctcatcgattcaatcacactcgaccacagtcatcctgtaaggcgagctagtgcaaatgtcgtcagcattatagctaagtatgctatccctgcaggagagtggccagagctgttacctttccttttccaatgcagccaaagtccacaagaagatcatagagaagtggctttgattcttttcagctcccttactgaaactattggagctacttttcagtctcatctgaacaatttgcaacctattttactgaaatgtctgcaagacgaaactagctctcgagtcagaattgcagccctaaaggctgttggatcattcatagaatatgtcaatgatggaggtgacattgtaaaaatgtttcgggattttgttcccagtatcttgaatatatcaagacagtgtcttgctaatggagaagaagatgttgcttccattgcgtttgaaatttttgacgaactaattgaatctcctgcaccacttcttggagactctgtgaggtcaattgtgcaattctcgctggaagtttctgcaaaccaggatttggaaataaatataaggcaacaggctatccagataatttcatggctggtaaaatttaaagcatctttcttgaaaaagcacaagctggttgtacctatcctgcaagttatgtgcccattgcttacggaaacagctaatgaagatgaagattctgatctagcagcagatcgttctgctgccgaggtcattgatacaatggctatcaacttaccaaggcacgttcttgcaccagttcttgagtttgcttctctgagctttcatcacattaatccaaagtatcgtgaggctgctgtgacgtcacttggtgttatctccgagggttgttgtgaacatttgaaagataagttggaggattgtctgaaaattgttttggaagctttaaaagaccaagaacaaatggttagaggtgctgcatcttttgcacttggtcagtttgctgaacacttgcaaccagaaattttatctcattatgcgagtgtacttccatgcattctaaatgctcttgaagacccatcagatgaagttaaggagaagtcatattatgctcttgcagcattctgtgaggacatgggtgaagatatcctaccgtatctagagcccttgatatgcagattggttatgtctttgcagagcagtcctcggaacttgcaggagacatgcatgtctgcaattggttcagtggctgctgctgcggagcaggcttttaccccatatgccgaaaaagtccttgagatgatgaaaggttttatggtgctaattaatgacgaagatctgtgtgcacgtgctagggctactgaagttgttgggatagtagcaatggcagttggcagagcaagaattgaagcaatattgcctccttttattgaggcttctatttctggttttggattggattacagtgaactcagagagtacactcatggtttctttagtaacgttgctgaaattttgggtgatagttttacacagtatcttcctcatgttgtccctctcgtattttcttcctgcaacttggatgatggttctgctgtggacattgatgatgccgatagcattgaaaatggatttggcggtgtttcatctgatgacgatgttaatgatgaaccaagagttagaaatatcagtgtgaggactggagtattagatgagaaagctgctgcaacacaggctattggttttttcgcactacacacgaagagtgcctatgctccgtatctggaggagtcactgaagattttgatccggcacagtggttatttccatgaagatgtcaggctgcaggcagtcatatctttgaaacatattctaactgcagttagggcaatacctcctgcacatgctgatgtactagagaaacagaaggatgtccttgatactgttctgaacatctacatcaagactatgacagaggatgacgataaagaggtagttgcacaagcttgcatgagtgtagcagacattgtgaaggactgtggttttgctgcaattgagccttacatgctgaggcttgctgaggtaacactggtccttttacgccaagaatcaagctgtcagcaagtagagtcagatggtgaggatgatggcgacattgaccatgatgaagtcctcatggatgcagtttcagatcttttgcctgcttttgcaaaagtgatgggatcttattttgatcccatatttgcaaaattatttgatccgttgatgaaatttgctaaatctccccatcctccccaagataagactatggttgttgcaaccttagctgaggttgctcaggaaatgggtgctccaatatctgcttatgttgataagataatgcctttggtgttgaaagagcttgcatcatctgatgctactaataggagaaatgctgctttctgtgctggcgagatatgcaagaatgggggtgctgcagcactgaaatactatggtgatatacttcgttctctgcataatttgtttagtaactcagaatcagatgatgcagtaagagataacgctgctggtgctattgctaggatgataatggtgcagcctcagtcgattcctctcaaccaggttcttccagtttttatcaaagctttgccactaaaagaagatcatgaagaatcaatgactgtctatggttgcgtctgcggtttattattatcatcacatccccagatcctccctctggtgcctgacgtcatacatgtctttgcccaagtggtggtatccccagatgagagcgatgaagtgaaaacaaatattggcaaggctatttctcacttgatatctgtctatggccagcaaatgcagccaatactgagtgcccttccaccagcccatgcaaacgcgctggcttcatttgcgagtagaagatgaccttggaggaccagcttttctttggttccttgttctgcttgattttgttttggttttgtcgacgattgccattttctgaggatctggtcacatggatcaggccagatgggagtgcttgcattgcacattggcaagggcgagcggagttgtcaggttggcgcatgattgattatatggtgagcttggtttctctttgagatacatagttgtgcttgctttggagccctgtacggttatgagtgcctgcctgtattcaggttccggatttggttatttatgctcttgttttttatatttttttgcctgtatttgcaattcattgattgctgttgtatatagaagagagttttaaatagagagaatgtacgactctgcaactggcaaattttgtatacatactgctcataccacttgctaatgttcgtccggattgcgtaccttgtgcccaagttggaaaaaaggcgctccttgtgccgccaataggaaatcatggaagcggggaaagaaagcaaaag

SEQ ID NO: 7093 - DNA, 2386 bp, Zea Mays
ccacctcacccaccgaaaaacccaaaagcctcagccgcggccacttacaaaaaaaaaaacttccccccgcttgccgcttgccgtctccccgcgtccccaagccgagctctcggcctctcgctttcggtgttctcccctcgatcctcgcccctgcgttctccagggcgcccatgagctgaggccgccaccgatgggcccgcccttctcagcgcaggaccccgcgccgtcgccgtcgggcggctccggctccggatcatccaggcgccgcctccgccggctcgaccgccgcaacgcgtccaagaacatcagctacaacgccaccaactactgccagtacccgccgtccccgcaggtcgcctccgcgccggggtccgggcgggcctcgctcgccggctcccttgcctgctccatcgacgtcgtcaacagctttcgcatcggcggcaacggcgacgggggcagggaccttcgcttcctgtgcgaaagtctcggcctctccggacccgacgacttcgccatcccgctggccgactgggaggcgcacaaggccgttcgatcctccacctccgcttcgggctcccccaactccgcacgcaccaaccacgactcccctcagcgggactcgcctttctgtcaggtgggtgccgaggagcccgcccaggctgcggacgccgacccggagctactggccggaacgggaagggacggcccaatcgaagctccggagcggccggcacgcctggatccgccgcccgagtccacctttcccgatgtgaggagggcagttggggagggaggaatcaagggggtgcgcccgccgccggtgctcaagccgccgccttcgatggcgctaccagctgtctgcggcgtgggatccacgtgggatatcttgcggtccttcgcgccggatgagaaagaggacgctcccgcgagcagaactgtccgtcgttttggacaccgggctgcagaggagaaggatgacgacgaggatggggcggtattgttaatgttggacgatctcaggctggaggagtcgtccgagggctttactggcacttcttcactatcaacaaccaacgatgacgagacctcaagcaccaccactgaatccatgttctatatctcaccgaacgggaggtttaggaggaggatccggtcatggaaccgagggatgctcctgggtagtggctcgtttgggacagtctacgagggcatcagcgatgagggtgtcttctttgctgtcaaagaagtgaacttatttgataaagggagcaatgcgaagcagtgtatctttcagcttgagcaggaaattgcacttctgagccagtttgagcatgagaatatagtgcagtactatggaacagacaaagaagattcaaaactttacatcttccttgaattactgacccaaggatcccttgcattactgtatcagagagacattaaatgcgcaaatattctggtgcatgccaatggatctgtgaaacttgcagattttggactcgctaaggagatcaccaaattcaatgcagttaaatcatgcaaaggaactgtttattggatggcacctgaggttgtcaatccaaagaagacgtatggacctgcagctgacatatggagtcttggttgcactgtcctagagatgttgacgcgccaaataccctatcctggcctcgaatggacacaagctctatacaggattggtaagggggaatcgccagcaattccaagttctctttcgaaggatgctcgtgattttataagtcagtgcgtaaaacccaatccagaagacagaccatcagcaatcaaactgttggagcatccatttgtaaacaagccaataagatcagtatggtctttgaggacatcttcacgctcgaattcatctacacgtggcatcaattaatgggtcgttgatcatctattggacattggaagaatgatgttggtccgcgcaaatcatgcggacctggccgaaagggagggttgttttgcccggagctagtattgtcaacgctcagcagcattgtcgtcaacctcttagtgtttcattagttgattctttggcatacgttcgcgaggaagatgtcctcgttgagccgccggctaatattcatattcttctgcctggatagggaatagtgaacgtgcatttgagtgcatgagttgtagagtgagaacgggctgtgtaaaacagactgtcctgatgccaatgatatggaaaaaagaaagaaagaaagaaaaagttcaaagctttggaactgtcaacgacagttgttggattgggattgctgtctgcttttgtgccaagacaggaggcatacggctatgtgcctatgttatccttttctttttcaatcaacggaacttcctagagaactcatcgatt

SEQ ID NO: 7094 - DNA, 2410 bp, Zea Mays
ccacctcacccaccgaaaaacccaaaagcctcagccgcggccacttacaaaaaaaaaaacttccccccgcttgccgcttgccgtctccccgcgtccccaagccgagctctcggcctctcgctttcggtgttctcccctcgatcctcgcccctgcgttctccagggcgcccatgagctgaggccgccaccgatgggcccgcccttctcagcgcaggaccccgcgccgtcgccgtcgggcggctccggctccggatcatccaggcgccgcctccgccggctcgaccgccgcaacgcgtccaagaacatcagctacaacgccaccaactactgccagtacccgccgtccccgcaggtcgcctccgcgccggggtccgggcgggcctcgctcgccggctcccttgcctgctccatcgacgtcgtcaacagctttcgcatcggcggcaacggcgacgggggcagggaccttcgcttcctgtgcgaaagtctcggcctctccggacccgacgacttcgccatcccgctggccgactgggaggcgcacaaggccgttcgatcctccacctccgcttcgggctcccccaactccgcacgcaccaaccacgactcccctcagcgggactcgcctttctgtcaggtgggtgccgaggagcccgcccaggctgcggacgccgacccggagctactggccggaacgggaagggacggcccaatcgaagctccggagcggccggcacgcctggatccgccgcccgagtccacctttcccgatgtgaggagggcagttggggagggaggaatcaagggggtgcgcccgccgccggtgctcaagccgccgccttcgatggcgctaccagctgtctgcggcgtgggatccacgtgggatatcttgcggtccttcgcgccggatgagaaagaggacgctcccgcgagcagaactgtccgtcgttttggacaccgggctgcagaggagaaggatgacgacgaggatggggcggtattgttaatgttggacgatctcaggctggaggagtcgtccgagggctttactggcacttcttcactatcaacaaccaacgatgacgagacctcaagcaccaccactgaatccatgttctatatctcaccgaacgggaggtttaggaggaggatccggtcatggaaccgagggatgctcctgggtagtggctcgtttgggacagtctacgagggcatcagcgatgagggtgtcttctttgctgtcaaagaagtgaacttatttgataaagggagcaatgcgaagcagtgtatctttcagcttgagcaggaaattgcacttctgagccagtttgagcatgagaatatagtgcagtactatggaacagacaaaaggtatcgcctgcgagatactcatgtctctgcatatacaagacagatccttaatgggttgatttacctccatgaaaagaacattgttcatagagacattaaatgcgcaaatattctggtgcatgccaatggatctgtgaaacttgcagattttggactcgctaaggagatcaccaaattcaatgcagttaaatcatgcaaaggaactgtttattggatggcacctgaggttgtcaatccaaagaagacgtatggacctgcagctgacatatggagtcttggttgcactgtcctagagatgttgacgcgccaaataccctatcctggcctcgaatggacacaagctctatacaggattggtaagggggaatcgccagcaattccaagttctctttcgaaggatgctcgtgattttataagtcagtgcgtaaaacccaatccagaagacagaccatcagcaatcaaactgttggagcatccatttgtaaacaagccaataagatcagtatggtctttgaggacatcttcacgctcgaattcatctacacgtggcatcaattaatgggtcgttgatcatctattggacattggaagaatgatgttggtccgcgcaaatcatgcggacctggccgaaagggagggttgttttgcccggagctagtattgtcaacgctcagcagcattgtcgtcaacctcttagtgtttcattagttgattctttggcatacgttcgcgaggaagatgtcctcgttgagccgccggctaatattcatattcttctgcctggatagggaatagtgaacgtgcatttgagtgcatgagttgtagagtgagaacgggctgtgtaaaacagactgtcctgatgccaatgatatggaaaaaagaaagaaagaaagaaaaagttcaaagctttggaactgtcaacgacagttgttggattgggattgctgtctgcttttgtgccaagacaggaggcatacggctatgtgcctatgttatccttttctttttcaatcaacggaacttcctagagaactcatcgatt

SEQ ID NO: 7095 - DNA, 2418 bp, Zea Mays
ccacctcacccaccgaaaaacccaaaagcctcagccgcggccacttacaaaaaaaaaaacttccccccgcttgccgcttgccgtctccccgcgtccccaagccgagctctcggcctctcgctttcggtgttctcccctcgatcctcgcccctgcgttctccagggcgcccatgagctgaggccgccaccgatgggcccgcccttctcagcgcaggaccccgcgccgtcgccgtcgggcggctccggctccggatcatccaggcgccgcctccgccggctcgaccgccgcaacgcgtccaagaacatcagctacaacgccaccaactactgccagtacccgccgtccccgcaggtcgcctccgcgccggggtccgggcgggcctcgctcgccggctcccttgcctgctccatcgacgtcgtcaacagctttcgcatcggcggcaacggcgacgggggcagggaccttcgcttcctgtgcgaaagtctcggcctctccggacccgacgacttcgccatcccgctggccgactgggaggcgcacaaggccgttcgatcctccacctccgcttcgggctcccccaactccgcacgcaccaaccacgactcccctcagcgggactcgcctttctgtcaggtgggtgccgaggagcccgcccaggctgcggacgccgacccggagctactggccggaacgggaagggacggcccaatcgaagctccggagcggccggcacgcctggatccgccgcccgagtccacctttcccgatgtgaggagggcagttggggagggaggaatcaagggggtgcgcccgccgccggtgctcaagccgccgccttcgatggcgctaccagctgtctgcggcgtgggatccacgtgggatatcttgcggtccttcgcgccggatgagaaagaggacgctcccgcgagcagaactgtccgtcgttttggacaccgggctgcagaggagaaggatgacgacgaggatggggcggtattgttaatgttggacgatctcaggctggaggagtcgtccgagggctttactggcacttcttcactatcaacaaccaacgatgacgagacctcaagcaccaccactgaatccatgttctatatctcaccgaacgggaggtttaggaggaggatccggtcatggaaccgagggatgctcctgggtagtggctcgtttgggacagtctacgagggcatcagcgatgagggtgtcttctttgctgtcaaagaagtgaacttatttgataaagggagcaatgcgaagcagtgtatctttcagcttgagcaggaaattgcacttctgagccagtttgagcatgagaatatagtgcagtactatggaacagacaaagaagattcaaaactttacatcttccttgaattactgacccaaggatcccttgcattactgtatcagaggtatcgcctgcgagatactcatgtctctgcatatacaagacagatccttaatgggttgatttacctccatgatctgtgaaacttgcagattttggactcgctaaggagatcaccaaattcaatgcagttaaatcatgcaaaggaactgtttattggatggcacctgaggttgtcaatccaaagaagacgtatggacctgcagctgacatatggagtcttggttgcactgtcctagagatgttgacgcgccaaataccctatcctggcctcgaatggacacaagctctatacaggattggtaagggggaatcgccagcaattccaagttctctttcgaaggatgctcgtgattttataagtcagtgcgtaaaacccaatccagaagacagaccatcagcaatcaaactgttggagcatccatttgtaaacaagccaataagatcagtatggtctttgaggacatcttcacgctcgaattcatctacacgtggcatcaattaatgggtcgttgatcatctattggacattggaagaatgatgttggtccgcgcaaatcatgcggacctggccgaaagggagggttgttttgcccggagctagtattgtcaacgctcagcagcattgtcgtcaacctcttagtgtttcattagttgattctttggcatacgttcgcgaggaagatgtcctcgttgagccgccggctaatattcatattcttctgcctggatagggaatagtgaacgtgcatttgagtgcatgagttgtagagtgagaacgggctgtgtaaaacagactgtcctgatgccaatgatatggaaaaaagaaagaaagaaagaaaaagttcaaagctttggaactgtcaacgacagttgttggattgggattgctgtctgcttttgtgccaagacaggaggcatacggctatgtgcctatgttatccttttctttttcaatcaacggaacttcctagagaactcatcgatt

SEQ ID NO: 7096 - DNA, 516 bp, Zea Mays
agggacatgattatgccattagaatcatgtgatggcaagttgaacccatcttgatgaaacaaaaaacaagttgatggtgctagtggtagtaggcgaccaacttgagtatagcgatgatgtctgtggtgttgtgcttagtgtccgtttcaatgaagacattctgagcgtctggaaccggaacgcatcagaccatcaggctgtgatggcattgagggattctataaagaggcacctcaagctgccacacagctatctgatggagtacaaaccccatgatgcttcgcggcgtgacaactcgtcctacaggaacacatggctgagaggatagataagccctatgatactcgccagcttcactgcgatggttctgaagcaaagagactcgtttatgtaccaagaacgcagactattatgcaatgtactactactcaaaagcccctacaatgtgacgcgcaacaattttactatctaatgtgtttttttttttgcaaaagcattgaaacaaagaatgaaaaa

SEQ ID NO: 7097 - DNA, 1540 bp, Zea Mays
ttagactccttggaagttgttgtctttaatgatgatggttgtgagatttgagcaactgctaagggctggtggcagctctccagacatgttgttattgtctaagtgaagctcctccagcctcttgagctgcccaatagaattcgggatcttgccatttagtccattccacccaagatcaaggatgaccaaatttctgagttttcctatacactcaggatcaagtgttccttgcaaatggttgttagggaaagagaggtgctctagtgaggtaacgttgaagatctcagatggaagggtcccattgagttggttctggccagccttaagcactttcaaaccagagcaattaccaagctctgagggtattctaccaatgaactggttgtagctaaggtcaaggaccacaaggaatggtttgtcaacacaaattgtgctcgaaatttccccagcaaagctattattgctcatattgagagcagccagattcttcatgccctccaatgtggtggatggaaaatatcccgtgaggaagttactcgagatgttcattaccttcatcgcgctgttaggtgtggattgcagctcatggaattctccactgagcttgttgaagctgacatcgaggacagtaatgttgctggagagcaacagtttcgatgggagtccactggagagcaagttgccagataggttgagcttcaacaggccgttgagattgccaagtgagggtgatatgtgcccctcaaggcccatagcagccagtgagatgtctatgacagttctatctccattgcaaatgacaagatactgatatactcaaagcaggttcgttgtttggttttattgattctgttttcagttgttgtaactcatttgagcttcaaattttatttctacaacttggttccaggttgggtacactccagattatctcttcctcctccagaccatcttgcgtacagatccacagggagctgtgaactttgctcttatgatgtcacaaatggagggaggctgcccagtagattataatacaataactgatcttttcctttagagaaatatgatacgggaggcaacaacgtttctgttggatgttctgaaaccaaacttgccagagcatgcttttattcaaaccaaggttttggagataaacttagtgacttacctgaatgttgctgatgccattcttgctaatggtatgttcagtcattatgatcgccctcgtattgctcatctgtgtgaaaaggctgggttgtacttgcgagcccttcattactcagagttgcctgatatcaagcgtgccattgtaaatacccatgtcattgaaccacagacacttgttgagttctttggcacattgtcaagagagtgggctttggaatgcatgaaagaccttctactggttaatctgaggggaaatcttcagattgttgtgcaggccatgaaagaatactctgagcagctaggggttgatgcttgcatcaaattatttgagcaattcaaatcttatgagggcctttactttttcttgggatcc

SEQ ID NO: 7098 - DNA, 1511 bp, Zea Mays
ttagactccttggaagttgttgtctttaatgatgatggttgtgagatttgagcaactgctaagggctggtggcagctctccagacatgttgttattgtctaagtgaagctcctccagcctcttgagctgcccaatagaattcgggatcttgccatttagtccattccacccaagatcaaggatgaccaaatttctgagttttcctatacactcaggatcaagtgttccttgcaaatggttgttagggaaagagaggtgctctagtgaggtaacgttgaagatctcagatggaagggtcccattgagttggttctggccagccttaagcactttcaaaccagagcaattaccaagctctgagggtattctaccaatgaactggttgtagctaaggtcaaggaccacaaggaatggtttgtcaacacaaattgtgctcgaaatttccccagcaaagctattattgctcatattgagagcagccagattcttcatgccctccaatgtggtggatggaaaatatcccgtgaggaagttactcgagatgttcattaccttcatcgcgctgttaggtgtggattgcagctcatggaattctccactgagcttgttgaagctgacatcgaggacagtaatgttgctggagagcaacagtttcgatgggagtccactggagagcaagttgccagataggttgagcttcaacaggccgttgagattgccaagtgagggtgatatgtgcccctcaaggcccatagcagccagtgagatgtctatgacagttctatctccattgcaaatgacaagatactgatatactcaaagcaggttgggtacactccagattatctcttcctcctccagaccatcttgcgtacagatccacagggagctgtgaactttgctcttatgatgtcacaaatggagggaggctgcccagtagattataatacaataactgatcttttcctttagagaaatatgatacgggaggcaacaacgtttctgttggatgttctgaaaccaaacttgccagagcatgcttttattcaaaccaaggttttggagataaacttagtgacttacccgaaagttgttgatgccattcttgctaatggtatgttcagtcattatgatcgccctcgtattgctcagctgtgtgaaaaggctgggttgtacttgcgagccctccagcattactcagagttgcctgatatcaagcgtgccattgtaaatacccatgtcattgaaccacagacacttgttgagttctttggcacattgtcaagagagtgggctttggaatgcatgaaagaccttctactggttaatctgaggggaaatcttcagattgttgtgcaggccgcgaaagaatactctgagcagctaggggttgatgcttgcatcaaattatttgagcaattcaaatcttatgagggcctttaatttttcttgggatcctatctgaaaatgtttttcttgatattgtgttcataaatgtgcccatggtctag

SEQ ID NO: 7099 - DNA, 1997 bp, Zea Mays
cacccaccgcccccaccgcctatttccccccactcgtggcaacctctgctctggccccccaaaccccacacacttcgcctcgccaaactttcccctcggcctccgcccgcacttccaccaccgctgcaccgcaccacacctcgcagatgccccagtaggctccaaaaatccaaagccatctctccccaggcggcctcccatccatctccgggagatggcggccggcaccgtgacggcccgatccaacggcgagggccacggccacggcggcgcggggtcctggtacccgcagcgccgcccgcactacgggtacggcggggggtccgcctccttccgcggctgctgctgctgcctcttcctgctgctcaccttcctggcgctcctcgccctggccatcgcgctcgtcgtcgtgctcgtggtgaagccccgcaagccgcagttcgacctcgaccaggtgtccgtgcagtacctcctcgtggcctcgccgacgtccccggccggcctgccccccgcgaccccgggcgccgcctacatctccctcaacatcacgctgctcttcaccgcccagaaccccaacaaggtgggcatccggtacggcgccaccaagttcgacgtcatgtaccacggggtgccgctcggggtggcggcggtgcccgggttcgagcagcccgcgcacagcacccgcctgctccagacccgcgtcattgtcgaccgcttcaacgtgctccaggccgacgcgcaggacctcatccgcgacgccgcgatcaacgaccgcgtcgagctccgcatcaccggcgacgtcggcgcgaagatcctcgtgctcggcttctcctccccaaaagtgcaggtgtcggtggattgcgcaatcgccatcagcccgaggagccagtcgctgaaatacaagcagtgtggcgtggacgggataagcgtgtagtgtaggaaccccaagccgccgccgccgccgcagaagctgtattgcagtggagaagtggtaaattttgagcacttacttttggaggaggccactgattctgtgaattattgctgcttgcaatcagcaatcagtaggtatcagtatgaccacggttatacatccatcgatcgccgtgaacaattgcttaggagctaagggaagtggtgggcgtcggttcgtctgtggttgtcttgtttcgtttcgtttcggagttgtgggtctgcgctgtctgccatgtccttgtctggcggctaatcttgttcacttcatcagttcatcagcccgtagttagtggtagaccggtagtggactagtggtgccggggagattgtgagggaaaagttagcgcgggagagcgtgggtggttgatatttctcactgacaagatagtggcggggtcaaaccgtcaaaattttactgcaatttacgactcgtgacggggcaaaacggagtttgtaatgcggactttgtgtaggccgtcgcgtgacccgtgtggtctacactacacatctcctatgtcaggtcgggaagttgtatatatatgtcttcaaatcttagttcgcgcacatgccctggcgtgttttttgcatttttttttctgctgaatgtacaggagacttgctgccaccggtgccttggtttattgattcccatgttatactgcaagtgcttttgtattttttgtgctggactttaattcctttctagttgaagtgcttctgggcttggtttggattgctgatgaagcagtgaaggtgaggcatagtaattcgagaagcgactacgggcagagcagccctcccaaatgctctaaaagaagagctcttaagagcacctagaagcctgagctatttttatagaggatctagagccaaaaaaaaaggctcctagtggtttctcctctcactccccttctcgcgagaaactctcactccccttctctcgcattattaaaaggagaaactctcactccccttctctcacattaaaaggagaaagtagctgttttgtcaaatgatttatt

SEQ ID NO: 7100 - DNA, 471 bp, Zea Mays
accatctaccgtaaagcccaaggaagtgcttatcctgaaagcaatggatatgaagagccaaagaagcagaatcgggtcacatggaccattgagctccatgaaaaagtttttggaggctatcgaatctcttgggggaaacaagtcctcgtgaaacctggagtttgaacacatggctgttcccatggcttttgtagatgaagtggagcagcgcttgttgttttgtaaggtttatgtatataactatgtggattgcaatagccctaataccatgtatatacctcccgctgtggtgcctatgagcctgtccctacgtacaacacctaacgtaggcttggatcctgtcatcttattttgaatcagtttcttgctgtatcaagcctgttcattacactgctatatctctatgtatgataacttgtgtgctgaaacagaaaacaaccgcaactttaatataaattatgttcagtctct

SEQ ID NO: 7101 - DNA, 1263 bp, Zea Mays
atggacgtttcgtgctcctctctctcctacgccgccggctcactgccgcctcttctcactcccacgtcatgcccactgccgcacacctgcctcctccagatctcgccgcgacctacatccccggcgtcgcggccggctccactagcccaggccttcgaccatcgtcttcctccgccgcgcactccatctcgccatgtcgcccgtatgggcgtatggaccgagcactttcttttcctcctgtctccgctcggccaccttcgccgctgcttcgctccatccgcgccaaccccagaaccacccctcgcgtgcctggccttctgcactgctctgtccaccgacccaccaccacctcctcctactaaggttagggcactcgtcgcaggccccgttgcgctcggctcagtgcggaggccgtcgcgggccgtcgttatgtgccttcgccgccgcgcgatccaaatgctcctggacgtctccttcgcctacgcgctggatgtattgttcctcgaatcgccctcgttaagtccgggaaggccgaggtggatcccacggttgagcctcgccgatgcgcaggtagccgatgtggttcatggggaactaggtcttaattttgtgctggaacagaatacccttaagtccatagagatagagctaacagaagagatggcgcctaacttgctgcagaccgatatggttatgcagtttggtctgctagaggcccttgagtttgttcaggaaaaaatgtcatcgtttatgaagttaggtgatggttcacagaagctcttgattttgtcatgggctggtgacccatgatgaagctattgctaccggaagactagaaatatagcatccccttctaaggtgttgaattttggagatcagggcaaaattcaggaagccatggttcaaatgcatataagagaagaagagactgtgatctgtatctatggacagaaccttgatttcgtgttggtggaagttagtcttaacaatatggtaccagagacttcgacaaactatgatttgttaaatcacatactgaatgaacttagagtccctcttatcgcaatatgttcttatgacgatgaagttgcgctttctaaatatatgaacctggccacctgggtgcatgcttccatgtgctgaagccattggatagaagaagcttcagcattctgtggcaccaagcactggaacacaagtctaaaaaggcagcaccccaaggacactaggtattaataatagtaccaaaaaatagaatgtttc

SEQ ID NO: 7102 - DNA, 1963 bp, Zea Mays
cataacatttgtcatacttaaaacaaaaaaatacctttcattttcaatatgaagatggtaaacactatcaggaagaattgcaacccacaaggttaatatcatttacaacaatgacttctaaaacctgaacaccaaaaagtcacacaccaaaatgacaactcaggagcaaaatcatagtcagacacatcattaggtcattacagaaattggtgaagatacgctacaatggtctcatgttacagctatatatataacacattaattgaataattatcatatgatcatgtaactgcaatgtgtattgtgtattgtgtattgtgtaatctaatatacttaaataggagatccccactagcagattttgtttctcggacttagaagaggcacgggcacaccaacttccagcaagtgatgcatgaggaaaccactcccactcccagcaattgatgcatcaggaactggcaggcaattgagcagtcgactcatgatggtacttatattccttcatccatctgttgatcgcaattcgcatggcatgtgtcattcgtctcccattccaaatgtttccttttcatgtctcgattacattgatttgctagggatgaatagtaaataaattatctcatggatggaagcagtagtttttgtttggttggttcaacatgcatgatccagatgcagatggcggtcaacttcttgaactcggtgatggggtttaccacaatgaccctatacaaagcgctggcacagaaggacatgccgttgcatttctggtgcctcaaggatgccaatgtgtcgcagctgaaaaacatgtgcaagctgctgggcgagaaggatgccaacagcctggcaccatctcagacctcaccaagggtgatatcccacggctgcacgtcaccaaccagagcctccagcagcagcgcaccatccaccacatgcatgagcatgatggagcaggaggcctggcatccccagcactgcctgtcggccggatgcacgggatttgcctcgtcattgtaatatgtgcgcaagtgggcatcctcgacgtaaaattagtaattgcattgacaggccctgcaggctatggtggaggtgcatggtgggcattgaccggccctccaggtggtgcatgcggcagtgccatggcggctgggagctagtgtctgggccagagcacggctatggcacatgtgggagatgaggtcctggggccagaaaagtcgctggtgccgagattcgatgcctgaaggttcatctgcaaggttgatccaatcgtgtggaccacggagggtgacgaatgacaaaggcatgcaaacaactaatgtcgttcccatctgcatcagcgtgttcatttgggcagacatgaccgctgacatgcagctttgtttaacgtattttaatgccacttacagattagtagtttttagtcataagtgcaagttttaggcataagtacaactatggtttatgcattgacgatacttttctaattaatttttgcactcgaatactctttaaataattaaccttttgttgtcctaccagtttagcaagaatgcacaaccatattataacatgattatccatcacaaagccctatatatttaacttcatggaatctcatcctaaaaatctatacttctataggattctcacagcaaaatgagccatatgatctagttatatatgaacttaagaaacccaatgcgcatgcaagatgtcttgcattaataagaaaatatttatatatcaataataatacaaccatatcaggcataaggcctaaaaatacatgatggcacagataagactttttatagttattaggtaagtacaaatatcttgctctttcggttggatcacggagggtatgaaaaacctcatgtatctcttctcaacaaaatgacacagcattattccgtcttatacttgaaactgcaaaatatacagccatatgttgcat

SEQ ID NO: 7103 - DNA, 1244 bp, Zea Mays
ctccaatccctcaccgatctagcaaccataacaatactgaatttagataattattcaaatcttttgagtagtcaatatttttctagatgaagtgagaaaagtatgttagtttgattcctcaaaatgtattgataaacagttggatctgagattatacatgcaatacaaaagcaaactctcaatggcaatgagatgtggagattttttcgaattgggaccatcgttcttgctcttcatgatacaagtgatgtgtttcttgagactgccaaattgtgcaagtacacagaaaaggagttgggggctagcttgtttttcggtctcttcgctatctcctggcttctattgcgtttgatttacttcccgttttggataatcaaagcctctagctatcattccatcacattctggaggaagctggatgaattccctacagctttgtactatatcttcaatacaatgcttctcacattgcttgtattccatatgtactggtggaaactcatatgtttgatgataatgagacaattgaataataaaggacaggttacagatgatgttcgatctgattctgaggatgacgagtaatgggggagattcattctttgacatctgcaatgtgtcatttcttcgccaatacttatctacgcctgcttccagaattgattgttttgatcgtggcaagtctcgggcatggataggaaagtttatcctctgtatattgccttgtgatatcaaacatggctagaacgagaatggagcaggtcctatacattacgggtatagctagcaagcttacttgaaggttccttcaaaaaattttggttcaccttttctgatatatggggaaagatatgagagggcgtacagcttttttcctgaaacttacagaacccctctgtaccatgttcagtatacttcactcgtgagtagatttagttctaattgacggtaataaactgattctttttgactgggagtaaatctcacctgtatcttaatgatctcatgtgatgcgcattgagcttcatgcagctatattttttttaatagtgttatccctattctacacaatatgatggatatagttgagatccaatttggttatgagattatctccaagtaggggctgtttggtcccatctttagtcattatcacatctcatcgaatatttgatactagttggaagtattaaatatagtctaattgtaaaacttacacacatgcggactaaaataaaagacga

SEQ ID NO: 7104 - DNA, 1242 bp, Zea Mays
cttagattgggggctgtcattcttcagtacttatttccacaagtcctcgttgatgcttttctatatgtgccagtgtggattttatatctacagcattggtgctcttgttgcttgggaaacccgcagaaaagattttgctgtaatgatgtctcatcatgtaataacatctactcttattggagtttcatatctgacaggattttttcgaattgggaccatcgttcttgctcttcatgatacaagtgatgtgtttcttgagactgccaaattgtgcaagtacacagaaaaggagttgggggctagcttgtttttcggtctcttcgctatctcctggcttctattgcgtttgatttacttcccgttttggataatcaaagcctctagctatcattccatcacattctggaggaagctggatgaattccctacagctttgtactatatcttcaatacaatgcttctcacattgcttgtattccatatgtactggtggaaactcatatgtttgatgataatgagacaattgaataataaaggacaggttacagatgatgttcgatctgattctgaggatgacgagtaatgggggagattcattctttgacatctgcaatgtgtcatttcttcgccaatacttatctacgcctgcttccagaattgattgttttgatcgtggcaagtctcgggcatggataggaaagtttatcctctgtatattgccttgtgatatcaaacatggctagaacgagaatggagcaggtcctatacattacgggtatagctagcaagcttacttgaaggttccttcaaaaaattttggttcaccttttctgatatatggggaaagatatgagagggcgtacagcttttttcctgaaacttacagaacccctctgtaccatgttcagtatacttcactcgtgagtagatttagttctaattgacggtaataaactgattctttttgactgggagtaaatctcacctgtatcttaatgatctcatgtgatgcgcattgagcttcatgcagctatattttttttaatagtgttatccctattctacacaatatgatggatatagttgagatccaatttggttatgagattatctccaagtaggggctgtttggtcccatctttagtcattatcacatctcatcgaatatttgatactagttggaagtattaaatatagtctaattgtaaaacttacacacatgcggactaaaataaaagacga

SEQ ID NO: 7105 - DNA, 1371 bp, Zea Mays
attcgcgccgggttccgcgagatctctggtgccccccggtttcgctcccgcgccccaatgctccctgtcgcgagtcgtggtctccgccgctcgttgcatcttcgttaccgatcagttgatcccgctcatccggcgggggatcatccgaccattggcagtctaccttttcaacactaaagcttctaagttgatgagtgatgaggccaggcaagcaaagattgtcaaattctcggagtccatttggaaacttacatactatgcttctgttcaagcatgggtcctcatgataataaagcaagaaccatggtcgttggatatggtgcagtactttgatggctggccaaatcaacccatcgtgtcctcgttgatgcttttctatatgtgccagtgtggattttatatctacagcattggtgctcttgttgcttgggaaacccgcagaaaagattttgctgtaatgatgtctcatcatgtaataacatctactcttattggagtttcatatctgacaggctatcattccatcacattctggaggaagctggatgaattccctacagctttgtactatatcttcaatacaatgcttctcacattgcttgtattccatatgtactggtggaaactcatatgtttgatgataatgagacaattgaataataaaggacaggttacagatgatgttcgatctgattctgaggatgacgagtaatgggggagattcattctttgacatctgcaatgtgtcatttcttcgccaatacttatctacgcctgcttccagaattgattgttttgatcgtggcaagtctcgggcatggataggaaagtttatcctctgtatattgccttgtgatatcaaacatggctagaacgagaatggagcaggtcctatacattacgggtatagctagcaagcttacttgaaggttccttcaaaaaattttggttcaccttttctgatatatggggaaagatatgagagggcgtacagcttttttcctgaaacttacagaacccctctgtaccatgttcagtatacttcactcgtgagtagatttagttctaattgacggtaataaactgattctttttgactgggagtaaatctcacctgtatcttaatgatctcatgtgatgcgcattgagcttcatgcagctatattttttttaatagtgttatccctattctacacaatatgatggatatagttgagatccaatttggttatgagattatctccaagtaggggctgtttggtcccatctttagtcattatcacatctcatcgaatatttgatactagttggaagtattaaatatagtctaattgtaaaacttacacacatgcggactaaaataaaagacga

SEQ ID NO: 7106 - DNA, 2326 bp, Zea Mays
cttaaaaacacgacttctaattaaaaatggttgagtggttgatttgactagttggcctgttcagctctaatgcccgtgcttcccaggaagataacttgtggttggtaatccatctaatatagtctcctactgaatactggcctgtcttggactctagattaatgccagtgacgatcgttccgcttcatccattgaaacaaaaattcttgatgtagttcagatgaactcgatcatgtcggattcaaagcccaagtgtctggtaattgatgaaattgatggagcactcggtgatggaaaaggtgcagtggaggtcatcttgaagatgatcaatgctgaaaagagtaataattccgacaagagcactaatggtgaggaaactcaagcccgaaagacatctaggaaaagtcatagaacagcaaaactactgaggcctgtaatttgtatatgcaatgacatttatgctccagccctgagacaactgcgccaagtagccaaggttcatgtgtttgtgcagccgacaattagccgtgtggtgaacaggctcaagtatatatgcaaaaatgaaggtttcaaggctagttcaatcgcgctttctgcattagcggagtacactgaatgtgacatccgttcatgcctaaacacacttcagtttttgaacaagaaaagagtggccctaaacattacagcgattgattcacaagtaattggacagaaagataagtcaaaaagcatcctcgatgtttggaagcaggttttgcaaaagaaaagactcaagcgggctggaaaggctgaaagccttttcaatgaagacaaggacatagactttcttttcacgctcatatctaaccgtggcgattatgaagttactatggacgggatccatgaaaatttcttgagattatcgtatcatgacccgatgttgcaaaaaactgtaaaatgtctcgatatacttggagtttcagattccttgacccaatatgtttaccggactcagcagatgccacttcatgcatatcaacctccaattgctatcactataagccgcatggttgctcaagttgagaagcctaatattaattggccaaaagctttgcagaggtctcgagcattgcttttagaaaagaaagacatgttgaaaacctggcaaaaccaaatgtcaccatttgtttcaaggcacctctcagtagaatcattcgttgaagacactgcttctccccttttacatattctctctccactgagtttgagacctgtagcactgaatttgctgtcagagagagaaaaggatgaacttgtgcaattagttgatactatggtctcctattcagttacatacagaaacacaaagtttgtccctcaagaaaaggcaaacctatctgtagtgccgcatgaagtttcatcactctctctttatcctccaattaatgatgtcataaattttgagggctatcaatcagagcacattggactgtctttagccatgaaacaggttttggtgcatgaggtggagaagcaaaagatcattaaagatagcgctggcaaattgttgaaccaatctaatgatggaaatatgaagagcgaagctttatcaactataaggaagaaaacagtagctaattccatccgtccagctttacattcttccaaggatagttccaagtgcaattcatctacacttgaaatgcagtcaaactcagcctctattgtgaatgataacgattctatatctgccaaaaaacactccagccgtgcagcaaatttctttgacagatttaggaaggaaagaccagtagacgcaaaaactcatagtgatgtggggctgcaaagagcaacacttcagagggattcacgccctctgatcttcaaatataatgagggtttcacaaatgctgtgaaaagaccagtgagagttagggatcttctgctcagctaggcccgcttggtcgaactcagcaacccgccctgctgtttgattgtctgtatcttccgttgccgttgagctaggacgacctcatgcaaatagtggtctggagccaggctcaggagggaagactattttggccgtatgaactcagcctggctggacacagaaaccaagatatagttttaattagttttcttgttacatctcttgattaatgcatcaaattaagaaactgattttacttttgtgtttctgatatttgtatgaacaaaactagatctcacttctctacagcaacaacagctgctctggatcaagagtgagtaaacacggttcctgcgcagttgcttcggctgattaagagagcagttgaacggttattttaaatccaatatcttttat

SEQ ID NO: 7107 - DNA, 3797 bp, Zea Mays
tcggccacttcccgccatcgactcttcgcgtctccgccgccgccaggctaccgctgcgccggcgggtcggcgatggacatggacatggagatgccagatcccgacgagctcgagtggatggagagccacggcctagtccctgaggaagaggacgcctacttcgacgaccccgacgagggcttcgtcctggcccccggcgattcggatcaaccgtgcaattccccgcagccgcaggagtccgccgcgccaagagcaaatgaagcgccgggcggtttgaagcggcctccgccaccgccaccgccggagcaggatgaggaagaggagaggagcaagcggagaaacgttgagcaggaggacgaggattggctgcgctactcgccgcctcccgcccctgagattgtcgtcgccgagaagacaatctcgcggttcgcgtcggagatccatggagactctgtgcccgtaactgctcccaatggtgagagagtttatgccaagcttgcaatggaggggttggtcggtcgaggaattagcggaactaggcaaggggttcagttctccaacccaaacagcaatcacaagggcctgctctcagaatcctttgactcactaacaaggcgtgctgagcaggaggctttagcaaaggcattgcaagaaagtacagactcaatagaccgtgtggcttgttcagcgactccactagtcacagaaaaactttgggtggaaaagtatgcaccgaattctttcacagagctattgagtgatgagcacacaaaccgagaggtacttctatggctaaaacaatgggactccattgtttttggatcccatattcgggctacaggtgatgatgtcttgtctgccttacgtcgacactcttcaaccatccaaaagaatgcaagtaacagaaatttcttttccaagagtaaggggggtcctgttgcaagtcaagatggcacacctctgaatgcacaaagcagcaatccagaaggtttaggtggctccttcagcaaaaagtcatcagttgataatgcaccagaacaaaaggtgttgctattatgcggtccacctgggctcggaaagaccacactcgctcatgttgcagtcagacattgtggctaccatgttgtggagattaatgccagtgacgatcgttccgcttcatccattgaaacaaaaattcttgatgtagttcagatgaactcgatcatgtcggattcaaagcccaagtgtctggtaattgatgaaattgatggagcactcggtgatggaaaaggtgcagtggaggtcatcttgaagatgatcaatgctgaaaagagtaataattccgacaagagcactaatggtgaggaaactcaagcccgaaagacatctaggaaaagtcatagaacagcaaaactactgaggcctgtaatttgtatatgcaatgacatttatgctccagccctgagacaactgcgccaagtagccaaggttcatgtgtttgtgcagccgacaattagccgtgtggtgaacaggctcaagtatatatgcaaaaatgaaggtttcaaggctagttcaatcgcgctttctgcattagcggagtacactgaatgtgacatccgttcatgcctaaacacacttcagtttttgaacaagaaaagagtggccctaaacattacagcgattgattcacaagtaattggacagaaagataagtcaaaaagcatcctcgatgtttggaagcaggttttgcaaaagaaaagactcaagcgggctggaaaggctgaaagccttttcaatgaagacaaggacatagactttcttttcacgctcatatctaaccgtggcgattatgaagttactatggacgggatccatgaaaatttcttgagattatcgtatcatgacccgatgttgcaaaaaactgtaaaatgtctcgatatacttggagtttcagattccttgacccaatatgtttaccggactcagcagatgccacttcatgcatatcaacctccaattgctatcactataagccgcatggttgctcaagttgagaagcctaatattaattggccaaaagctttgcagaggtctcgagcattgcttttagaaaagaaagacatgttgaaaacctggcaaaaccaaatgtcaccatttgtttcaaggcacctctcagtagaatcattcgttgaagacactgcttctccccttttacatattctctctccactgagtttgagacctgtaagctgtcattcactaatctagtagtcttattgaaccttgataatgaaattactcttttggtatatttatttgctcaaaactcacctgccttcaagatgatgcacatgtgaaggttagtattatggtaatatatgtttctaatacattgaactagctaaatatggacatatatgaaacttggaagtatgaaactcagcttaattattattattttttgaaatataacagcaactaagaaatatgcttaagaccctcagtcaatccacatttactagtttgaaacatatgagtttcagatgacgttgcaagtttcaatataggccaattttttacacgacgttacaaggttcctaacaatgagtgatattttcaggtagcactgaatttgctgtcagagagagaaaaggatgaacttgtgcaattagttgatactatggtctcctattcagttacatacagaaacacaaagtttgtccctcaagaaaaggcaaacctatctgtagtgccgcatgaagtttcatcactctctctttatcctccaattaatgatgtcataaattttgagggctatcaatcagagcacattggactgtctttagccatgaaacaggttttggtgcatgaggtggagaagcaaaagatcattaaagatagcgctggcaaattgttgaaccaatctaatgatggaaatatgaagagcgaagctttatcaactataaggaagaaaacagtagctaattccatccgtccagctttacattcttccaaggatagttccaagtgcaattcatctacacttgaaatgcagtcaaactcagcctctattgtgaatgataacgattctatatctgccaaaaaacactccagccgtgcagcaaatttctttgacagatttaggaaggaaagaccagtagacgcaaaaactcatagtgatgtggggctgcaaagagcaacacttcagagggattcacgccctctgatcttcaaatataatgagggtttcacaaatgctgtgaaaagaccagtgagagttagggatcttctgctcagctaggcccgcttggtacctgcacttctgtaaagttatctttgtgtttatgaattttcatttactgtatattgattgtatcatgaatattgtatcatgtggttgtgattggttgcctggccggatccctggctaggtcgaactcagcaacccgccctgctgtttgattgtctgtatcttccgttgccgttgagctaggacgacctcatgcaaatagtggtctggagccaggctcaggagggaagactattttggccgtatgaactcagcctggctggacacagaaaccaagatatagttttaattagttttcttgttacatctcttgattaatgcatcaaattaagaaactgattttacttttgtgtttctgatatttgtatgaacaaaactagatctcacttctctacagcaacaacagctgctctggatcaagagtgagtaaacacggttcctgcgcagttgcttcggctgattaagagagcagttgaacggttattttaaatccaatatcttttat

SEQ ID NO: 7108 - DNA, 3396 bp, Zea Mays
cgaagatctgggagtaggacctggacaggctgtgtatcgggtacccatcgatcaccgtccccagactagggagaaggcggcaacacccactccatttcggccacttcccgccatcgactcttcgcgtctccgccgccgccaggctaccgctgcgccggcgggtcggcgatggacatggacatggagatgccagatcccgacgagctcgagtggatggagagccacggcctagtccctgaggaagaggacgcctacttcgacgaccccgacgagggcttcgtcctggcccccggcgattcggatcaaccgtgcaattccccgcagccgcaggagtccgccgcgccaagagcaaatgaagcgccgggcggtttgaagcggcctccgccaccgccaccgccggagcaggatgaggaagaggagaggagcaagcggagaaacgttgagcaggaggacgaggattggctgcgctactcgccgcctcccgcccctgagattgtcgtcgccgagaagacaatctcgcggttcgcgtcggagatccatggagactctgtgcccgtaactgctcccaatggtgagagagtttatgccaagcttgcaatggaggggttggtcggtcgaggaattagcggaactaggcaaggggttcagttctccaacccaaacagcaatcacaagggcctgctctcagaatcctttgactcactaacaaggcgtgctgagcaggaggctttagcaaaggcattgcaagaaagtacagactcaatagaccgtgtggcttgttcagcgactccactagtcacagaaaaactttgggtggaaaagtatgcaccgaattctttcacagagctattgagtgatgagcacacaaaccgagaggtacttctatggctaaaacaatgggactccattgtttttggatcccatattcgggctacaggtgatgatgtcttgtctgccttacgtcgacactcttcaaccatccaaaagaatgcaagtaacagaaatttcttttccaagagtaaggggggtcctgttgcaagtcaagatggcacacctctgaatgcacaaagcagcaatccagaaggtttaggtggctccttcagcaaaaagtcatcagttgataatgcaccagaacaaaaggtgttgctattatgcggtccacctgggctcggaaagaccacactcgctcatgttgcagtcagacattgtggctaccatgttgtggagattaatgccagtgacgatcgttccgcttcatccattgaaacaaaaattcttgatgtagttcagatgaactcgatcatgtcggattcaaagcccaagtgtctggtaattgatgaaattgatggagcactcggtgatggaaaaggtgcagtggaggtcatcttgaagatgatcaatgctgaaaagagtaataattccgacaagagcactaatggtgaggaaactcaagcccgaaagacatctaggaaaagtcatagaacagcaaaactactgaggcctgtaatttgtatatgcaatgacatttatgctccagccctgagacaactgcgccaagtagccaaggttcatgtgtttgtgcagccgacaattagccgtgtggtgaacaggctcaagtatatatgcaaaaatgaaggtttcaaggctagttcaatcgcgctttctgcattagcggagtacactgaatgtgacatccgttcatgcctaaacacacttcagtttttgaacaagaaaagagtggccctaaacattacagcgattgattcacaagtaattggacagaaagataagtcaaaaagcatcctcgatgtttggaagcaggttttgcaaaagaaaagactcaagcgggctggaaaggctgaaagccttttcaatgaagacaaggacatagactttcttttcacgctcatatctaaccgtggcgattatgaagttactatggacgggatccatgaaaatttcttgagattatcgtatcatgacccgatgttgcaaaaaactgtaaaatgtctcgatatacttggagtttcagattccttgacccaatatgtttaccggactcagcagatgccacttcatgcatatcaacctccaattgctatcactataagccgcatggttgctcaagttgagaagcctaatattaattggccaaaagctttgcagaggtctcgagcattgcttttagaaaagaaagacatgttgaaaacctggcaaaaccaaatgtcaccatttgtttcaaggcacctctcagtagaatcattcgttgaagacactgcttctccccttttacatattctctctccactgagtttgagacctgtagcactgaatttgctgtcagagagagaaaaggatgaacttgtgcaattagttgatactatggtctcctattcagttacatacagaaacacaaagtttgtccctcaagaaaaggcaaacctatctgtagtgccgcatgaagtttcatcactctctctttatcctccaattaatgatgtcataaattttgagggctatcaatcagagcacattggactgtctttagccatgaaacaggttttggtgcatgaggtggagaagcaaaagatcattaaagatagcgctggcaaattgttgaaccaatctaatgatggaaatatgaagagcgaagctttatcaactataaggaagaaaacagtagctaattccatccgtccagctttacattcttccaaggatagttccaagtgcaattcatctacacttgaaatgcagtcaaactcagcctctattgtgaatgataacgattctatatctgccaaaaaacactccagccgtgcagcaaatttctttgacagatttaggaaggaaagaccagtagacgcaaaaactcatagtgatgtggggctgcaaagagcaacacttcagagggattcacgccctctgatcttcaaatataatgagggtttcacaaatgctgtgaaaagaccagtgagagttagggatcttctgctcagctaggcccgcttggtcgaactcagcaacccgccctgctgtttgattgtctgtatcttccgttgccgttgagctaggacgacctcatgcaaatagtggtctggagccaggctcaggagggaagactattttggccgtatgaactcagcctggctggacacagaaaccaagatatagttttaattagttttcttgttacatctcttgattaatgcatcaaattaagaaactgattttacttttgtgtttctgatatttgtatgaacaaaactagatctcacttctctacagcaacaacagctgctctggatcaagagtgagtaaacacggttcctgcgcagttgcttcggctgattaagagagcagttgaacggttattttaaatccaatatcttttat

SEQ ID NO: 7109 - DNA, 1632 bp, Zea Mays
agaggatttgctgactagaataaaatataatataaaaattcatgagtggacagcctaatatcgctgcaacggcggcgccgccgataaaacggccagccgggcagcggagacgcggagtggggcgcgacggcgcgtaacctgtggggtttcaggttttgtccctgcgtggcagcgacccagccccatcgagcatcgaggcatggaaccgggagccaaatcggaagcaaagcaaggtgaggcaggatctggcgcgggggaaagcggcagcggcaaggtgtatcatgagaggcagaggctgcaattctgtctcctccatgctctcaacaaccttatgcaggaaaaggaatgtttcacccgtgctgagttggacggcatcgctggaaatcttgttctcaatgatccaaacaagggccagtggactcctctaccattcatttttaaacctcaccacaatgttataactgggaactatgatgtgaatgttctcatcacagcattagaagctagaaacaagaaggtggtttggcatgatcgtcgtaaaggggcatcatcggttgatctgaatgcagaaacattggtaggcctggtgatcaatgtacctatcaggaggttcagggggctttggactggcaggcattgggtggcaattcgacgcattgatggcatctggtttaatttggacagtgatctttctgaacccaagcagtttaaggaccaagaaaacgtgattgggttccttgacagtgtgctcagccaaggtggagaactcatggttgtgctgcaagaaatttcctaaaccttacggtttaatcgctgatcataatggacagattggtaaatcgaaggtccagtatgcaacatatacacttggtttattcatatactggtttattggtaaatcgaaggtccagtatgcagacacctgctaacccttggtttgatttattgctgtgcccgtctctatcatatactggattgccaagcaggtgtctgcagtaggtagaacattagcttgctaaatgatgaaaatagcgaacttcaatcctcagcaagaattaatgttgctgcggaattgtacagaactaatagggaggttgcttgtgttgtagttatatgctttggagaaacgaagttatcccatgctcctagaatttgtcagttcgtttgtaagtaccattggatatcagggaacgtaacattatctgtagactgtactagttgatacccctggagtaatcagagcgatgtcccatggtctttcaaatattacaaagcataaaatatatgtagctgtaagatcattgttgtttaatgccatcatatcgagttaggaaggtgatgatgttgagcttgttattgagatgctgtggcgatttaattactttctctccttgcccgtgcacgcactcatgcaatttggtttcagttggggaagcaaaataaccaaagggaaaaatatgtagtttgcctactgtgttctcccgaatttcaacttcggactcagaaacgtcagaggaaacaagaaaagtaagatttgtctgtaccctttccttccaaaaccgccttacaaaactaccaaagaggttattcagaaattcagtttttgttactctttcaataaaaaaaacttga

SEQ ID NO: 7110 - DNA, 1214 bp, Zea Mays
cctcatctcactttctctcccagatgtttcatcttccttcgctttcctcctctctacattgcgtactctggatgtatgcgtagcgcctgctacatcaccgaaaaggcatcgcagaccttcgatcgcatcagacggtggagagtaacactagctcaaaaccctagcctccaactcatatacctgttgctcgccccgacgcgcatcaacttccgtcgccgccccttcctctccgtcgctcgcctcgcgcctacgccaccacctctgccatggccccgaagaaggatgaggcctcgccgccgtcgtccaagccggccaagtccggaggcgggaagcagaagaagaagaagtggagcaagggtaagcaaaaggagaaggtcaacaacgctgtgctcttcgaccaggccacctatgacaagttgctctccgaggtgcccaagtacaagcagatcaccccatccgtcctctccgagcgtctcagggtccataagaagcttacgtatccatcaattaccaatccagagaggatgatattgatgaataaagcacgaagtttccgtcaaagttgtggataccacaacctagaagagttggtggtagatttttcatcaagtatgaaatgtctgtgatgctgagctgggtgcttggtggcaacagctcaaaaggtagaaggaagacctttaagttgcccactttctgacaatgcgcatgacgagatttatcgatggtttgacggatttaacaccacgcgcagggcgtgcggcaatacactagtgagtatatatgtgtggtgttgtgtgtagtgtcgtgagtccatagtgttcttataccctctcaaaaaaacatataatataattcattgtgctttgaagaaagaaaatttagtgaagtttagtggcatctagatagtttgtttaaaaacttttattatgaaaataaatttagatcttagaaatgcaattattttattactgaagatgtaaggctatacatagattgagtcatgtatccagtaaaaacccagcagccaggcaaacgatatttatagcgttctttctgtgcgactgcatagctctgaggtgggaccaaaggtgggcacggaagcagatgccgcgggaggatgagagggaagtgaaaataaataatagaatatagagtaattagtatatagtagagatttaagataaatattgttggtgacttgttctcaaatgcta

SEQ ID NO: 7111 - DNA, 2426 bp, Zea Mays
cctcctcgagatattttgcaatgccttcacaaatatctcgttggccccgcggcacggtgccatcagccatcgcgggcgaccgcgcgccattatagcacacggggcacggcacgccttcggcctcccactaactgcacagaggacgacgcggcagcgaggaggaagcaaaggaaaggggatatgtcgaggccgcccaacaggagcgacgcgcacctctccgccgaggacgaggcggcgctggaggccgaggtgcgggagtactacgacgacgcggcgccaaagcgccacaccaagccctcccgcagcgagcactccgccgtgtacgtcgacgcgctcgtcccggacgtcggcggcaactcccacccggagctggacaagttccaagagctggaagcacacaccgagaggttggtgtacgagggcgccaatgtgggagatgagttcgtggagacggagtactacaaggacctcggcggcgtcggcgagcagcaccacacgaccggaacgggtttcatcaagatggacaaagctaaaggcgcccccttcaaactgtctgaagatcccaatgcagaggagcgacatgcttcttgcaggggaaaccctgctaccaacgagtggatcccgtcagctaacacggtgtacccggcgtcagacaagccaagcagaagcgacagctgagggactgtatatctccagccatgagaattcagacgggtgctttccaccattaccattagaataaggaaccacactggttgtccaccgtatctttactgttctgcgtcgagattcttgtgattcttacatggaacaaattaagcgtgctacgagttagacctctgtgttctggctgtaaatggcaaggaataaagttctaatcgtggttcagcagtcaatcaattactctgtttctgatcctaaggctctagaaacaatcggaccttcaaaataaactaagcgaaaattctatgtcgtttcgaaattgcctttcaaccacaccagacagaaagaggtggggtgataaagattagagcaagaacatggtatttattatatagagattagagatacaagttgaaatggttgttgatacagatattaccaagaaacacctacgaactgcctgctggtgatcgattgatttaggccttcacttcaaactcgctacgggtagccgggtaggcaagcaagacagacgagcatggaggatacggatcagtcatggtgcgcagaggccgccgcggcgtcggtggactcggccgtcggccggacgcggaggcgtgcgagctcggcgtcgatacggccggtgaggatgagcaggaacatgcggaggtcgcagaggaaggaccacacggggtgaccgaacgtggcggggcggttgccctccaagaagaagtggctgtaccacgccatgccgtacccgagaatggggcccgcgaggaggaccgcggcgcggccagtggcggccgcgagcaccgcgcaggcgagcgaggccagcgtgccgaggaagtgccaccgccgcgtgcccggcttggagtgctggctcaggtagaagccccagaactcctccatgctcccgaactgctgccgcttccccgcggtctcgccgccgctcctccccatcagtcgcggtcgctggacccttccgctccgcgctgcgctgcttcacaggcaacggtgcgttgcgttggtgcccactgcgcaatcactggctctctctctcctttatccctactctgatgcaagagcatgctggagcctggaggcaggcgatacaagaaatgccccgccttgtgcaatgcccgttgaaagctgctatcaggaacgccgtcgaggagacacggaaccgaccgaccgggcgacatttcctaaggcaaatcagcaaatcggtaaatggccaggagcatggcaacaatagttagcgcaattccaagaccatattttcagaataacttttgatccaatcacgtttttctacatctaccgatggtagcgcgaactggaaaagcagcagccgctaacagccccccgccatagaccaaatagacgaccagaccagacaagccaaggttttagcattaatccataccgacttttgtctcaaaagaatctatagattgcagctgtaacagctgcatcagtggctaactttaatctaaagcaaacagcctaaattgtatttggtgctgtgccggacttcggtaccaagctttagcctgatgatcctaaacaaaactacggctttataggatgtttggtttgaggaatgaactagtccatcatcttctcactcctcactatttttgtttggtttgtgaaatggaataagttgatcatcaccacctcattcgtcataattagttagttagtactaatatgaggaatagggtcatcctaccaaatttgaggaatgaacacatgatgca

SEQ ID NO: 7112 - DNA, 5617 bp, Zea Mays
tttaaaaaaaccataataaagaatttatttcttaaaaataccataatgaagaaattttagatagagttaactcatgatatacatcatacgaacaccacaggaactagaactctagtagacaaactcatgacatccatacatagattcagacaccacaagtagacccaacatacgcaaagtttgtgaccacattccaccatcctacgacattacgaccatattgacaaacgccataattcttgtaacccaattttatttcacagaacgaccgaggcgaactgccgttcctcaaaccacgcaggtacgacgaccgcagaccgaggtctagccggagatctgaatggacttcacttcaggcttcttggcgtcctccttcggcacagtgactgtaagcacgccgttctccatggcggccgtgatctgctccgtcttggcgttctcgggcagtcggaacctgcgcaggaacctcccgctgctccgctccacgcggtgccaggtgtccgtcttctcctcctgctccttgttgcgctcgccgctgatctgaaggacgttgccgtcctcgacctccaccttgacctcctccttcttcagccccggtacgtcggccttgaacacgtgcgcctctggagtctccttccagtcgatccgcgcgccagcgaaggccgcggtctccgagctggtccgcgggaacgaggggaagagactgctgctgttgccggagccgaaggggaagccctcaaaggggtcccagaggtcgagggagaagggatcgaacacgttgctgcggcggatcagcgacatggtcaggttcggttctagtcttcttgtcaacgagaatctaatcgaagatttggggaagaggtttgagtgaattgattgagcttcggatcgctgcttgctgtctccctcaattcctagaaggggtctttttatagagggaaagcgagagagatgaagtggaggagaaagcagtttctggagagttctcacgtgttcgcggatagacccggatagacccgacgccgctgtattggagcgtggagaatgctagagagagctatccagtggcagtccctcttttagatcgtagtactgggctgggtttctagtaattttgttcatggaccaagacctgggcttatgctggaaaaataattcagctcaacatcaaacgaggcccattcctcagacctctctgtctcgtcttcctagttcggacttcggattaaggcgacccaccgagcacctcgatacggcggagtcgtgggaagccagggaggtgaggacgacgtggcgaagtcgtgaggacaagaaaattccaccgctgtggcagccatgtcagtgcaggagtacctggggaagcacctgctctcgcgcaagagcgaggaggccctgaatacggcggtccgcgccaaggcccctgacccggcgcttttcatcgtcggccacatgaggcgggaggcgcccaccgtgatcacgagggtgcgggcgcgccagatccttgacgggcgtagcgcaccggccgttgaggtcgagttgcacaccaacaaggccgtgcaccgagcatctacggctagcgtgggcgcgctcgagggcgccgccgccgacgcggccggggcctccgagaggcggaagttcctcgccaggggggtcgcctacgcggtgcgggtgatcaacgacaaggtgtcggaggcactcgttgggatggatccgcagcagcaggcgcagatcgaccaggccatcatggacttgacaaggcgcgccacagattttatccaaatggaaatagatatgatattgtgcgaaatgcaggctgagcttggagcaaatactatgctggcagtgtcaattgcagcttgcaaagctggtgctgctgaaaaagaggttccactctacaagcatatagcggatcttgttggcaaaagcgctacaactcttcctgtccctgcaaatacagtcattaatggtggaaagcatgctggaaatggtcttcccattcaagaaattatgattcttcttgttggtgctatgaacttcgaagaagcaatgcagatgggttcagagacctatcaccatctcaaggatattatcttggagaaatgtggctcagacagctgcaacattggagatcatggtgggtttgctccaaatatttccaggcctggatcttgttattgcggcaatagagagggctgggtataatggaagaataaaattgacaattgatgttgctgctactgatttttgtgtaggttgcatgggatgacttgttgatgtctgaccctgaacgcattaagcgggcagttagtgagtacacttgcaatgctcttgttctcaaggcaaatcaagtgggcactgtcactgaggcgatagaggttgtgaagcaggcaaatgatgcacattggggtgtgatggtgtcacataggtctggagatactgaggattctttcattgctgacctggctgttggtgctgcagccggacagatcaaagccagtgtcccatgccgtggagtctaactaaatacaatcagctgcttagaatagatcaatagaggaagaacttggaagtgaaggcgtctatgcaggggagaattgaaaatcttgacccgcctttgttgacttggtgcatactcagttcaaaagagctaaggaacgatcggattcatgtgacgataatctttttaatgacctgatgtctctctataattcaagcagcagtgctagcgttgacgcaaatattcttcgatggttatctgagaagttgcagcttgtcacaatatatgacctcaatcatgaatctttgaccttgcatgagatggctagtggcggtgatcctggtggcattgttgaaaagatgtcaacgctcctaaaagagattaaggattttgtgcaggcagaagaccctgagatgggtggaaaaagttctccaaaaggcaactcagcatgtcctgttattcctgatgatttctattgcccaatatcactggatttaatgaaagacccagttattgttgccactggacttatgagcgaggtaaaagggatgcaacaacagcactgtttaacttgtgtatttaccaaggcaacaaggggaagactgttagagctggatactaccagaactgctcatggagactgaaagtgggatggtagatgaggcccttgcaatattgacaatcctctcaggccatcctgaggggaaggcagcaattggcgctgcttctgcagtgcctgtacttgttggagttgtcagaaatggatctccaaggaacaaggaaaatgctgctgctgttatggtccatctatgaaatggggtgagcagcagcaacaacatcttgccgaagcacaggagcagggcatcgtgtctttgctggaggagctagcagacgaaagtggcacagagagaagaaagaggaaagctgtgcagctgctcgaacgaatgaatcagttcctaaagcaacagagtcaagcccaagccaaggccatggcacaggctcatgcgcaagcacaggcacaagatcatgctcaagcacatgcacaagcacaggcacaagcgcagtctcagctccttggttcaagctcaagcacacgcagatatgcaagctgaggaatcactacttctcatttcatcggatatatgctgctgctaaatgaactgttacttacaaaataattttgtttccaatattgactcatttacatgtactgctagttggattaggtaagccatgttttattttgcatcgactgatactgagcataagaaaatagaatttggaagcacaagcagatattcagacattagagaacctaataaacaaaaaaaagaaacaacagatcggcctatacttagaaacattttaacaggatatgagctacatttttatgttgttggaatgaacaacaaatacgatatgcagaccaaatgtttagcgatatttattgatggatactactggctttattgcacaaatggcttaaattttgagtagtgcatcaatgacagtagtagagaataaattgatataaccttagaaacgtttgatgaagggcttcaagctcacgctcttctgggtgaccttcatacagccacacagcctgagctgcttcgtcgcttccaagaccgcgccattgtagtcattgaccatgcagttcgaaaggttgagctcgatgagctggctgcaactctcacagatggcgaacaggcttgcatcatggtcaatgaggtggcaagggaagcgtcatggtccttaaccaaggcagaaacagccgcgtccgtgaccgtgagattctcgcagctgttcaaatcaatgtcgaccagcccactgtccgagctcttcattagtggaaggaagccattgtcggtgactgcactaaggccactcaaattgatgttctccagctgagggcagaacatgcccaccataggaaggctggtgtcggtgaagcctgagcaatccttgatggccagggaccgaagcgatttgcatactggaagctgtgcagatgcggagcatatgtccttgatctcgatgcacttggacagagagagggacttgaactttgggctacagttgaggaagaaagcaagaatgcccgtaagagtaaccttgctgcattcctcgatctgcaaactctccaggccttagatgattatgtaaattccttcagacatccgtctgagaccttgctgcacttcttgaggttaacaagcctcaaacttgggctgaacttggcgcggatgcaagagcaagatccatgagtcccgggcaggagacaatagtcatatgcctaagcttctgcaggaccagggcattagccatcacctagaaccccctctcactgacagcagggatgcgagcgagggccagatctttgattgacttcccatagtaccccatcatgacaagagaagcataattagtaacgttcaaaccctgaaaccgcatctcctctgtatccctggaacggagacatgccgagccgcaaaagaccaagaacgcacaatcctgaaacaagcatcagacttcctcaacgattaaatgattaaatcccaagttcaatagcacatttataagagataatttcacaaataaggcaatatattaaaaaaaacatgcacataattcgacacttaaacaactgaatagaagcgaaacctagacccggttcctgtcgagcataagaaatcatagacgaaaaccaaatcaaaagaactggcacgccttcaatcacattacaacgccaaagagaaacacacaaattattcaggaagggctgcgggcaagcgagacgataccccgagcccgagtgtcgactcccgaccaaattgtcgacgtgctaccaccacctcgctctccctcagttgagcagattaggtcgcgggcatgaggcaggtgtgctcgaggtggatgcgtcgaccattggagggcaagggcgtcgtggaggaggaatacttcgcgaagaggtgccatggcagagttgaggtcgtgggagggggcaagagtagtgggcgtggaaaggatgaggcggaagggcggcggcgacaatggcctccgtgagttttgtgagggtgtggaaggtgggcgtcgagaatgaggtgacgaaccgacgag

SEQ ID NO: 7113 - DNA, 5584 bp, Zea Mays
tttaaaaaaaccataataaagaatttatttcttaaaaataccataatgaagaaattttagatagagttaactcatgatatacatcatacgaacaccacaggaactagaactctagtagacaaactcatgacatccatacatagattcagacaccacaagtagacccaacatacgcaaagtttgtgaccacattccaccatcctacgacattacgaccatattgacaaacgccataattcttgtaacccaattttatttcacagaacgaccgaggcgaactgccgttcctcaaaccacgcaggtacgacgaccgcagaccgaggtctagccggagatctgaatggacttcacttcaggcttcttggcgtcctccttcggcacagtgactgtaagcacgccgttctccatggcggccgtgatctgctccgtcttggcgttctcgggcagtcggaacctgcgcaggaacctcccgctgctccgctccacgcggtgccaggtgtccgtcttctcctcctgctccttgttgcgctcgccgctgatctgaaggacgttgccgtcctcgacctccaccttgacctcctccttcttcagccccggtacgtcggccttgaacacgtgcgcctctggagtctccttccagtcgatccgcgcgccagcgaaggccgcggtctccgagctggtccgcgggaacgaggggaagagactgctgctgttgccggagccgaaggggaagccctcaaaggggtcccagaggtcgagggagaagggatcgaacacgttgctgcggcggatcagcgacatggtcaggttcggttctagtcttcttgtcaacgagaatctaatcgaagatttggggaagaggtttgagtgaattgattgagcttcggatcgctgcttgctgtctccctcaattcctagaaggggtctttttatagagggaaagcgagagagatgaagtggaggagaaagcagtttctggagagttctcacgtgttcgcggatagacccggatagacccgacgccgctgtattggagcgtggagaatgctagagagagctatccagtggcagtccctcttttagatcgtagtactgggctgggtttctagtaattttgttcatggaccaagacctgggcttatgctggaaaaataattcagctcaacatcaaacgaggcccattcctcagacctctctgtctcgtcttcctagttcggacttcggattaaggcgacccaccgagcacctcgatacggcggagtcgtgggaagccagggaggtgaggacgacgtggcgaagtcgtgaggacaagaaaattccaccgctgtggcagccatgtcagtgcaggagtacctggggaagcacctgctctcgcgcaagagcgaggaggccctgaatacggcggtccgcgccaaggcccctgacccggcgcttttcatcgtcggccacatgaggcgggaggcgcccaccgtgatcacgagggtgcgggcgcgccagatccttgacgggcgtagcgcaccggccgttgaggtcgagttgcacaccaacaaggccgtgcaccgagcatctacggctagcgtgggcgcgctcgagggcgccgccgccgacgcggccggggcctccgagaggcggaagttcctcgccaggggggtcgcctacgcggtgcgggtgatcaacgacaaggtgtcggaggcactcgttgggatggatccgcagcagcaggcgcagatcgaccaggccatcatggacttgacaaggcgcgccacaggctgagcttggagcaaatactatgctggcagtgtcaattgcagcttgcaaagctggtgctgctgaaaaagaggttccactctacaagcatatagcggatcttgttggcaaaagcgctacaactcttcctgtccctgcaaatacagtcattaatggtggaaagcatgctggaaatggtcttcccattcaagaaattatgattcttcttgttggtgctatgaacttcgaagaagcaatgcagatgggttcagagacctatcaccatctcaaggatattatcttggagaaatgtggctcagacagctgcaacattggagatcatggtgggtttgctccaaatatttccagcatatctgaaggcctggatcttgttattgcggcaatagagagggctgggtataatggaagaataaaattgacaattgatgttgctgctactgatttttgtgtaggttgcatgggatgacttgttgatgtctgaccctgaacgcattaagcgggcagttagtgagtacacttgcaatgctcttgttctcaaggcaaatcaagtgggcactgtcactgaggcgatagaggttgtgaagcaggcaaatgatgcacattggggtgtgatggtgtcacataggtctggagatactgaggattctttcattgctgacctggctgttggtgctgcagccggacagatcaaagccagtgtcccatgccgtggagtctaactaaatacaatcagctgcttagaatagatcaatagaggaagaacttggaagtgaaggcgtctatgcaggggagaattgaaaatcttgacccgcctttgttgacttggtgcatactcagttcaaaagagctaaggaacgatcggattcatgtgacgataatctttttaatgacctgatgtctctctataattcaagcagcagtgctagcgttgacgcaaatattcttcgatggttatctgagaagttgcagcttgtcacaatatatgacctcaatcatgaatctttgaccttgcatgagatggctagtggcggtgatcctggtggcattgttgaaaagatgtcaacgctcctaaaagagattaaggattttgtgcaggcagaagaccctgagatgggtggaaaaagttctccaaaaggcaactcagcatgtcctgttattcctgatgatttctattgcccaatatcactggatttaatgaaagacccagttattgttgccactggacttatgagcgaggtaaaagggatgcaacaacagcactgtttaacttgtgtatttaccaaggcaacaaggggaagactgttagagctggatactaccagaactgctcatggagactgaaagtgggatggtagatgaggcccttgcaatattgacaatcctctcaggccatcctgaggggaaggcagcaattggcgctgcttctgcagtgcctgtacttgttggagttgtcagaaatggatctccaaggaacaaggaaaatgctgctgctgttatggtccatctatgaaatggggtgagcagcagcaacaacatcttgccgaagcacaggagcagggcatcgtgtctttgctggaggagctagcagacgaaagtggcacagagagaagaaagaggaaagctgtgcagctgctcgaacgaatgaatcagttcctaaagcaacagagtcaagcccaagccaaggccatggcacaggctcatgcgcaagcacaggcacaagatcatgctcaagcacatgcacaagcacaggcacaagcgcagtctcagctccttggttcaagctcaagcacacgcagatatgcaagctgaggaatcactacttctcatttcatcggatatatgctgctgctaaatgaactgttacttacaaaataattttgtttccaatattgactcatttacatgtactgctagttggattaggtaagccatgttttattttgcatcgactgatactgagcataagaaaatagaatttggaagcacaagcagatattcagacattagagaacctaataaacaaaaaaaagaaacaacagatcggcctatacttagaaacattttaacaggatatgagctacatttttatgttgttggaatgaacaacaaatacgatatgcagaccaaatgtttagcgatatttattgatggatactactggctttattgcacaaatggcttaaattttgagtagtgcatcaatgacagtagtagagaataaattgatataaccttagaaacgtttgatgaagggcttcaagctcacgctcttctgggtgaccttcatacagccacacagcctgagctgcttcgtcgcttccaagaccgcgccattgtagtcattgaccatgcagttcgaaaggttgagctcgatgagctggctgcaactctcacagatggcgaacaggcttgcatcatggtcaatgaggtggcaagggaagcgtcatggtccttaaccaaggcagaaacagccgcgtccgtgaccgtgagattctcgcagctgttcaaatcaatgtcgaccagcccactgtccgagctcttcattagtggaaggaagccattgtcggtgactgcactaaggccactcaaattgatgttctccagctgagggcagaacatgcccaccataggaaggctggtgtcggtgaagcctgagcaatccttgatggccagggaccgaagcgatttgcatactggaagctgtgcagatgcggagcatatgtccttgatctcgatgcacttggacagagagagggacttgaactttgggctacagttgaggaagaaagcaagaatgcccgtaagagtaaccttgctgcattcctcgatctgcaaactctccaggccttagatgattatgtaaattccttcagacatccgtctgagaccttgctgcacttcttgaggttaacaagcctcaaacttgggctgaacttggcgcggatgcaagagcaagatccatgagtcccgggcaggagacaatagtcatatgcctaagcttctgcaggaccagggcattagccatcacctagaaccccctctcactgacagcagggatgcgagcgagggccagatctttgattgacttcccatagtaccccatcatgacaagagaagcataattagtaacgttcaaaccctgaaaccgcatctcctctgtatccctggaacggagacatgccgagccgcaaaagaccaagaacgcacaatcctgaaacaagcatcagacttcctcaacgattaaatgattaaatcccaagttcaatagcacatttataagagataatttcacaaataaggcaatatattaaaaaaaacatgcacataattcgacacttaaacaactgaatagaagcgaaacctagacccggttcctgtcgagcataagaaatcatagacgaaaaccaaatcaaaagaactggcacgccttcaatcacattacaacgccaaagagaaacacacaaattattcaggaagggctgcgggcaagcgagacgataccccgagcccgagtgtcgactcccgaccaaattgtcgacgtgctaccaccacctcgctctccctcagttgagcagattaggtcgcgggcatgaggcaggtgtgctcgaggtggatgcgtcgaccattggagggcaagggcgtcgtggaggaggaatacttcgcgaagaggtgccatggcagagttgaggtcgtgggagggggcaagagtagtgggcgtggaaaggatgaggcggaagggcggcggcgacaatggcctccgtgagttttgtgagggtgtggaaggtgggcgtcgagaatgaggtgacgaaccgacgag

SEQ ID NO: 7114 - DNA, 5480 bp, Zea Mays
tttaaaaaaaccataataaagaatttatttcttaaaaataccataatgaagaaattttagatagagttaactcatgatatacatcatacgaacaccacaggaactagaactctagtagacaaactcatgacatccatacatagattcagacaccacaagtagacccaacatacgcaaagtttgtgaccacattccaccatcctacgacattacgaccatattgacaaacgccataattcttgtaacccaattttatttcacagaacgaccgaggcgaactgccgttcctcaaaccacgcaggtacgacgaccgcagaccgaggtctagccggagatctgaatggacttcacttcaggcttcttggcgtcctccttcggcacagtgactgtaagcacgccgttctccatggcggccgtgatctgctccgtcttggcgttctcgggcagtcggaacctgcgcaggaacctcccgctgctccgctccacgcggtgccaggtgtccgtcttctcctcctgctccttgttgcgctcgccgctgatctgaaggacgttgccgtcctcgacctccaccttgacctcctccttcttcagccccggtacgtcggccttgaacacgtgcgcctctggagtctccttccagtcgatccgcgcgccagcgaaggccgcggtctccgagctggtccgcgggaacgaggggaagagactgctgctgttgccggagccgaaggggaagccctcaaaggggtcccagaggtcgagggagaagggatcgaacacgttgctgcggcggatcagcgacatggtcaggttcggttctagtcttcttgtcaacgagaatctaatcgaagatttggggaagaggtttgagtgaattgattgagcttcggatcgctgcttgctgtctccctcaattcctagaaggggtctttttatagagggaaagcgagagagatgaagtggaggagaaagcagtttctggagagttctcacgtgttcgcggatagacccggatagacccgacgccgctgtattggagcgtggagaatgctagagagagctatccagtggcagtccctcttttagatcgtagtactgggctgggtttctagtaattttgttcatggaccaagacctgggcttatgctggaaaaataattcagctcaacatcaaacgaggcccattcctcagacctctctgtctcgtcttcctagttcggacttcggattaaggcgacccaccgagcacctcgatacggcggagtcgtgggaagccagggaggtgaggacgacgtggcgaagtcgtgaggacaagaaaattccaccgctgtggcagccatgtcagtgcaggagtacctggggaagcacctgctctcgcgcaagagcgaggaggccctgaatacggcggtccgcgccaaggcccctgacccggcgcttttcatcgtcggccacatgaggcgggaggcgcccaccgtgatcacgagggtgcgggcgcgccagatccttgacgggcgtagcgcaccggccgttgaggtcgagttgcacaccaacaaggccgtgcaccgagcatctacggctagcgtgggcgcgctcgagggcgccgccgccgacgcggccggggcctccgagaggcggaagttcctcgccaggggggtcgcctacgcggtgcgggtgatcaacgacaaggtgtcggaggcactcgttgggatggatccgcagcagcaggcgcagatcgaccaggccatcatggacttgacaaggcgcgccacaggctgagcttggagcaaatactatgctggcagtgtcaattgcagcttgcaaagctggtgctgctgaaaaagaggttccactctacaagcatatagcggatcttgttggcaaaagcgctacaactcttcctgtccctgcaaatacagtcattaatggtggaaagcatgctggaaatggtcttcccattcaagaaattatgattcttcttgttggtgctatgaacttcgaagaagcaatgcagatgggttcagagacctatcaccatctcaaggatattatcttggagaaatgtggctcagacagctgcaacattggagatcatggtgggtttgctccaaatatttccaggttgcatgggatgacttgttgatgtctgaccctgaacgcattaagcgggcagttagtgagtacacttgcaatgctcttgttctcaaggcaaatcaagtgggcactgtcactgaggcgatagaggttgtgaagcaggcaaatgatgcacattggggtgtgatggtgtcacataggtctggagatactgaggattctttcattgctgacctggctgttggtgctgcagccggacagatcaaagccagtgtcccatgccgtggagtctaactaaatacaatcagctgcttagaatagatcaatagaggaagaacttggaagtgaaggcgtctatgcaggggagaattgaaaatcttgacccgcctttgttgacttggtgcatactcagttcaaaagagctaaggaacgatcggattcatgtgacgataatctttttaatgacctgatgtctctctataattcaagcagcagtgctagcgttgacgcaaatattcttcgatggttatctgagaagttgcagcttgtcacaatatatgacctcaatcatgaatctttgaccttgcatgagatggctagtggcggtgatcctggtggcattgttgaaaagatgtcaacgctcctaaaagagattaaggattttgtgcaggcagaagaccctgagatgggtggaaaaagttctccaaaaggcaactcagcatgtcctgttattcctgatgatttctattgcccaatatcactggatttaatgaaagacccagttattgttgccactggacttatgagcgaggtaaaagggatgcaacaacagcactgtttaacttgtgtatttaccaaggcaacaaggggaagactgttagagctggatactaccagaactgctcatggagactgaaagtgggatggtagatgaggcccttgcaatattgacaatcctctcaggccatcctgaggggaaggcagcaattggcgctgcttctgcagtgcctgtacttgttggagttgtcagaaatggatctccaaggaacaaggaaaatgctgctgctgttatggtccatctatgaaatggggtgagcagcagcaacaacatcttgccgaagcacaggagcagggcatcgtgtctttgctggaggagctagcagacgaaagtggcacagagagaagaaagaggaaagctgtgcagctgctcgaacgaatgaatcagttcctaaagcaacagagtcaagcccaagccaaggccatggcacaggctcatgcgcaagcacaggcacaagatcatgctcaagcacatgcacaagcacaggcacaagcgcagtctcagctccttggttcaagctcaagcacacgcagatatgcaagctgaggaatcactacttctcatttcatcggatatatgctgctgctaaatgaactgttacttacaaaataattttgtttccaatattgactcatttacatgtactgctagttggattaggtaagccatgttttattttgcatcgactgatactgagcataagaaaatagaatttggaagcacaagcagatattcagacattagagaacctaataaacaaaaaaaagaaacaacagatcggcctatacttagaaacattttaacaggatatgagctacatttttatgttgttggaatgaacaacaaatacgatatgcagaccaaatgtttagcgatatttattgatggatactactggctttattgcacaaatggcttaaattttgagtagtgcatcaatgacagtagtagagaataaattgatataaccttagaaacgtttgatgaagggcttcaagctcacgctcttctgggtgaccttcatacagccacacagcctgagctgcttcgtcgcttccaagaccgcgccattgtagtcattgaccatgcagttcgaaaggttgagctcgatgagctggctgcaactctcacagatggcgaacaggcttgcatcatggtcaatgaggtggcaagggaagcgtcatggtccttaaccaaggcagaaacagccgcgtccgtgaccgtgagattctcgcagctgttcaaatcaatgtcgaccagcccactgtccgagctcttcattagtggaaggaagccattgtcggtgactgcactaaggccactcaaattgatgttctccagctgagggcagaacatgcccaccataggaaggctggtgtcggtgaagcctgagcaatccttgatggccagggaccgaagcgatttgcatactggaagctgtgcagatgcggagcatatgtccttgatctcgatgcacttggacagagagagggacttgaactttgggctacagttgaggaagaaagcaagaatgcccgtaagagtaaccttgctgcattcctcgatctgcaaactctccaggccttagatgattatgtaaattccttcagacatccgtctgagaccttgctgcacttcttgaggttaacaagcctcaaacttgggctgaacttggcgcggatgcaagagcaagatccatgagtcccgggcaggagacaatagtcatatgcctaagcttctgcaggaccagggcattagccatcacctagaaccccctctcactgacagcagggatgcgagcgagggccagatctttgattgacttcccatagtaccccatcatgacaagagaagcataattagtaacgttcaaaccctgaaaccgcatctcctctgtatccctggaacggagacatgccgagccgcaaaagaccaagaacgcacaatcctgaaacaagcatcagacttcctcaacgattaaatgattaaatcccaagttcaatagcacatttataagagataatttcacaaataaggcaatatattaaaaaaaacatgcacataattcgacacttaaacaactgaatagaagcgaaacctagacccggttcctgtcgagcataagaaatcatagacgaaaaccaaatcaaaagaactggcacgccttcaatcacattacaacgccaaagagaaacacacaaattattcaggaagggctgcgggcaagcgagacgataccccgagcccgagtgtcgactcccgaccaaattgtcgacgtgctaccaccacctcgctctccctcagttgagcagattaggtcgcgggcatgaggcaggtgtgctcgaggtggatgcgtcgaccattggagggcaagggcgtcgtggaggaggaatacttcgcgaagaggtgccatggcagagttgaggtcgtgggagggggcaagagtagtgggcgtggaaaggatgaggcggaagggcggcggcgacaatggcctccgtgagttttgtgagggtgtggaaggtgggcgtcgagaatgaggtgacgaaccgacgag

SEQ ID NO: 7115 - DNA, 5338 bp, Zea Mays
tttaaaaaaaccataataaagaatttatttcttaaaaataccataatgaagaaattttagatagagttaactcatgatatacatcatacgaacaccacaggaactagaactctagtagacaaactcatgacatccatacatagattcagacaccacaagtagacccaacatacgcaaagtttgtgaccacattccaccatcctacgacattacgaccatattgacaaacgccataattcttgtaacccaattttatttcacagaacgaccgaggcgaactgccgttcctcaaaccacgcaggtacgacgaccgcagaccgaggtctagccggagatctgaatggacttcacttcaggcttcttggcgtcctccttcggcacagtgactgtaagcacgccgttctccatggcggccgtgatctgctccgtcttggcgttctcgggcagtcggaacctgcgcaggaacctcccgctgctccgctccacgcggtgccaggtgtccgtcttctcctcctgctccttgttgcgctcgccgctgatctgaaggacgttgccgtcctcgacctccaccttgacctcctccttcttcagccccggtacgtcggccttgaacacgtgcgcctctggagtctccttccagtcgatccgcgcgccagcgaaggccgcggtctccgagctggtccgcgggaacgaggggaagagactgctgctgttgccggagccgaaggggaagccctcaaaggggtcccagaggtcgagggagaagggatcgaacacgttgctgcggcggatcagcgacatggtcaggttcggttctagtcttcttgtcaacgagaatctaatcgaagatttggggaagaggtttgagtgaattgattgagcttcggatcgctgcttgctgtctccctcaattcctagaaggggtctttttatagagggaaagcgagagagatgaagtggaggagaaagcagtttctggagagttctcacgtgttcgcggatagacccggatagacccgacgccgctgtattggagcgtggagaatgctagagagagctatccagtggcagtccctcttttagatcgtagtactgggctgggtttctagtaattttgttcatggaccaagacctgggcttatgctggaaaaataattcagctcaacatcaaacgaggcccattcctcagacctctctgtctcgtcttcctagttcggacttcggattaaggcgacccaccgagcacctcgatacggcggagtcgtgggaagccagggaggtgaggacgacgtggcgaagtcgtgaggacaagaaaattccaccgctgtggcagccatgtcagtgcaggagtacctggggaagcacctgctctcgcgcaagagcgaggaggccctgaatacggcggtccgcgccaaggcccctgacccggcgcttttcatcgtcggccacatgaggcgggaggcgcccaccgtgatcacgagggtgcgggcgcgccagatccttgacgggcgtagcgcaccggccgttgaggtcgagttgcacaccaacaaggccgtgcaccgagcatctacggctagcgtgggcgcgctcgagggcgccgccgccgacgcggccggggcctccgagaggcggaagttcctcgccaggggggtcgcctacgcggtgcgggtgatcaacgacaaggtgtcggaggcactcgttgggatggatccgcagcagcaggcgcagatcgaccaggccatcatggacttgacaaggcgcgccacagattttatccaaatggaaatagatatgatattgtgcgaaatgcaggctgagcttggagcaaatactatgctggcagtgtcaattgcagcttgcaaagctggtgctgctgaaaaagaggttccactctacaagcatatagcggatcttgttggcaaaagcgctacaactcttcctgtccctgcaaatacagtcattaatggtggaaagcatgctggaaatggtcttcccattcaagaaattatgattcttcttgttggtgctatgaacttcgaagaagcaatgcagatgggttcagagacctatcaccatctcaaggatattatcttggagaaatgtggctcagacagctgcaacattggagatcatggtgggtttgctccaaatatttccagcatatctgaaggcctggatcttgttattgcggcaatagagagggctgggtataatggaagaataaaattgacaattgatgttgctgctactgatttttgtgtaggttgcatgggatgacttgttgatgtctgaccctgaacgcattaagcgggcagttagtgagtacacttgcaatgctcttgttctcaaggcaaatcaagtgggcactgtcactgaggcgatagaggttgtgaagcaggcaaatgatgcacattggggtgtgatggtgtcacataggtctggagatactgaggattctttcattgctgacctggctgttggtgctgcagccggacagatcaaagccagtgtcccatgccgtggagtctaactaaatacaatcagctgcttagaatagatcaatagaggaagaacttggaagtgaaggcgtctatgcaggggagaattgaaaatcttgacccgcctttgttgacttggtgcatactcagttcaaaagagctaaggaacgatcggattcatgtgacgataatctttttaatgacctgatgtctctctataattcaagcagcagtgctagcgttgacgcaaatattcttcgatggttatctgagaagttgcagcttgtcacaatatatgacctcaatcatgaatctttgaccttgcatgagatggctagtggcggtgatcctggtggcattgttgaaaagatgtcaacgctcctaaaagagattaaggattttgtgcaggcagaagaccctgagatgggtggaaaaagttctccaaaaggcaactcagcatgtcctgttattcctgatgatttctattgcccaatatcactggatttaatgaaagacccagttattgttgccactggacttatgagcgaggtaaaagggatgcaacaacagcactgtttaacttgtgtatttaccaaggcaacaaggggaagactgttagagctggatactaccagaactgctcatggagactgaaagtgggatggtagatgaggcccttgcaatattgacaatcctctcaggccatcctgaggggaaggcagcaattggcgctgcttctgcagtgcctgtacttgttggagttgtcagaaatggatctccaaggaacaaggaaaatgctgctgctgttatggtccatctatgaaatggggtgagcagcagcaacaacatcttgccgaagcacaggagcagggcatcgtgtctttgctggaggagctagcagacgaaagtggcacagagagaagaaagaggaaagctgtgcagctgctcgaacgaatgaatcagttcctaaagcaacagagtcaagcccaagccaaggccatggcacaggctcatgcgcaagcacaggcacaagatcatgctcaagcacatgcacaagcacaggcacaagcgcagtctcagctccttggttcaagctcaagcacacgcagatatgcaagctgaggaatcactacttctcatttcatcggatatatgctgctgctaaatgaactgttacttacaaaataattttgtttccaatattgactcatttacatgtactgctagttggattaggtaagccatgttttattttgcatcgactgatactgagcataagaaaatagaatttggaagcacaagcagatattcagacattagagaacctaataaacaaaaaaaagaaacaacagatcggcctatacttagaaacattttaacaggatatgagctacatttttatgttgttggaatgaacaacaaatacgatatgcagaccaaatgtttagcgatatttattgatggatactactggctttattgcacaaatggcttaaattttgagtagtgcatcaatgacagtagtagagaataaattgatataaccttagaaacgtttgatgaagggcttcaagctcacgctcttctgggtgaccttcatacagccacacagcctgagctgcttcgtcgcttccaagaccgcgccattgtagtcattgaccatgcagttcgaaaggttgagctcgatgagctggctgcaactctcacagatggcgaacaggcttgcatcatggtcaatgaggtggcaagggaagcgtcatggtccttaaccaaggcagaaacagccgcgtccgtgaccgtgagattctcgcagctgttcaaatcaatgtcgaccagcccactgtccgagctcttcattagtggaaggaagccattgtcggtgactgcactaaggccactcaaattgatgttctccagctgagggcagaacatgcccaccataggaaggctggtgtcggtgaagcctgagcaatccttgatggccagggaccgaagcgatttgcatactggaagctgtgcagatgcggagcatatgtccttgatctcgatgcacttggacagagagagggacttgaactttgggctacagttgaggaagaaagcaagaatgcccgtaagagtaaccttgctgcattcctcgatctgcaaactctccaggccttagatgattatgtaaattccttcagacatccgtctgagaccttgctgcacttcttgaggttaacaagcctcaaacttgggctgaacttggcgcggatgcaagagcaagatccatgagtcccgggcaggagacaatagtcatatgcctaagcttctgcaggaccagggcattagccatcacctagaaccccctctcactgacagcagggatgcgagcgagggccagatctttgattgacttcccatagtaccccatcatgacaagagaagcataattagtaacgttcaaaccctgaaaccgcatctcctctgtatccctggaacggagacatgccgagccgcaaaagaccaagaacgcacaatccccgagcccgagtgtcgactcccgaccaaattgtcgacgtgctaccaccacctcgctctccctcagttgagcagattaggtcgcgggcatgaggcaggtgtgctcgaggtggatgcgtcgaccattggagggcaagggcgtcgtggaggaggaatacttcgcgaagaggtgccatggcagagttgaggtcgtgggagggggcaagagtagtgggcgtggaaaggatgaggcggaagggcggcggcgacaatggcctccgtgagttttgtgagggtgtggaaggtgggcgtcgagaatgaggtgacgaaccgacgag

SEQ ID NO: 7116 - DNA, 2790 bp, Zea Mays
tttaaaaaaaccataataaagaatttatttcttaaaaataccataatgaagaaattttagatagagttaactcatgatatacatcatacgaacaccacaggaactagaactctagtagacaaactcatgacatccatacatagattcagacaccacaagtagacccaacatacgcaaagtttgtgaccacattccaccatcctacgacattacgaccatattgacaaacgccataattcttgtaacccaattttatttcacagaacgaccgaggcgaactgccgttcctcaaaccacgcaggtacgacgaccgcagaccgaggtctagccggagatctgaatggacttcacttcaggcttcttggcgtcctccttcggcacagtgactgtaagcacgccgttctccatggcggccgtgatctgctccgtcttggcgttctcgggcagtcggaacctgcgcaggaacctcccgctgctccgctccacgcggtgccaggtgtccgtcttctcctcctgctccttgttgcgctcgccgctgatctgaaggacgttgccgtcctcgacctccaccttgacctcctccttcttcagccccggtacgtcggccttgaacacgtgcgcctctggagtctccttccagtcgatccgcgcgccagcgaaggccgcggtctccgagctggtccgcgggaacgaggggaagagactgctgctgttgccggagccgaaggggaagccctcaaaggggtcccagaggtcgagggagaagggatcgaacacgttgctgcggcggatcagcgacatggtcaggttcggttctagtcttcttgtcaacgagaatctaatcgaagatttggggaagaggtttgagtgaattgattgagcttcggatcgctgcttgctgtctccctcaattcctagaaggggtctttttatagagggaaagcgagagagatgaagtggaggagaaagcagtttctggagagttctcacgtgttcgcggatagacccggatagacccgacgccgctgtattggagcgtggagaatgctagagagagctatccagtggcagtccctcttttagatcgtagtactgggctgggtttctagtaattttgttcatggaccaagacctgggcttatgctggaaaaataattcagctcaacatcaaacgaggcccattcctcagacctctctgtctcgtcttcctagttcggacttcggattaaggcgacccaccgagcacctcgatacggcggagtcgtgggaagccagggaggtgaggacgacgtggcgaagtcgtgaggacaagaaaattccaccgctgtggcagccatgtcagtgcaggagtacctggggaagcacctgctctcgcgcaagagcgaggaggccctgaatacggcggtccgcgccaaggcccctgacccggcgcttttcatcgtcggccacatgaggcgggaggcgcccaccgtgatcacgagggtgcgggcgcgccagatccttgacgggcgtagcgcaccggccgttgaggtcgagttgcacaccaacaaggccgtgcaccgagcatctacggctagcgtgggcgcgctcgagggcgccgccgccgacgcggccggggcctccgagaggcggaagttcctcgccaggggggtcgcctacgcggtgcgggtgatcaacgacaaggtgtcggaggcactcgttgggatggatccgcagcagcaggcgcagatcgaccaggccatcatggacttgacaaggcgcgccacaggctgagcttggagcaaatactatgctggcagtgtcaattgcagcttgcaaagctggtgctgctgaaaaagaggttccactctacaagcatatagcggatcttgttggcaaaagcgctacaactcttcctgtccctgcaaatacagtcattaatggtggaaagcatgctggaaatggtcttcccattcaagaaattatgattcttcttgttggtgctatgaacttcgaagaagcaatgcagatgggttcagagacctatcaccatctcaaggatattatcttggagaaatgtggctcagacagctgcaacattggagatcatggtgggtttgctccaaatatttccagcatatctgaaggcctggatcttgttattgcggcaatagagagggctgggtataatggaagaataaaattgacaattgatgttgctgctactgatttttgtgtaggttgcatgggatgacttgttgatgtctgaccctgaacgcattaagcgggcagttagtgagtacacttgcaatgctcttgttctcaaggcaaatcaagtgggcactgtcactgaggcgatagaggttgtgaagcaggcaaatgatgcacattggggtgtgatggtgtcacataggtctggagatactgaggattctttcattgctgacctggctgttggtgctgcagccggacagatcaaagccagtgtcccatgccgtggagtctaactaaatacaatcagctgcttagaatagatcaatagaggaagaacttggaagtgaaggcgtctatgcaggggagaattgaaaatcttgacccgcctttgtatgtagccacttatcttttctttgttgtcttgtccaattgtgtgtgctcgtcctcaacaaggatatggaaatagggtggtgaaatgcaccatttatagcatgggttataaacatgagtacaaaacatggtttaagaactagaaatgagttacattctagtgaactggtcctttttcgtatctgataatcatatagttgatgctca

SEQ ID NO: 7117 - DNA, 1663 bp, Zea Mays
cgacgcactcgagactcgagagggtgcagccatgcaagtctgatactctgatgatggctacaacgtaaagctggtgaagcaacgccgtcctcacaattcttcccccaatccacattctctcccaggctcccaaaaccacacaaacctcaacccgaaaaaagacaagatcaagccaccaccaccgccagcaagagcagaggcgagaccgcgagagtgtacgtgccaccaggagcagcagcagcaatggccgccgccgccaccacctcctcatcctcccacttgctcctcctctcccgccagcaggcggcctccctacgatgccgcctctccttcctcggccagcccgccagaaggtccggcagggtcacggcccaggcgccggccgctaaggacgtgcggtgcatggcggccgtggacactgcggcgtccgcggcggcggcggagacgagccccaagtcgagcagctacgagatcgtgacgctcacgacgtggctgctgcagcaggagcggaccggcgcgatcgacaacgagatgaccatcgtgctggccagcatatccacggcgtgcaagcagatcgccgcgctggtgcagcgcgcgcccatctccaacctcacgggcgttcagggcgccgtcaacgtgcagggcgaggaccagaagaagctcgatgtcgtctccaacgaggtgttctccaactgcctcaagtcgagcgggcgcaccggcgtgatcgcctcggaggaggaggacgtgcccgtagcggtggagcagagctactccggcaactacatcgtcgtgttcgaccctctcgacggctcctccaacatcgacgccgccgtctccactggctccatcttcggcatctacaaccccaacgacgagtgcctcgccgacgtcgacgacaacgacacccttgattcggtggagcagaggtgcatcgtgaacgtgtgccagccggggagcaacctgctggccgccggctactgcatgtactcgagctcggtgatcttcgtgctcaccgtcggcaccggggtgtacgtgttcacgctggaccccatgtacggcgagttcgtgctgacgcaggagaaggtgcagatccccaaggcgggcaagatctacgccttcaacgagggcaactacgcgctctgggacgacaagctgaagctgtacatggacagcctcaaggagcccggcgactcggggaagccctactccgcgcggtacatcggcagcctcgtcggcgacttccaccgcactctgctctacggagggatctacgggtaccccagggacaagaagagcaagaacggcaagctgcggcttctctacgagtgcgcccccatgagcttcatcgtcgagcaggccggtggcaagggctctgacggccaccagagaattcttgacatcacacctacagagatccaccaaagagtgcctctgtacattgggagcgtggaggaagtggacaaggtggagaaattcctggcttgaatgccagagctctctcatcagatggactcccgaagacatcaagtttagggagggaatatacatgtactctctctttcccaccccaaataagtcttcttcatctcatatttcgataaatcaaacaatctcaattttgatctaatatatatacacacacaacattagtatttatagtatt

SEQ ID NO: 7118 - DNA, 3732 bp, Zea Mays
ctttttaccgccgaggcagtgaggcccctcctccctctcgccgttcccaccacttcaagatccgatccatcgtccgtcccatccaatcgccccctctccctcgtgatcccgacgccgacgacgacaacgaaacagctcagtttcgtgtttttctcccgtaccccgcagccccccacacggccacgccccacctccgaatcacaagggtggcaccgtggcagtacaagtagaaacgtcgagtgaaactgaaaccgggggaggggtcgtgggaagaagcaaggccagcagctagcacgcgggccgcaccacaagcgcgccggcaccggccacctacctggtcgcccaacctattgcctataggctataggagtaggcgggagggggacgatatggagtagcagtagccagtaggcagtgtagcactgcggcttctactaccaccgcacctccaacccccgtccgatacctatccaccacaggtctctatccagtccacttgcccttcttctcatccgtcactgcagcgagctctcgcttcgtttccccctttccctcagatctgttggtgtgatccccagcttggatcttgttgattcggtgatttgagtagccgattttcttcgagcaaactggtttttaggaagtgtggttttctcagtctctgtttgaaccacaacataccaaactgaatcaagtgataattgtgttctgaccatacgccaagttatacctgaaacttctgcttcatatgttcacccatcataaagatgccaacaaaagttcaggttagcagcgaaaggaatgtgaagatcatatcaggtcgagatgggcaaaagaagggaaattcacagcatgaccaaattgtacgcgtgccaaaggacatggtcacaccagtcaatggaaatgtagatggaaaatttgaagataaagttagagttgtgaagaatgataagttccgaagacaacgagagtcttggggtggggaaagggctgcatgcatgaagggctcaaaaccatggcctggtcgaaaggcaactactgttgatgaacttgtcaaacatatgtcaaatgttccttcatatttacagcgtaaagaaacttctgagcatcttcaagacaaggcgctgaatgttggagttcttgagtggggtcttcttgctaactggtctcagcaacaaaagcatgagctcgctagaagccatggagcatctccatccaatactagcaggtctgtactattctcatctccatcacattcttctgcaagccccagcagcagatctcttgagagcaatcaatctaccccaattagtgactatcatcattcatccatccgagcccagcagagtaggctcgcagataaacaccatgggaaggccagatgttcgcctagcccaaattctgcggtactgagcttattgccaggtcatggcacacatccctgtcaagagaatggttgtaattatgttgacttggatctcaacaatgtttctttagcctcagactctctaggttcttcctctcgaagttgcagtagacatgaaatagttgaagatgaagagactagatggaagattgaagatgttgtccatcattgttctcgtaggctttttacagacagtgataacattgggaaacatttcttcacatcaaataacaaagattccatgtgtaatgatcctgaacagagcagtggcttggattgtgaaaattttgagtcactaatatctgatgctgtgatggatacagctagaaatggcagtaggtcacctgattgtttcttggaggatattgagacatcccgtgaatttcctcgaatcccatattcatgtccacttcccatcatagattcagcagctaaagagattggcaccactagtactgaggctggagataattttattggtacagctgcaaaagtaagtaagaattctagcctaaaccaatctgccctgaatgccactgagaatcctccccgatattctgcaaagtttagtgataggatgcctgatcgccatcaaggttctgtgatgaatcgagtgagccgcagctctagcctcaaggagtcaccacatgctcgacaacccaatgtagttcctcctgttgataagacaggagatcggtcatcacccaacagcaaaggtaggcgaagcccattgaggaggatgttagatccaatattaaagccaagacattctagtccaatacgaccttcatttgttccaaaatgtcatcttccagtcaataccaccaagcaatctctggacttagggggatcagtgccacagaatatgcagcgaaggtcagttgatttggtagtcaattcgaattatcgaattgaagcaaatacaaatcagccacctcgtgtgctattgaacagtgcaagatacatccagaaagaaaaggattcaacaacaacaagacaagcatttctgcagctagcatggaagaatggcttgcctttattcatgctgtcttatggcgattctgatatcctggcagccactgttagaaggaagggcatctctgaaaaggatgatctggaaagcacatatgctgtattcactgttgaagaacctaagaaaaaaagtggagcttggatcaaggcagggggcaagaacaagaaacaccaccttttgtctagcatagttggggaaataaaggttgcacgtcgaaaatcaagatgtcaccatacagcagatgttcatgtatacagggaatttgtgttgcttggttccggatttctaccatcatctgaagaatcgggtgattcacatgttagtggagagtttgcggcttttattagtgcacttcctcagcaagaagcagaaacttcgaatcaatcatcttcacagaataccagacaaaaaaatttagcactaactggctgtggttgccccccactgggaaacttccagcctagttctgcttcagccaatgttattgcagtacttcctgatggcttccatggcaaatcaacgtctgggcagccgttgcctttgattgagaggtggaagtcaggaggagcttgtgactgtggcggatgggatgaaggttgcatgctgagtgtcctcactgatgcggccgaagaaaatgatgccgttcaggctaaccaggcaaaggatggcagccagcgatttgaacttctagctcagggtggatcacgagaagataggcatgccttcagtatgacttcattcaaagaggggctttatacagtggaattcagatcatccattgcattacttcaagcttttgcaatgtgtatagtgatgctacatgggaggtaccctgacaggctgcaagttggttcgcaagcagcgcaggagcatgacctccttgctggtcatgaggtcaaggccatggtagccagtcaaggaagagctccgaccagctatgtgccccaccgtccacctctttctcctgtgggccgagcctagcttatcgcgattaaatgtatgttctttgtgtgtctgtgtcctctttctccttcagtcgcgtagtgctggtgggattgatataccatggtcctcaggcccatatgcaatacgcatattgaaagtgacaatctcagaacaatcaatcggctttagaggtagctacctgtacatgttgtgatgttgatgttgtatgactgtactatgatgcggctgcaaggcccatctcggtgattactcacccgttatatgttctcttatcagttcataagaatacacaaaaaagatgaaaaaa

SEQ ID NO: 7119 - DNA, 744 bp, Zea Mays
gcagatacttaggaggcccagaattggtggaaaccggttactaggcatgagaactcggccacagaagctgacgaggagatgtgaagttactgcaatacttgtcctgtatggcctccccaggctactgacaggttccatcctcgcccatgagctgatgcacgggtggctgcgcctcaaaggttaccgaaacctaaacgcggaggtggaagaaggcatatgccaggtcatgtcttacttgtggctggaatcagagattcttccgtcatcctcgaggcacgcgcagccttcatcatcgtcctcctcctcatcctatccagcaacatcatccgagaaaggtggaatatctcataccgggaagaagctgggcgagttcttcatgcaccagattgccaatgacacgtcgacggcctatggtgacgggttcagaactgcgtacgctgccgtcaacaagtatggccttcgccaaacactgagccatatacgcctaacaggaggcttccctgtataataagagtgacaaaaaagacacaaaatgtccatgcatgatcatatcgatatcaaaaggttatatacatattgggatgaagttcgctatggaagcatagtgattcagtttcggtgaccttgagttttcaaagaggtcatgtgtaagaacactgatttaggggtggaggtatgccgcttccggcatatgatttcctctcacgaagcactggaatcaaagtaattgtgtggaacttacaa

SEQ ID NO: 7120 - DNA, 1736 bp, Zea Mays
ctcatacctgccgtctcactgacaggaaacgagaggagatccggtctcatgaagtggctctgcagattcctcaaggggccgaagcccggcgaaccgagccgccggcggccccaggtggcggccggagaaggggagggcgcgctttggcaccaacgaccagctagaccaaagatcgatccacctaggaacgagaatgaggaactagtggaccgtgccattgccgagcctcttgcagaggctgtcaaaccgcccagagagaaaacccataggggagaagacagcaacgacgacgaagatctcacaagagccgtacaggacagtctgaatatgaacccttacacgccttacaacccctatccaccctctcaagcccaacctatagggcacagggtatgcggaggctgcaagcatgagatagggcgtggccattacttgagctgcatgggcatttactggcaccctcagtgcttccgctgcaggtcctgcggtcaccttatccgtgagaccgagttcaccttgctgggtacggattcgtaccacaagctgtgctacaaggagctgcatcatccaaagtgcgacgtctgccttcagtttatcccaacgaacgggagtggcttgatagagtacagagcccacccgttctggggccagaagtattgcccttcgcatgagcgcgacaggacgccacgttgctgcagctgtgagaaaatggaggtacagccaaggaacacgaagtacatgtcgctgggagacggacgcggcctgtgcatggaatgcctgggatctgcagtgatggacacgagcgagtgccagcctctgtaccattctatcagagactactacgaggggatggacatgagactggaccagcagatacccgtgctcttggttgagcggcaagcgctcaacgaagccatggaaggggagagtaaaggcccacaccacatgcctgagactaggggcctatgtctgtccgaggagcggactgtgagcagtatacttaggaggcccagaattggtggaaaccggttactaggcatgagaactcggccacagaagctgacgaggagatgtgaagttactgcaatacttgtcctgtatggcctccccaggctactgacaggttccatcctcgcccatgagctgatgcacgggtggctgcgcctcaaaggttaccgaaacctaaacgcggaggtggaagaaggcatatgccaggtcatgtcttacttgtggctggaatcagagattcttccgtcatcctcgaggcacgcgcagccttcatcatcgtcctcctcctcatcctatccagcaacatcatccgagaaaggtggaatatctcataccgggaagaagctgggcgagttcttcatgcaccagattgccaatgacacgtcgacggcctatggtgacgggttcagaactgcgtacgctgccgtcaacaagtatggccttcgccaaacactgagccatatacgcctaacaggaggcttccctgtataataagagtgacaaaaaagacacaaaatgtccatgcatgatcatatcgatatcaaaaggttatatacatattgggatgaagttcgctatggaagcatagtgattcagtttcggtgaccttgagttttcaaagaggtcatgtgtaagaacactgatttaggggtggaggtatgccgcttccggcatatgatttcctctcacgaagcactggaatcaaagtaattgtgtggaacttacaa

SEQ ID NO: 7121 - DNA, 1005 bp, Zea Mays
gataagtcgagtcgacaagcaagatagggaaaaacttgaacagcagttgcatgacatggctttgatgattgagaggctagaggggagtcgtcaaaaactgctaatggaggtgcttaatgccgctttactttttgaattgtactagtctcaaatgttgattattttttaccgcggtagacagattgattctcaatcgtcagaaatagagaaactgtttgaggagaactcagccttatctgcttcttatcaagaagccattgatgttactgtacaatgggaaaaccaggttagagactgtctgaagcaaaatgaagagctccgttctcacttggagaaactaagacttgaacaagttagcctgttgaaagtaagcaatatcgctacccaatcagatgggcaaactgaaaacagtatctcaaacccaccacaaatggtcatcgagaatatttctctaaagcttataaaagaacagagcagatctgaggggttgtcggcagagataatgaaactttcagctgagcttaggaaagcagtccatgcacagaataaccttgcacgcttatacagacctgtattaagagacattgagagcaatctgatgaaaatgaaacaagaaacttatgcgacgatccagtgatacatgttgacatgttgtgaaactcagtcctctggcatggccgcatgggctccacgttactgattttcgtcgtggatgtatttatctcatgccatcttcaagatgctggtgcaaagcagttcttttcgtggccaccatttataagtagagttcagtcgagatcgttgtacttgtatcatactcatgtatacccgattcccagactggttcatctcgtaaattggaagcgatgtttggatgcctatgtatcaagtggatcataaacatccaaacaacgccttaaaatagatcgtttcgacattattattttcctgcttgcaatccaggctctaacaacttctcggtcttgtttaatcctttcatttggc

SEQ ID NO: 7122 - DNA, 968 bp, Zea Mays
ctaggcgtccagaggttttcaagtcgataagtcgagtcgacaagcaagatagggaaaaacttgaacagcagttgcatgacatggctttgatgattgagaggctagaggggagtcgtcaaaaactgctaatggagacagattgattctcaatcgtcagaaatagagaaactgtttgaggagaactcagccttatctgcttcttatcaagaagccattgatgttactgtacaatgggaaaaccaggttagagactgtctgaagcaaaatgaagagctccgttctcacttggagaaactaagacttgaacaagttagcctgttgaaagtaagcaatatcgctacccaatcagatgggcaaactgaaaacagtatctcaaacccaccacaaatggtcatcgagaatatttctctaaaggatcagcttataaaagaacagagcagatctgaggggttgtcggcagagataatgaaactttcagctgagcttaggaaagcagtccatgcacagaataaccttgcacgcttatacagacctgtattaagagacattgagagcaatctgatgaaaatgaaacaagaaacttatgcgacgatccagtgatacatgttgacatgttgtgaaactcagtcctctggcatggccgcatgggctccacgttactgattttcgtcgtggatgtatttatctcatgccatcttcaagatgctggtgcaaagcagttcttttcgtggccaccatttataagtagagttcagtcgagatcgttgtacttgtatcatactcatgtatacccgattcccagactggttcatctcgtaaattggaagcgatgtttggatgcctatgtatcaagtggatcataaacatccaaacaacgccttaaaatagatcgtttcgacattattattttcctgcttgcaatccaggctctaacaacttctcggtcttgtttaatcctttcatttggc

SEQ ID NO: 7123 - DNA, 1963 bp, Zea Mays
gctcttaccggcgtggttcgacttctacaacaaacatggcatctgtctcaccctgccctctttcatcatttcccgaagcttcgcatccgtccttcggtccttcctcacccgttcgtctgtctcgcctcacccacccacccacagcatcagaacggagggaattagggagcttcggccggatccgcaacatcggggaacggcgggaaccagggagctcccgccgcctagaaccggagctcccaatcgatccactggccgttgagccgacacttcaatggaagcccacgcctcgcggggccgccgcaccctggaggagattcggcagaagagagccgcggagaggatgcaacacgccgtcccgatcgcggcgtctcacgtcgactctcacgggaaccaaagagctggagctgagcatcttgctcgagttcaagaacttgaaaatggcaacacggaattggagagggaaaacaaaatgctcttgtccaagatcgctgagaaggaagttgagaaggacgcccttgtaaaccgtttgaatgatctcgagcggaatgtagtgccctctttgaaaaaaagcttgaatgacatttatttggagaaagatgctgctgtagttgctaaggaggatgctctagctcaactcaggagcatgaagaaacgactcaaggaagcagaggaagaacagtatagggcagaagaagactcggcctccttgagagcacagctaaataccctgcagcagcaaatgggccacacttacagtggatatacaatgggaacatcaagtgaggaatctgttgccatggaaaaggagatacaagatttacaggcacagctaaagcaagagtcactgctaaggcaacaggagcaacaacaattagctgaacaatcccagctgaggcaacaagagcaagaaaaactagccaaagagcaaacccgtattgcttctctggaggctgaaaagcaacagttggaagaccaaattactatgttgacaaagaaagctacagaggacgcttctgagtttgctgcacgcaaggcattttcaatgcaagatagggaaaaacttgaacagcagttgcatgacatggctttgatgattgagaggctagaggggagtcgtcaaaaactgctaatggagattgattctcaatcgtcagaaatagagaaactgtttgaggagaactcagccttatctgcttcttatcaagaagccattgatgttactgtacaatgggaaaaccagagactgtctgaagcaaaatgaagagctccgttctcacttggagaaactaagacttgaacaagttagcctgttgaaagtaagcaatatcgctacccaatcagatgggcaaactgaaaacagtatctcaaacccaccacaaatggtcatcgagaatatttctctaaaggatcagcttataaaagaacagagcagatctgaggggttgtcggcagagataatgaaactttcagctgagcttaggaaagcagtccatgcacagaataaccttgcacgcttatacagacctgtattaagagacattgagagcaatctgatgaaaatgaaacaagaaacttatgcgacgatccagtgatacatgttgacatgttgtgaaactcagtcctctggcatggccgcatgggctccacgttactgattttcgtcgtggatgtatttatctcatgccatcttcaagatgctggtgcaaagcagttcttttcgtggccaccatttataagtagagttcagtcgagatcgttgtacttgtatcatactcatgtatacccgattcccagactggttcatctcgtaaattggaagcgatgtttggatgcctatgtatcaagtggatcataaacatccaaacaacgccttaaaatagatcgtttcgacattattattttcctgcttgcaatccaggctctaacaacttctcggtcttgtttaatcctttcatttggc

SEQ ID NO: 7124 - DNA, 1964 bp, Zea Mays
gctcttaccggcgtggttcgacttctacaacaaacatggcatctgtctcaccctgccctctttcatcatttcccgaagcttcgcatccgtccttcggtccttcctcacccgttcgtctgtctcgcctcacccacccacccacagcatcagaacggagggaattagggagcttcggccggatccgcaacatcggggaacggcgggaaccagggagctcccgccgcctagaaccggagctcccaatcgatccactggccgttgagccgacacttcaatggaagcccacgcctcgcggggccgccgcaccctggaggagattcggcagaagagagccgcggagaggatgcaacacgccgtcccgatcgcggcgtctcacgtcgactctcacgggaaccaaagagctggagctgagcatcttgctcgagttcaagaacttgaaaatggcaacacggaattggagagggaaaacaaaatgctcttgtccaagatcgctgagaaggaagttgagaaggacgcccttgtaaaccgtttgaatgatctcgagcggaatgtagtgccctctttgaaaaaaagcttgaatgacatttatttggagaaagatgctgctgtagttgctaaggaggatgctctagctcaactcaggagcatgaagaaacgactcaaggaagcagaggaagaacagtataggaagaagactcggcctccttgagagcacagctaaataccctgcagcagcaaatgggccacacttacagtggatatacaatgggaacatcaagtgaggaatctgttgccatggaaaaggagatacaagatttacaggcacagctaaagcaagagtcactgctaaggcaacaggagcaacaacaattagctgaacaatcccagctgaggcaacaagagcaagaaaaactagccaaagagcaaacccgtattgcttctctggaggctgaaaagcaacagttggaagaccaaattactatgttgacaaagaaagctacagaggacgcttctgagtttgctgcacgcaaggcattttcaatgcaagatagggaaaaacttgaacagcagttgcatgacatggctttgatgattgagaggctagaggggagtcgtcaaaaactgctaatggagattgattctcaatcgtcagaaatagagaaactgtttgaggagaactcagccttatctgcttcttatcaagaagccattgatgttactgtacaatgggaaaaccaggttagagactgtctgaagcaaaatgaagagctccgttctcacttggagaaactaagacttgaacaagttagcctgttgaaagtaagcaatatcgctacccaatcagatgggcaaactgaaaacagtatctcaaacccaccacaaatggtcatcgagaatatttctctaaaggatcagcttataaaagaacagagcagatctgaggggttgtcggcagagataatgaaactttcagctgagcttaggaaagcagtccatgcacagaataaccttgcacgcttatacagacctgtattaagagacattgagagcaatctgatgaaaatgaaacaagaaacttatgcgacgatccagtgatacatgttgacatgttgtgaaactcagtcctctggcatggccgcatgggctccacgttactgattttcgtcgtggatgtatttatctcatgccatcttcaagatgctggtgcaaagcagttcttttcgtggccaccatttataagtagagttcagtcgagatcgttgtacttgtatcatactcatgtatacccgattcccagactggttcatctcgtaaattggaagcgatgtttggatgcctatgtatcaagtggatcataaacatccaaacaacgccttaaaatagatcgtttcgacattattattttcctgcttgcaatccaggctctaacaacttctcggtcttgtttaatcctttcatttggc

SEQ ID NO: 7125 - DNA, 1962 bp, Zea Mays
gctcttaccggcgtggttcgacttctacaacaaacatggcatctgtctcaccctgccctctttcatcatttcccgaagcttcgcatccgtccttcggtccttcctcacccgttcgtctgtctcgcctcacccacccacccacagcatcagaacggagggaattagggagcttcggccggatccgcaacatcggggaacggcgggaaccagggagctcccgccgcctagaaccggagctcccaatcgatccactggccgttgagccgacacttcaatggaagcccacgcctcgcggggccgccgcaccctggaggagattcggcagaagagagccgcggagaggatgcaacacgccgtcccgatcgcggcgtctcacgtcgactctcacgggaaccaaagagctggagctgagcatcttgctcgagttcaagaacttgaaaatggcaacacggaattggagagggaaaacaaaatgctcttgtccaagatcgctgagaaggaagttgagaaggacgcccttgtaaaccgtttgaatgatctcgagcggaatgtagtgccctctttgaaaaaaagcttgaatgacatttatttggagaaagatgctgctgtagttgctaaggaggatgctctagctcaactcaggagcatgaagaaacgactcaaggaagcagaggaagaacagtatagggcagaagaagactcggcctccttgagagcacagctaaataccctgcagcagcaaatgggccacacttacagtggatatacaatgggaacatcaagtgaggaatctgttgccatggaaaaggagatacaagatttacaggcacagctaaagcaagagtcactgctaaggcaacaggagcaacaacaattagctgaacaatcccagctgaggcaacaagagcaagaaaaactagccaaagagcaaacccgtattgcttctctggaggctgaaaagcaacagttggaagaccaaattactatgttgacaaagaaagctacagaggacgcttctgagtttgctgcacgcaaggcattttcaatgcaagatagggaaaaacttgaacagcagttgcatgacatggctttgatgattgagaggctagaggggagtcgtcaaaaactgctaatggagattgattctcaatcgtcagaaatagagaaactgtttgaggagaactcagccttatctgcttcttatcaagaagccattgatgttactgtacaatgggaaaaccaggttagagactgtctgaagcaaaatgaagagctccgttctcacttggagaaactaagacttgaacaagttagcctgttgaaagtaagcaatatcgctacccaatcagatgggcaaactgaaaacagtatctcaaacccaccacaaatggtcatcgagaatatttctctaaagcttataaaagaacagagcagatctgaggggttgtcggcagagataatgaaactttcagctgagcttaggaaagcagtccatgcacagaataaccttgcacgcttatacagacctgtattaagagacattgagagcaatctgatgaaaatgaaacaagaaacttatgcgacgatccagtgatacatgttgacatgttgtgaaactcagtcctctggcatggccgcatgggctccacgttactgattttcgtcgtggatgtatttatctcatgccatcttcaagatgctggtgcaaagcagttcttttcgtggccaccatttataagtagagttcagtcgagatcgttgtacttgtatcatactcatgtatacccgattcccagactggttcatctcgtaaattggaagcgatgtttggatgcctatgtatcaagtggatcataaacatccaaacaacgccttaaaatagatcgtttcgacattattattttcctgcttgcaatccaggctctaacaacttctcggtcttgtttaatcctttcatttggc

SEQ ID NO: 7126 - DNA, 1863 bp, Zea Mays
gctcttaccggcgtggttcgacttctacaacaaacatggcatctgtctcaccctgccctctttcatcatttcccgaagcttcgcatccgtccttcggtccttcctcacccgttcgtctgtctcgcctcacccacccacccacagcatcagaacggagggaattagggagcttcggccggatccgcaacatcggggaacggcgggaaccagggagctcccgccgcctagaaccggagctcccaatcgatccactggccgttgagccgacacttcaatggaagcccacgcctcgcggggccgccgcaccctggaggagattcggcagaagagagccgcggagaggatgcaacacgccgtcccgatcgcggcgtctcacgtcgactctcacgggaaccaaagagctggagctgagcatcttgctcgagttcaagaacttgaaaatggcaacacggaattggagagggaaaacaaaatgctcttgtccaagatcgctgagaaggaagttgagaaggacgcccttgtaaaccgtttgaatgatctcgagcggaatgtagtgccctctttgaaaaaaagcttgaatgacatttatttggagaaagatgctgctgtagttgctaaggaggatgctctagctcaactcaggagcatgaagaaacgactcaaggaagcagaggaagaacagtatagggcagaagaagactcggcctccttgagagcacagctaaataccctgcagcagcaaatgggccacacttacagtggatatacaatgggaacatcaagtgaggaatctgttgccatggaaaaggagatacaagatttacaggcacagctaaagcaagagtcactgctaaggcaacaggagcaacaacaattagctgaacaatcccagctgaggcaacaagagcaagaaaaactagccaaagagcaaacccgtattgcttctctggaggctgaaaagcaacagttggaagaccaaattactatgttgacaaagaaagctacagaggacgcttctgagtttgctgcacgcaaggcattttcaatgcaagatagggaaaaacttgaacagcagttgcatgacatggctttgatgattgagaggctagaggggagtcgtcaaaaactgctaatggaggttagagactgtctgaagcaaaatgaagagctccgttctcacttggagaaactaagacttgaacaagttagcctgttgaaagtaagcaatatcgctacccaatcagatgggcaaactgaaaacagtatctcaaacccaccacaaatggtcatcgagaatatttctctaaaggatcagcttataaaagaacagagcagatctgaggggttgtcggcagagataatgaaactttcagctgagcttaggaaagcagtccatgcacagaataaccttgcacgcttatacagacctgtattaagagacattgagagcaatctgatgaaaatgaaacaagaaacttatgcgacgatccagtgatacatgttgacatgttgtgaaactcagtcctctggcatggccgcatgggctccacgttactgattttcgtcgtggatgtatttatctcatgccatcttcaagatgctggtgcaaagcagttcttttcgtggccaccatttataagtagagttcagtcgagatcgttgtacttgtatcatactcatgtatacccgattcccagactggttcatctcgtaaattggaagcgatgtttggatgcctatgtatcaagtggatcataaacatccaaacaacgccttaaaatagatcgtttcgacattattattttcctgcttgcaatccaggctctaacaacttctcggtcttgtttaatcctttcatttggc

SEQ ID NO: 7127 - DNA, 1964 bp, Zea Mays
gctcttaccggcgtggttcgacttctacaacaaacatggcatctgtctcaccctgccctctttcatcatttcccgaagcttcgcatccgtccttcggtccttcctcacccgttcgtctgtctcgcctcacccacccacccacagcatcagaacggagggaattagggagcttcggccggatccgcaacatcggggaacggcgggaaccagggagctcccgccgcctagaaccggagctcccaatcgatccactggccgttgagccgacacttcaatggaagcccacgcctcgcggggccgccgcaccctggaggagattcggcagaagagagccgcggagaggatgcaacacgccgtcccgatcgcggcgtctcacgtcgactctcacgggaaccaaagagctggagctgagcatcttgctcgagttcaagaacttgaaaatggcaacacggaattggagagggaaaacaaaatgctcttgtccaagatcgctgagaaggaagttgagaaggacgcccttgtaaaccgtttgaatgatctcgagcggaatgtagtgccctctttgaaaaaaagcttgaatgacatttatttggagaaagatgctgctgtagttgctaaggaggatgctctagctcaactcaggagcatgaagaaacgactcaaggaagcagaggaagaacagtatagggcagaagaagactcggcctccttgagagcacagctaaataccctgcagcagcaaatgggccacacttacagtggatatacaatgggaacatcaagtgaggaatctgttgccatggaaaaggagatacaagatttacaggcacagctaaagcaagagtcactgctaaggcaacaggagcaacaacaattagctgaacaatcccagctgaggcaacaagagcaagaaaaactagccaaagagcaaacccgtattgcttctctggaggctgaaaagcaacagttggaagaccaaattactatgttgacaaagaaagctacagaggacgcttctgagtttgctgcacgcaaggcattttcaatgatagggaaaaacttgaacagcagttgcatgacatggctttgatgattgagaggctagaggggagtcgtcaaaaactgctaatggagattgattctcaatcgtcagaaatagagaaactgtttgaggagaactcagccttatctgcttcttatcaagaagccattgatgttactgtacaatgggaaaaccaggttagagactgtctgaagcaaaatgaagagctccgttctcacttggagaaactaagacttgaacaagttagcctgttgaaagtaagcaatatcgctacccaatcagatgggcaaactgaaaacagtatctcaaacccaccacaaatggtcatcgagaatatttctctaaaggatcagcttataaaagaacagagcagatctgaggggttgtcggcagagataatgaaactttcagctgagcttaggaaagcagtccatgcacagaataaccttgcacgcttatacagacctgtattaagagacattgagagcaatctgatgaaaatgaaacaagaaacttatgcgacgatccagtgatacatgttgacatgttgtgaaactcagtcctctggcatggccgcatgggctccacgttactgattttcgtcgtggatgtatttatctcatgccatcttcaagatgctggtgcaaagcagttcttttcgtggccaccatttataagtagagttcagtcgagatcgttgtacttgtatcatactcatgtatacccgattcccagactggttcatctcgtaaattggaagcgatgtttggatgcctatgtatcaagtggatcataaacatccaaacaacgccttaaaatagatcgtttcgacattattattttcctgcttgcaatccaggctctaacaacttctcggtcttgtttaatcctttcatttggc

SEQ ID NO: 7128 - DNA, 1976 bp, Zea Mays
gctcttaccggcgtggttcgacttctacaacaaacatggcatctgtctcaccctgccctctttcatcatttcccgaagcttcgcatccgtccttcggtccttcctcacccgttcgtctgtctcgcctcacccacccacccacagcatcagaacggagggaattagggagcttcggccggatccgcaacatcggggaacggcgggaaccagggagctcccgccgcctagaaccggagctcccaatcgatccactggccgttgagccgacacttcaatggaagcccacgcctcgcggggccgccgcaccctggaggagattcggcagaagagagccgcggagaggatgcaacacgccgtcccgatcgcggcgtctcacgtcgactctcacgggaaccaaagagctggagctgagcatcttgctcgagttcaagaacttgaaaatggcaacacggaattggagagggaaaacaaaatgctcttgtccaagatcgctgagaaggaagttgagaaggacgcccttgtaaaccgtttgaatgatctcgagcggaatgtagtgccctctttgaaaaaaagcttgaatgacatttatttggagaaagatgctgctgtagttgctaaggaggatgctctagctcaactcaggagcatgaagaaacgactcaaggaagcagaggaagaacagtatagggcagaagaagactcggcctccttgagagcacagctaaataccctgcagcagcaaatgggccacacttacagtggatatacaatgggaacatcaagtgaggaatctgttgccatggaaaaggagatacaagatttacaggcacagctaaagcaagagtcactgctaaggcaacaggagcaacaacaattagctgaacaatcccagctgaggcaacaagagcaagaaaaactagccaaagagcaaacccgtattgcttctctggaggctgaaaagcaacagttggaagaccaaattactatgttgacaaagaaagctacagaggacgcttctgagtttgctgcacgcaaggcattttcaatgcaagatagggaaaaacttgaacagcagttgcatgacatggctttgatgattgagaggctagaggggagtcgtcaaaaactgctaatggagacagattgattctcaatcgtcagaaatagagaaactgtttgaggagaactcagccttatctgcttcttatcaagaagccattgatgttactgtacaatgggaaaaccagaaaatttcaggttagagactgtctgaagcaaaatgaagagctccgttctcacttggagaaactaagacttgaacaagttagcctgttgaaagtaagcaatatcgctacccaatcagatgggcaaactgaaaacagtatctcaaacccaccacaaatggtcatcgagaatatttctctaaagcttataaaagaacagagcagatctgaggggttgtcggcagagataatgaaactttcagctgagcttaggaaagcagtccatgcacagaataaccttgcacgcttatacagacctgtattaagagacattgagagcaatctgatgaaaatgaaacaagaaacttatgcgacgatccagtgatacatgttgacatgttgtgaaactcagtcctctggcatggccgcatgggctccacgttactgattttcgtcgtggatgtatttatctcatgccatcttcaagatgctggtgcaaagcagttcttttcgtggccaccatttataagtagagttcagtcgagatcgttgtacttgtatcatactcatgtatacccgattcccagactggttcatctcgtaaattggaagcgatgtttggatgcctatgtatcaagtggatcataaacatccaaacaacgccttaaaatagatcgtttcgacattattattttcctgcttgcaatccaggctctaacaacttctcggtcttgtttaatcctttcatttggc

SEQ ID NO: 7129 - DNA, 1036 bp, Zea Mays
gctcttaccggcgtggttcgacttctacaacaaacatggcatctgtctcaccctgccctctttcatcatttcccgaagcttcgcatccgtccttcggtccttcctcacccgttcgtctgtctcgcctcacccacccacccacagcatcagaacggagggaattagggagcttcggccggatccgcaacatcggggaacggcgggaaccagggagctcccgccgcctagaaccggagctcccaatcgatccactggccgttgagccgacacttcaatggaagcccacgcctcgcggggccgccgcaccctggaggagattcggcagaagagagccgcggagaggatgcaacacgccgtcccgatcgcggcgtctcacgtcgactctcacgggaaccaaagagctggagctgagcatcttgctcgagttcaagaacttgaaaatggcaacacggaattggagagggaaaacaaaatgctcttgtccaagatcgctgagaaggaagttgagaaggacgcccttgtaaaccgtttgaatgatctcgagcggaatgtagtgccctctttgaaaaaaagcttgaatgacatttatttggagaaagatgctgctgtagttgctaaggaggatgctctagctcaactcaggagcatgaagaaacgactcaaggaagcagaggaagaacagtatagggcagaagaagactcggcctccttgagagcacagctaaataccctgcagcagcaaatgggccacacttacagtggatatacaatgggaacatcaagtgaggaatctgttgccatggaaaaggagatacaagatttacaggcacagctaaagcaagagtcactgctaaggcaacaggagcaacaacaattagctgaacaatcccagctgaggcaacaagagcaagaaaaactagccaaagagcaaacccgtattgcttctctggaggctgaaaagcaacagttggaagaccaaattactatgttgacaaagaaagctacagaaatgctaagtggcaatctatcactcaag

SEQ ID NO: 7130 - DNA, 2116 bp, Zea Mays
gatcttttagggcgattgcaagtagcgatctttctgaagtctctggcatttgtaaacgtagctaaacaaagatttttgcaaccctttgccctagccgaaacactttgtggttcaccactttacatggctccagaagtcatgcaaggtcagaagtatgatgcaaaggcagatctgtggagtgttggtgtcattctatatcaacttgttactggaataccaccttttaatggggacaatcagatacagttgcttaaaaatatactcaggacgcatgaaatacgattaccatctgattgtgaattgagccatgactgcatcgacttgtgcagaaagttgctgcggctcaattcagtggagcggcttacagttgaagaatttgtgcaccacccatttctttctgaacatgctccagagaggaccttgagccggacattatctgaaataagagatggctttccaataaataatatcagtccaacaaggccttcaagccaaagttcacaagaagattgtatgccttttcctttggatgatgagtcaagtggacaggatgagggtccaattcctgacagtaagagtccgatgaaatcttatgggtttcccacaggtaaaagattggataaaacttcaggccagagtccatcaaaacataccagtctgttctccaggtatgtcttgggaaataatcatgcacctagtagccaacaccatggccatactgataaaatgaccaaggaaagcaagattcatgaagtgcaaggtccaaaaggtgtttatccagaagattcccctatcattgattcattagagtttgtagatcaggaatatgtatttgtgtctggaccacacccagagggatcatcgtcttcaacaaatgcttctcagcagcttaacttaccggcaaaatatgataatttatctgtttcaccaccgaagttaactttcttgagtgcaccaatgccgataaacggtttgccgattaatagacaacaatctgctgggactggtagcttcgacagccactattctcctgcatctgtcatttcacagggatctgcggatataagtgatgccatggatcagcccccatctgattatctgacgaggattagattgttagagcaatatgcatcagccatagcagggttggtcagggatgagatcaaaggtggcaggcacttggtggcgttctctattcagctaattgttcttgcaacctggaagcaagcaattcatttatgcaatacctttgtagcttcacttgcaagggagagtccctcacaggatatccatatgaaggggcttagtgctgatgcttcgcatttgcttgcgaactcaaagctagctgatgatgtctgcgtgcagatagagaaacagtttctctccgaagttgaatatgcggaagaactagccagcactgtgggacagatagctgatggtacagagatgccagatgcaatcgaaatgatatttcagtctgctttacttacaggaaggcgaggcggtgttgatgagatgtttgggaaagcagcggatgccatgactgggtatacgagggcggtatccatgctgcggtttctcctgatcgaggcaccatcacttgccctcaaccctcctttgactctgacaagatccgatcggcatcgacttcgcacatacattgaagctctcaacaccaggctctgtcagatgcagagccagaggcattgactgctgccatgtgtcctcaaatcttgttcaggttgagggacggtagacttgtgcaatattttttcatttgtaaatatatttgttggcccaagataggacatgtaagatgtcagaaatttggaactaggcagagcagcgaaaatctattataactcgaccagactactattatgatatggaattaggtggagtgtacgtgttaggttcattctgtgtgaattcaggcagaagcttgaaaacgaaatgaccaatcatggtcacttgtggaaatgtaaactacttcgtagattctttattagtactctatttcgttcttttttatttgttgtggtttagttaaaaaaatgaattagctttcgacaaatattcgagaaaggatagtatatgttatggtgtgttccaacta

SEQ ID NO: 7131 - DNA, 3377 bp, Zea Mays
ctctcgcttttctgttccgcgcagcaacgacgcggttgcttctccccacggcggcatctcctgcgcggcggcgccgcccccgcgagagccgcgacggcgcactaggcgagttactggacacgggagcgatgggggacggcgccagcggccgcggcggtcgaagcggcgccgggcgccgggtgggggagtacgagctgctgcgaccgattgggtcgggagcctactcgcaggtgtggctgggacggcaccgggtgcggggcacggaggtggcggtgaaggagatcgccatggaacgtctcagcaaaaagctccgcgagagcctcctctccgaggtcgacatccttcgtcgcatccgacacgataacgtcatcgcactccacgactccgtcaaggatcatgggagtatatatctcatactggagtattgtcgaggtggtgacttacatgcataccttcaacgtcataaaagagtttctgaaaaggttgctaagcacttcatccgtcagttagcatctggtctgaaaatgcttcgcgataataacgtggttcaccgagacctaaaacctcagaacattcttcttgttgaaaataatgaaaatactctgttgaagattgccgactttggatttgcaaaatttttgcaaccctttgccctagccgaaacactttgtggttcaccactttacatggctccagaagtcatgcaaggtcagaagtatgatgcaaaggcagatctgtggagtgttggtgtcattctatatcaacttgttactggaataccaccttttaatggggacaatcagatacagttgcttaaaaatatactcaggacgcatgaaatacgattaccatctgattgtgaattgagccatgactgcatcgacttgtgcagaaagttgctgcggctcaattcagtggagcggcttacagttgaagaatttgtgcaccacccatttctttctgaacatgctccagagaggaccttgagccggacattatctgaaataagagatggctttccaataaataatatcagtccaacaaggccttcaagccaaagttcacaagaagattgtatgccttttcctttggatgatgagtcaagtggacaggatgagggtccaattcctgacagtaagagtccgatgaaatcttatgggtttcccacaggtaaaagattggataaaacttcaggccagagtccatcaaaacataccagtctgttctccaggtatgtcttgggaaataatcatgcacctagtagccaacaccatggccatactgataaaatgaccaaggaaagcaagattcatgaagtgcaaggtccaaaaggtgtttatccagaaggtatggaagtcattagtagtgcaattcctcatttttattatgaacaatccttactgaaattattatttcattactttgtaaatgtagattcccctatcattgattcattagagtttgtagatcaggaatatgtatttgtgtctggaccacacccagagggatcatcgtcttcaacaaatgcttctcagcagcttaacttaccggcaaaatatgataatttatctgtttcaccaccgaagttaactttcttgagtgcaccaatgccgataaacggtttgccgattaatagacaacaatctgctgggactggtagcttcgacagccactattctcctgcatctgtcatttcacagggatctgcggatataagtgatgccatggatcagcccccatctgattatctgacgaggattagattgttagagcaatatgcatcagccatagcagggttggtcagggatgaggtaattttttatctgcttggtggtacccagattctttgctttccctatgttatattttcactgagtcactaggtcgcgtgttcgaagcagcctctccgcatctgcgggggaaggcttgcctcggtttttcctttatctagaccctctttagacctcgctcgtgtgggagcctccgacactgccctatgctttattttactttgactcaacctttggagatggttataacccattgaaatactttcatccataccacgacttaatatgcactttccatctatcccaagctttgtgtaatactctctctgtttcaaattgttttcaaattgtaagtcgttctagcttttctagacacatagcttttactatgtatcacataatgtcacctagaaatgctagaacgacttataatttggcatggaaggattagcaaacaatgcttttgagttacgttgaactgtctttaagcttgaatcccagtaactcaagacacaactttcctataataagaaaagcttcaggcagcatttagccattagaagtgtttgtcaatagcaacaagctgccactgacttgcttttttgttttgctgatcaaccacctgattgaagatcaaaggtggcaggcacttggtggcgttctctattcagctaattgttcttgcaacctggaagcaagcaattcatttatgcaatacctttgtagcttcacttgcaagggagagtccctcacaggatatccatatgaaggggcttagtgctgatgcttcgcatttgcttgcgaactcaaagctagctgatgatgtctgcgtgcagatagagaaacagtttctctccgaagttgaatatgcggaagaactagccagcactgtgggacagatagctgatggtacagagatgccagatgcaatcgaaatgatatttcagtctgctttacttacaggaaggcgaggcggtgttgatgagatgtttgggaaagcagcggatgccatgactgggtatacgagggcggtatccatgctgcggtttctcctgatcgaggcaccatcacttgccctcaaccctcctttgactctgacaagatccgatcggcatcgacttcgcacatacattgaagctctcaacaccaggctctgtcagatgcagagccagaggcattgactgctgccatgtgtcctcaaatcttgttcaggttgagggacggtagacttgtgcaatattttttcatttgtaaatatatttgttggcccaagataggacatgtaagatgtcagaaatttggaactaggcagagcagcgaaaatctattataactcgaccagactactattatgatatggaattaggtggagtgtacgtgttaggttcattctgtgtgaattcaggcagaagcttgaaaacgaaatgaccaatcatggtcacttgtggaaatgtaaactacttcgtagattctttattagtactctatttcgttcttttttatttgttgtggtttagttaaaaaaatgaattagctttcgacaaatattcgagaaaggatagtatatgttatggtgtgttccaacta

SEQ ID NO: 7132 - DNA, 2413 bp, Zea Mays
ctctcgcttttctgttccgcgcagcaacgacgcggttgcttctccccacggcggcatctcctgcgcggcggcgccgcccccgcgagagccgcgacggcgcactaggcgagttactggacacgggagcgatgggggacggcgccagcggccgcggcggtcgaagcggcgccgggcgccgggtgggggagtacgagctgctgcgaccgattgggtcgggagcctactcgcaggtgtggctgggacggcaccgggtgcggggcacggaggtggcggtgaaggagatcgccatggaacgtctcagcaaaaagctccgcgagagcctcctctccgaggtcgacatccttcgtcgcatccgacacgataacgtcatcgcactccacgactccgtcaaggatcatgggagtatatatctcatactggagtattgtcgaggtggtgacttacatgcataccttcaacgtcataaaagagtttctgaaaaggttgctaagcacttcatccgtcagttagcatctggtctgaaaatgcttcgcgataataacgtggttcaccgagacctaaaacctcagaacattcttcttgttgaaaataatgaaaatactctgttgaagattgccgactttggatttgcaaaatttttgcaaccctttgccctagccgaaacactttgtggttcaccactttacatggctccagaagtcatgcaaggtcagaagtatgatgcaaaggcagatctgtggagtgttggtgtcattctatatcaacttgttactggaataccaccttttaatggggacaatcagatacagttgcttaaaaatatactcaggacgcatgaaatacgattaccatctgattgtgaattgagccatgactgcatcgacttgtgcagaaagttgctgcggctcaattcagtggagcggcttacagttgaagaatttgtgcaccacccatttctttctgaacatgctccagagaggaccttgagccggacattatctgaaataagagatggctttccaataaataatatcagtccaacaaggccttcaagccaaagttcacaagaagattgtatgccttttcctttggatgatgagtcaagtggacaggatgagggtccaattcctgacagtaagagtccgatgaaatcttatgggtttcccacaggtaaaagattggataaaacttcaggccagagtccatcaaaacataccagtctgttctccaggtatgtcttgggaaataatcatgcacctagtagccaacaccatggccatactgataaaatgaccaaggaaagcaagattcatgaagtgcaaggtccaaaaggtgtttatccagaagggatctgcggatataagtgatgccatggatcagcccccatctgattatctgacgaggattagattgttagagcaatatgcatcagccatagcagggttggtcagggatgagatcaaaggtggcaggcacttggtggcgttctctattcagctaattgttcttgcaacctggaagcaagcaattcatttatgcaatacctttgtagcttcacttgcaagggagagtccctcacaggatatccatatgaaggggcttagtgctgatgcttcgcatttgcttgcgaactcaaagctagctgatgatgtctgcgtgcagatagagaaacagtttctctccgaagttgaatatgcggaagaactagccagcactgtgggacagatagctgatggtacagagatgccagatgcaatcgaaatgatatttcagtctgctttacttacaggaaggcgaggcggtgttgatgagatgtttgggaaagcagcggatgccatgactgggtatacgagggcggtatccatgctgcggtttctcctgatcgaggcaccatcacttgccctcaaccctcctttgactctgacaagatccgatcggcatcgacttcgcacatacattgaagctctcaacaccaggctctgtcagatgcagagccagaggcattgactgctgccatgtgtcctcaaatcttgttcaggttgagggacggtagacttgtgcaatattttttcatttgtaaatatatttgttggcccaagataggacatgtaagatgtcagaaatttggaactaggcagagcagcgaaaatctattataactcgaccagactactattatgatatggaattaggtggagtgtacgtgttaggttcattctgtgtgaattcaggcagaagcttgaaaacgaaatgaccaatcatggtcacttgtggaaatgtaaactacttcgtagattctttattagtactctatttcgttcttttttatttgttgtggtttagttaaaaaaatgaattagctttcgacaaatattcgagaaaggatagtatatgttatggtgtgttccaacta

SEQ ID NO: 7133 - DNA, 2651 bp, Zea Mays
ctctcgcttttctgttccgcgcagcaacgacgcggttgcttctccccacggcggcatctcctgcgcggcggcgccgcccccgcgagagccgcgacggcgcactaggcgagttactggacacgggagcgatgggggacggcgccagcggccgcggcggtcgaagcggcgccgggcgccgggtgggggagtacgagctgctgcgaccgattgggtcgggagcctactcgcaggtgtggctgggacggcaccgggtgcggggcacggaggtggcggtgaaggagatcgccatggaacgtctcagcaaaaagctccgcgagagcctcctctccgaggtcgacatccttcgtcgcatccgacacgataacgtcatcgcactccacgactccgtcaaggatcatgggagtatatatctcatactggagtattgtcgaggtggtgacttacatgcataccttcaacgtcataaaagagtttctgaaaaggttgctaagcacttcatccgtcagttagcatctggtctgaaaatgcttcgcgataataacgtggttcaccgagacctaaaacctcagaacattcttcttgttgaaaataatgaaaatactctgttgaagattgccgactttggatttgcaaaatttttgcaaccctttgccctagccgaaacactttgtggttcaccactttacatggctccagaagtcatgcaaggtcagaagtatgatgcaaagaacaggcagatctgtggagtgttggtgtcattctatatcaacttgttactggaataccaccttttaatggggacaatcagatacagttgcttaaaaatatactcaggacgcatgaaatacgattaccatctgattgtgaattgagccatgactgcatcgacttgtgcagaaagttgctgcggctcaattcagtggagcggcttacagttgaagaatttgtgcaccacccatttctttctgaacatgctccagagaggaccttgagccggacattatctgaaataagagatggctttccaataaataatatcagtccaacaaggccttcaagccaaagttcacaagaagattgtatgccttttcctttggatgatgagtcaagtggacaggatgagggtccaattcctgacagtaagagtccgatgaaatcttatgggtttcccacaggtaaaagattggataaaacttcaggccagagtccatcaaaacataccagtctgttctccaggtatgtcttgggaaataatcatgcacctagtagccaacaccatggccatactgataaaatgaccaaggaaagcaagattcatgaagtgcaaggtccaaaaggtgtttatccagaagatcaggaatatgtatttgtgtctggaccacacccagagggatcatcgtcttcaacaaatgcttctcagcagcttaacttaccggcaaaatatgataatttatctgtttcaccaccgaagttaactttcttgagtgcaccaatgccgataaacggtttgccgattaatagacaacaatctgctgggactggtagcttcgacagccactattctcctgcatctgtcatttcacagggatctgcggatataagtgatgccatggatcagcccccatctgattatctgacgaggattagattgttagagcaatatgcatcagccatagcagggttggtcagggatgagatcaaaggtggcaggcacttggtggcgttctctattcagctaattgttcttgcaacctggaagcaagcaattcatttatgcaatacctttgtagcttcacttgcaagggagagtccctcacaggatatccatatgaaggggcttagtgctgatgcttcgcatttgcttgcgaactcaaagctagctgatgatgtctgcgtgcagatagagaaacagtttctctccgaagttgaatatgcggaagaactagccagcactgtgggacagatagctgatggtacagagatgccagatgcaatcgaaatgatatttcagtctgctttacttacaggaaggcgaggcggtgttgatgagatgtttgggaaagcagcggatgccatgactgggtatacgagggcggtatccatgctgcggtttctcctgatcgaggcaccatcacttgccctcaaccctcctttgactctgacaagatccgatcggcatcgacttcgcacatacattgaagctctcaacaccaggctctgtcagatgcagagccagaggcattgactgctgccatgtgtcctcaaatcttgttcaggttgagggacggtagacttgtgcaatattttttcatttgtaaatatatttgttggcccaagataggacatgtaagatgtcagaaatttggaactaggcagagcagcgaaaatctattataactcgaccagactactattatgatatggaattaggtggagtgtacgtgttaggttcattctgtgtgaattcaggcagaagcttgaaaacgaaatgaccaatcatggtcacttgtggaaatgtaaactacttcgtagattctttattagtactctatttcgttcttttttatttgttgtggtttagttaaaaaaatgaattagctttcgacaaatattcgagaaaggatagtatatgttatggtgtgttccaacta

SEQ ID NO: 7134 - DNA, 2453 bp, Zea Mays
ctctcgcttttctgttccgcgcagcaacgacgcggttgcttctccccacggcggcatctcctgcgcggcggcgccgcccccgcgagagccgcgacggcgcactaggcgagttactggacacgggagcgatgggggacggcgccagcggccgcggcggtcgaagcggcgccgggcgccgggtgggggagtacgagctgctgcgaccgattgggtcgggagcctactcgcaggtgtggctgggacggcaccgggtgcggggcacggaggtggcggtgaaggagatcgccatggaacgtctcagcaaaaagctccgcgagagcctcctctccgaggtcgacatccttcgtcgcatccgacacgataacgtcatcgcactccacgactccgtcaaggatcatgggagtatatatctcatactggagtattgtcgaggtggtgacttacatgcataccttcaacgtcataaaagagtttctgaaaaggttgctaagcacttcatccgtcagttagcatctggtctgaaaatgcttcgcgataataacgtggttcaccgagacctaaaacctcagaacattcttcttgttgaaaataatgaaaatactctgttgaagattgccgactttggatttgcaaaatttttgcaaccctttgccctagccgaaacactttgtggttcaccactttacatggctccagaagtcatgcaaggtcagaagtatgatgcaaaggcagatctgtggagtgttggtgtcattctatatcaacttgttactggaataccaccttttaatggggacaatcagatacagttgcttaaaaatatactcaggacgcatgaaatacgattaccatctgattgtgaattgagccatgactgcatcgacttgtgcagaaagttgctgcggctcaattcagtggagcggcttacagttgaagaatttgtgcaccacccatttctttctgaacatgctccagagaggaccttgagccggacattatctgaaataagagatggctttccaataaataatatcagtccaacaaggccttcaagccaaagttcacaagaagattgtatgccttttcctttggatgatgagtcaagtggacaggatgagggtccaattcctgacagtaagagtccgatgaaatcttatgggtttcccacaggtaaaagattggataaaacttcaggccagagtccatcaaaacataccagtctgttctccaggtatgtcttgggaaataatcatgcacctagtagccaacaccatggccatactgataaaatgaccaaggaaagcaagattcatgaagtgcaaggtccaaaaggtgtttatccagaagcttcgacagccactattctcctgcatctgtcatttcacagggatctgcggatataagtgatgccatggatcagcccccatctgattatctgacgaggattagattgttagagcaatatgcatcagccatagcagggttggtcagggatgagatcaaaggtggcaggcacttggtggcgttctctattcagctaattgttcttgcaacctggaagcaagcaattcatttatgcaatacctttgtagcttcacttgcaagggagagtccctcacaggatatccatatgaaggggcttagtgctgatgcttcgcatttgcttgcgaactcaaagctagctgatgatgtctgcgtgcagatagagaaacagtttctctccgaagttgaatatgcggaagaactagccagcactgtgggacagatagctgatggtacagagatgccagatgcaatcgaaatgatatttcagtctgctttacttacaggaaggcgaggcggtgttgatgagatgtttgggaaagcagcggatgccatgactgggtatacgagggcggtatccatgctgcggtttctcctgatcgaggcaccatcacttgccctcaaccctcctttgactctgacaagatccgatcggcatcgacttcgcacatacattgaagctctcaacaccaggctctgtcagatgcagagccagaggcattgactgctgccatgtgtcctcaaatcttgttcaggttgagggacggtagacttgtgcaatattttttcatttgtaaatatatttgttggcccaagataggacatgtaagatgtcagaaatttggaactaggcagagcagcgaaaatctattataactcgaccagactactattatgatatggaattaggtggagtgtacgtgttaggttcattctgtgtgaattcaggcagaagcttgaaaacgaaatgaccaatcatggtcacttgtggaaatgtaaactacttcgtagattctttattagtactctatttcgttcttttttatttgttgtggtttagttaaaaaaatgaattagctttcgacaaatattcgagaaaggatagtatatgttatggtgtgttccaacta

SEQ ID NO: 7135 - DNA, 2761 bp, Zea Mays
gggtgaacgcgacctgaccctgtttccttctctggtagtctggtctctcgcttttctgttccgcgcagcaacgacgcggttgcttctccccacggcggcatctcctgcgcggcggcgccgcccccgcgagagccgcgacggcgcactaggcgagttactggacacgggagcgatgggggacggcgccagcggccgcggcggtcgaagcggcgccgggcgccgggtgggggagtacgagctgctgcgaccgattgggtcgggagcctactcgcaggtgtggctgggacggcaccgggtgcggggcacggaggtggcggtgaaggagatcgccatggaacgtctcagcaaaaagctccgcgagagcctcctctccgaggtcgacatccttcgtcgcatccgacacgataacgtcatcgcactccacgactccgtcaaggatcatgggagtatatatctcatactggagtattgtcgaggtggtgacttacatgcataccttcaacgtcataaaagagtttctgaaaaggttgctaagcacttcatccgtcagttagcatctggtctgaaaatgcttcgcgataataacgtggttcaccgagacctaaaacctcagaacattcttcttgttgaaaataatgaaaatactctgttgaagattgccgactttggatttgcaaagatcttttagggcgattgcaagtagcgatctttctgaagtctctggcatttgtaaacgtagctaaacaaagatttttgcaaccctttgccctagccgaaacactttgtggttcaccactttacatggctccagaagtcatgcaaggtcagaagtatgatgcaaaggcagatctgtggagtgttggtgtcattctatatcaacttgttactggaataccaccttttaatggggacaatcagatacagttgcttaaaaatatactcaggacgcatgaaatacgattaccatctgattgtgaattgagccatgactgcatcgacttgtgcagaaagttgctgcggctcaattcagtggagcggcttacagttgaagaatttgtgcaccacccatttctttctgaacatgctccagagaggaccttgagccggacattatctgaaataagagatggctttccaataaataatatcagtccaacaaggccttcaagccaaagttcacaagaagattgtatgccttttcctttggatgatgagtcaagtggacaggatgagggtccaattcctgacagtaagagtccgatgaaatcttatgggtttcccacaggtaaaagattggataaaacttcaggccagagtccatcaaaacataccagtctgttctccaggtatgtcttgggaaataatcatgcacctagtagccaacaccatggccatactgataaaatgaccaaggaaagcaagattcatgaagtgcaaggtccaaaaggtgtttatccagaagatcaggaatatgtatttgtgtctggaccacacccagagggatcatcgtcttcaacaaatgcttctcagcagcttaacttaccggcaaaatatgataatttatctgtttcaccaccgaagttaactttcttgagtgcaccaatgccgataaacggtttgccgattaatagacaacaatctgctgggactggtagcttcgacagccactattctcctgcatctgtcatttcacagggatctgcggatataagtgatgccatggatcagcccccatctgattatctgacgaggattagattgttagagcaatatgcatcagccatagcagggttggtcagggatgagatcaaaggtggcaggcacttggtggcgttctctattcagctaattgttcttgcaacctggaagcaagcaattcatttatgcaatacctttgtagcttcacttgcaagggagagtccctcacaggatatccatatgaaggggcttagtgctgatgcttcgcatttgcttgcgaactcaaagctagctgatgatgtctgcgtgcagatagagaaacagtttctctccgaagttgaatatgcggaagaactagccagcactgtgggacagatagctgatggtacagagatgccagatgcaatcgaaatgatatttcagtctgctttacttacaggaaggcgaggcggtgttgatgagatgtttgggaaagcagcggatgccatgactgggtatacgagggcggtatccatgctgcggtttctcctgatcgaggcaccatcacttgccctcaaccctcctttgactctgacaagatccgatcggcatcgacttcgcacatacattgaagctctcaacaccaggctctgtcagatgcagagccagaggcattgactgctgccatgtgtcctcaaatcttgttcaggttgagggacggtagacttgtgcaatattttttcatttgtaaatatatttgttggcccaagataggacatgtaagatgtcagaaatttggaactaggcagagcagcgaaaatctattataactcgaccagactactattatgatatggaattaggtggagtgtacgtgttaggttcattctgtgtgaattcaggcagaagcttgaaaacgaaatgaccaatcatggtcacttgtggaaatgtaaactacttcgtagattctttattagtactctatttcgttcttttttatttgttgtggtttagttaaaaaaatgaattagctttcgacaaatattcgagaaaggatagtatatgttatggtgtgttccaacta

SEQ ID NO: 7136 - DNA, 2532 bp, Zea Mays
cgcggggtgaacgcgacctgaccctgtttccttctctggtagtctggtctctcgcttttctgttccgcgcagcaacgacgcggttgcttctccccacggcggcatctcctgcgcggcggcgccgcccccgcgagagccgcgacggcgcactaggcgagttactggacacgggagcgatgggggacggcgccagcggccgcggcggtcgaagcggcgccgggcgccgggtgggggagtacgagctgctgcgaccgattgggtcgggagcctactcgcaggtgtggctgggacggcaccgggtgcggggcacggaggtggcggtgaaggagatcgccatggaacgtctcagcaaaaagctccgcgagagcctcctctccgaggtcgacatccttcgtcgcatccgacacgataacgtcatcgcactccacgactccgtcaaggatcatgggagtatatatctcatactggagtattgtcgaggtggtgacttacatgcataccttcaacgtcataaaagagtttctgaaaaggttgctaagcacttcatccgtcagttagcatctggtctgaaaatgcttcgcgataataacgtggttcaccgagacctaaaacctcagaacattcttcttgttgaaaataatgaaaatactctgttgaagattgccgactttggatttgcaaagatcttttagggcgattgcaagtagcgatctttctgaagtctctggcatttgtaaacgtagctaaacaaagatttttgcaaccctttgccctagccgaaacactttgtggttcaccactttacatggctccagaagtcatgcaaggtcagaagtatgatgcaaaggcagatctgtggagtgttggtgtcattctatatcaacttgttactggaataccaccttttaatggggacaatcagatacagttgcttaaaaatatactcaggacgcatgaaatacgattaccatctgattgtgaattgagccatgactgcatcgacttgtgcagaaagttgctgcggctcaattcagtggagcggcttacagttgaagaatttgtgcaccacccatttctttctgaacatgctccagagaggaccttgagccggacattatctgaaataagagatggctttccaataaataatatcagtccaacaaggccttcaagccaaagttcacaagaagattgtatgccttttcctttggatgatgagtcaagtggacaggatgagggtccaattcctgacagtaagagtccgatgaaatcttatgggtttcccacaggtaaaagattggataaaacttcaggccagagtccatcaaaacataccagtctgttctccaggtatgtcttgggaaataatcatgcacctagtagccaacaccatggccatactgataaaatgaccaaggaaagcaagattcatgaagtgcaaggtccaaaaggtgtttatccagaagggatctgcggatataagtgatgccatggatcagcccccatctgattatctgacgaggattagattgttagagcaatatgcatcagccatagcagggttggtcagggatgagatcaaaggtggcaggcacttggtggcgttctctattcagctaattgttcttgcaacctggaagcaagcaattcatttatgcaatacctttgtagcttcacttgcaagggagagtccctcacaggatatccatatgaaggggcttagtgctgatgcttcgcatttgcttgcgaactcaaagctagctgatgatgtctgcgtgcagatagagaaacagtttctctccgaagttgaatatgcggaagaactagccagcactgtgggacagatagctgatggtacagagatgccagatgcaatcgaaatgatatttcagtctgctttacttacaggaaggcgaggcggtgttgatgagatgtttgggaaagcagcggatgccatgactgggtatacgagggcggtatccatgctgcggtttctcctgatcgaggcaccatcacttgccctcaaccctcctttgactctgacaagatccgatcggcatcgacttcgcacatacattgaagctctcaacaccaggctctgtcagatgcagagccagaggcattgactgctgccatgtgtcctcaaatcttgttcaggttgagggacggtagacttgtgcaatattttttcatttgtaaatatatttgttggcccaagataggacatgtaagatgtcagaaatttggaactaggcagagcagcgaaaatctattataactcgaccagactactattatgatatggaattaggtggagtgtacgtgttaggttcattctgtgtgaattcaggcagaagcttgaaaacgaaatgaccaatcatggtcacttgtggaaatgtaaactacttcgtagattctttattagtactctatttcgttcttttttatttgttgtggtttagttaaaaaaatgaattagctttcgacaaatattcgagaaaggatagtatatgttatggtgtgttccaacta

SEQ ID NO: 7137 - DNA, 2585 bp, Zea Mays
ggctggccccgacgcggggtgaacgcgacctgaccctgtttccttctctggtagtctggtctctcgcttttctgttccgcgcagcaacgacgcggttgcttctccccacggcggcatctcctgcgcggcggcgccgcccccgcgagagccgcgacggcgcactaggcgagttactggacacgggagcgatgggggacggcgccagcggccgcggcggtcgaagcggcgccgggcgccgggtgggggagtacgagctgctgcgaccgattgggtcgggagcctactcgcaggtgtggctgggacggcaccgggtgcggggcacggaggtggcggtgaaggagatcgccatggaacgtctcagcaaaaagctccgcgagagcctcctctccgaggtcgacatccttcgtcgcatccgacacgataacgtcatcgcactccacgactccgtcaaggatcatgggagtatatatctcatactggagtattgtcgaggtggtgacttacatgcataccttcaacgtcataaaagagtttctgaaaaggttgctaagcacttcatccgtcagttagcatctggtctgaaaatgcttcgcgataataacgtggttcaccgagacctaaaacctcagaacattcttcttgttgaaaataatgaaaatactctgttgaagattgccgactttggatttgcaaaatttttgcaaccctttgccctagccgaaacactttgtggttcaccactttacatggctccagaagtcatgcaaggtcagaagtatgatgcaaaggcagatctgtggagtgttggtgtcattctatatcaacttgttactggaataccaccttttaatggggacaatcagatacagttgaagaatttgtgcaccacccatttctttctgaacatgctccagagaggaccttgagccggacattatctgaaataagagatggctttccaataaataatatcagtccaacaaggccttcaagccaaagttcacaagaagattgtatgccttttcctttggatgatgagtcaagtggacaggatgagggtccaattcctgacagtaagagtccgatgaaatcttatgggtttcccacaggtaaaagattggataaaacttcaggccagagtccatcaaaacataccagtctgttctccaggtatgtcttgggaaataatcatgcacctagtagccaacaccatggccatactgataaaatgaccaaggaaagcaagattcatgaagtgcaaggtccaaaaggtgtttatccagaagatcaggaatatgtatttgtgtctggaccacacccagagggatcatcgtcttcaacaaatgcttctcagcagcttaacttaccggcaaaatatgataatttatctgtttcaccaccgaagttaactttcttgagtgcaccaatgccgataaacggtttgccgattaatagacaacaatctgctgggactggtagcttcgacagccactattctcctgcatctgtcatttcacagggatctgcggatataagtgatgccatggatcagcccccatctgattatctgacgaggattagattgttagagcaatatgcatcagccatagcagggttggtcagggatgagatcaaaggtggcaggcacttggtggcgttctctattcagctaattgttcttgcaacctggaagcaagcaattcatttatgcaatacctttgtagcttcacttgcaagggagagtccctcacaggatatccatatgaaggggcttagtgctgatgcttcgcatttgcttgcgaactcaaagctagctgatgatgtctgcgtgcagatagagaaacagtttctctccgaagttgaatatgcggaagaactagccagcactgtgggacagatagctgatggtacagagatgccagatgcaatcgaaatgatatttcagtctgctttacttacaggaaggcgaggcggtgttgatgagatgtttgggaaagcagcggatgccatgactgggtatacgagggcggtatccatgctgcggtttctcctgatcgaggcaccatcacttgccctcaaccctcctttgactctgacaagatccgatcggcatcgacttcgcacatacattgaagctctcaacaccaggctctgtcagatgcagagccagaggcattgactgctgccatgtgtcctcaaatcttgttcaggttgagggacggtagacttgtgcaatattttttcatttgtaaatatatttgttggcccaagataggacatgtaagatgtcagaaatttggaactaggcagagcagcgaaaatctattataactcgaccagactactattatgatatggaattaggtggagtgtacgtgttaggttcattctgtgtgaattcaggcagaagcttgaaaacgaaatgaccaatcatggtcacttgtggaaatgtaaactacttcgtagattctttattagtactctatttcgttcttttttatttgttgtggtttagttaaaaaaatgaattagctttcgacaaatattcgagaaaggatagtatatgttatggtgtgttccaacta

SEQ ID NO: 7138 - DNA, 2706 bp, Zea Mays
cacagggctggccccgacgcggggtgaacgcgacctgaccctgtttccttctctggtagtctggtctctcgcttttctgttccgcgcagcaacgacgcggttgcttctccccacggcggcatctcctgcgcggcggcgccgcccccgcgagagccgcgacggcgcactaggcgagttactggacacgggagcgatgggggacggcgccagcggccgcggcggtcgaagcggcgccgggcgccgggtgggggagtacgagctgctgcgaccgattgggtcgggagcctactcgcaggtgtggctgggacggcaccgggtgcggggcacggaggtggcggtgaaggagatcgccatggaacgtctcagcaaaaagctccgcgagagcctcctctccgaggtcgacatccttcgtcgcatccgacacgataacgtcatcgcactccacgactccgtcaaggatcatgggagtatatatctcatactggagtattgtcgaggtggtgacttacatgcataccttcaacgtcataaaagagtttctgaaaaggttgctaagcacttcatccgtcagttagcatctggtctgaaaatgcttcgcgataataacgtggttcaccgagacctaaaacctcagaacattcttcttgttgaaaataatgaaaatactctgttgaagattgccgactttggatttgcaaaatttttgcaaccctttgccctagccgaaacactttgtggttcaccactttacatggctccagaagtcatgcaaggtcagaagtatgatgcaaaggcagatctgtggagtgttggtgtcattctatatcaacttgttactggaataccaccttttaatggggacaatcagatacagttgcttaaaaatatactcaggacgcatgaaatacgattaccatctgattgtgaattgagccatgactgcatcgacttgtgcagaaagttgctgcggctcaattcagtggagcggcttacagttgaagaatttgtgcaccacccatttctttctgaacatgctccagagaggaccttgagccggacattatctgaaataagagatggctttccaataaataatatcagtccaacaaggccttcaagccaaagttcacaagaagattgtatgccttttcctttggatgatgagtcaagtggacaggatgagggtccaattcctgacagtaagagtccgatgaaatcttatgggtttcccacaggtaaaagattggataaaacttcaggccagagtccatcaaaacataccagtctgttctccaggtatgtcttgggaaataatcatgcacctagtagccaacaccatggccatactgataaaatgaccaaggaaagcaagattcatgaagtgcaaggtccaaaaggtgtttatccagaaggaatatgtatttgtgtctggaccacacccagagggatcatcgtcttcaacaaatgcttctcagcagcttaacttaccggcaaaatatgataatttatctgtttcaccaccgaagttaactttcttgagtgcaccaatgccgataaacggtttgccgattaatagacaacaatctgctgggactggtagcttcgacagccactattctcctgcatctgtcatttcacagggatctgcggatataagtgatgccatggatcagcccccatctgattatctgacgaggattagattgttagagcaatatgcatcagccatagcagggttggtcagggatgagatcaaaggtggcaggcacttggtggcgttctctattcagctaattgttcttgcaacctggaagcaagcaattcatttatgcaatacctttgtagcttcacttgcaagggagagtccctcacaggatatccatatgaaggggcttagtgctgatgcttcgcatttgcttgcgaactcaaagctagctgatgatgtctgcgtgcagatagagaaacagtttctctccgaagttgaatatgcggaagaactagccagcactgtgggacagatagctgatggtacagagatgccagatgcaatcgaaatgatatttcagtctgctttacttacaggaaggcgaggcggtgttgatgagatgtttgggaaagcagcggatgccatgactgggtatacgagggcggtatccatgctgcggtttctcctgatcgaggcaccatcacttgccctcaaccctcctttgactctgacaagatccgatcggcatcgacttcgcacatacattgaagctctcaacaccaggctctgtcagatgcagagccagaggcattgactgctgccatgtgtcctcaaatcttgttcaggttgagggacggtagacttgtgcaatattttttcatttgtaaatatatttgttggcccaagataggacatgtaagatgtcagaaatttggaactaggcagagcagcgaaaatctattataactcgaccagactactattatgatatggaattaggtggagtgtacgtgttaggttcattctgtgtgaattcaggcagaagcttgaaaacgaaatgaccaatcatggtcacttgtggaaatgtaaactacttcgtagattctttattagtactctatttcgttcttttttatttgttgtggtttagttaaaaaaatgaattagctttcgacaaatattcgagaaaggatagtatatgttatggtgtgttccaacta

SEQ ID NO: 7139 - DNA, 2785 bp, Zea Mays
cggatatggataaccacagggctggccccgacgcggggtgaacgcgacctgaccctgtttccttctctggtagtctggtctctcgcttttctgttccgcgcagcaacgacgcggttgcttctccccacggcggcatctcctgcgcggcggcgccgcccccgcgagagccgcgacggcgcactaggcgagttactggacacgggagcgatgggggacggcgccagcggccgcggcggtcgaagcggcgccgggcgccgggtgggggagtacgagctgctgcgaccgattgggtcgggagcctactcgcaggtgtggctgggacggcaccgggtgcggggcacggaggtggcggtgaaggagatcgccatggaacgtctcagcaaaaagctccgcgagagcctcctctccgaggtcgacatccttcgtcgcatccgacacgataacgtcatcgcactccacgactccgtcaaggatcatgggagtatatatctcatactggagtattgtcgaggtggtgacttacatgcataccttcaacgtcataaaagagtttctgaaaagcatctggtctgaaaatgcttcgcgataataacgtggttcaccgagacctaaaacctcagaacattcttcttgttgaaaataatgaaaatactctgttgaagattgccgactttggatttgcaaaatttttgcaaccctttgccctagccgaaacactttgtggttcaccactttacatggctccagaagtcatgcaaggtcagaagtatgatgcaaaggcagatctgtggagtgttggtgtcattctatatcaacttgttactggaataccaccttttaatggggacaatcagatacagttgcttaaaaatatactcaggacgcatgaaatacgattaccatctgattgtgaattgagccatgactgcatcgacttgtgcagaaagttgctgcggctcaattcagtggagcggcttacagttgaagaatttgtgcaccacccatttctttctgaacatgctccagagaggaccttgagccggacattatctgaaataagagatggctttccaataaataatatcagtccaacaaggccttcaagccaaagttcacaagaagattgtatgccttttcctttggatgatgagtcaagtggacaggatgagggtccaattcctgacagtaagagtccgatgaaatcttatgggtttcccacaggtaaaagattggataaaacttcaggccagagtccatcaaaacataccagtctgttctccaggtatgtcttgggaaataatcatgcacctagtagccaacaccatggccatactgataaaatgaccaaggaaagcaagattcatgaagtgcaaggtccaaaaggtgtttatccagaagatcaggaatatgtatttgtgtctggaccacacccagagggatcatcgtcttcaacaaatgcttctcagcagcttaacttaccggcaaaatatgataatttatctgtttcaccaccgaagttaactttcttgagtgcaccaatgccgataaacggtttgccgattaatagacaacaatctgctgggactggtagcttcgacagccactattctcctgcatctgtcatttcacagggatctgcggatataagtgatgccatggatcagcccccatctgattatctgacgaggattagattgttagagcaatatgcatcagccatagcagggttggtcagggatgagatcaaaggtggcaggcacttggtggcgttctctattcagctaattgttcttgcaacctggaagcaagcaattcatttatgcaatacctttgtagcttcacttgcaagggagagtccctcacaggatatccatatgaaggggcttagtgctgatgcttcgcatttgcttgcgaactcaaagctagctgatgatgtctgcgtgcagatagagaaacagtttctctccgaagttgaatatgcggaagaactagccagcactgtgggacagatagctgatggtacagagatgccagatgcaatcgaaatgatatttcagtctgctttacttacaggaaggcgaggcggtgtaagtaaagcacagtgtattccattacagaactagtctgacatgtttacatgtttaccacccattgtttcctcatcccaattcacaggttgatgagatgtttgggaaagcagcggatgccatgactgggtatacgagggcggtatccatgctgcggtttctcctgatcgaggcaccatcacttgccctcaaccctcctttgactctgacaagatccgatcggcatcgacttcgcacatacattgaagctctcaacaccaggctctgtcagatgcagagccagaggcattgactgctgccatgtgtcctcaaatcttgttcaggttgagggacggtagacttgtgcaatattttttcatttgtaaatatatttgttggcccaagataggacatgtaagatgtcagaaatttggaactaggcagagcagcgaaaatctattataactcgaccagactactattatgatatggaattaggtggagtgtacgtgttaggttcattctgtgtgaattcaggcagaagcttgaaaacgaaatgaccaatcatggtcacttgtggaaatgtaaactacttcgtagattctttattagtactctatttcgttcttttttatttgttgtggtttagttaaaaaaatgaattagctttcgacaaatattcgagaaaggatagtatatgttatggtgtgttccaacta

SEQ ID NO: 7140 - DNA, 2020 bp, Zea Mays
aaacaaagatttttgcaaccctttgccctagccgaaacactttgtggttcaccactttacatggctccagaagtcatgcaaggtcagaagtatgatgcaaaggcagatctgtggagtgttggtgtcattctatatcaacttgttactggaataccaccttttaatggggacaatcagatacagttgcttaaaaatatactcaggacgcatgaaatacgattaccatctgattgtgaattgagccatgactgcatcgacttgtgcagaaagttgctgcggctcaattcagtggagcggcttacagttgaagaatttgtgcaccacccatttctttctgaacatgctccagagaggaccttgagccggacattatctgaaataagagatggctttccaataaataatatcagtccaacaaggccttcaagccaaagttcacaagaagattgtatgccttttcctttggatgatgagtcaagtggacaggatgagggtccaattcctgacagtaagagtccgatgaaatcttatgggtttcccacaggtaaaagattggataaaacttcaggccagagtccatcaaaacataccagtctgttctccaggtatgtcttgggaaataatcatgcacctagtagccaacaccatggccatactgataaaatgaccaaggaaagcaagattcatgaagtgcaaggtccaaaaggtgtttatccagaagatcaggaatatgtatttgtgtctggaccacacccagagggatcatcgtcttcaacaaatgcttctcagcagcttaacttaccggcaaaatatgataatttatctgtttcaccaccgaagttaactttcttgagtgcaccaatgccgataaacggtttgccgattaatagacaacaatctgctgggactggtagcttcgacagccactattctcctgcatctgtcatttcacagggatctgcggatataagtgatgccatggatcagcccccatctgattatctgacgaggattagattgttagagcaatatgcatcagccatagcagggttggtcagggatgagatcaaaggtggcaggcacttggtggcgttctctattcagctaattgttcttgcaacctggaagcaagcaattcatttatgcaatacctttgtagcttcacttgcaagggagagtccctcacaggatatccatatgaaggggcttagtgctgatgcttcgcatttgcttgcgaactcaaagctagctgatgatgtctgcgtgcagatagagaaacagtttctctccgaagttgaatatgcggaagaactagccagcactgtgggacagatagctgatggtacagagatgccagatgcaatcgaaatgatatttcagtctgctttacttacaggaaggcgaggcggtgttgatgagatgtttgggaaagcagcggatgccatgactgggtatacgagggcggtatccatgctgcggtttctcctgatcgaggcaccatcacttgccctcaaccctcctttgactctgacaagatccgatcggcatcgacttcgcacatacattgaagctctcaacaccaggctctgtcagatgcagagccagaggcattgactgctgccatgtgtcctcaaatcttgttcaggttgagggacggtagacttgtgcaatattttttcatttgtaaatatatttgttggcccaagataggacatgtaagatgtcagaaatttggaactaggcagagcagcgaaaatctattataactcgaccagactactattatgatatggaattaggtggagtgtacgtgttaggttcattctgtgtgaattcaggcagaagcttgaaaacgaaatgaccaatcatggtcacttgtggaaatgtaaactacttcgtagattctttattagtactctatttcgttcttttttatttgttgtggtttagttaaaaaaatgaattagctttcgacaaatattcgagaaaggatagtatatgttatggtgtgttccaacta

SEQ ID NO: 7141 - DNA, 1585 bp, Zea Mays
caggcatggattaccacggttcactccgctttttcaactgagaaaagaagtattctacctgttggagacatcagtcagacaatatctgatgataaagcggatattgcagtgctagaagagccagaacatcttacttggtaccaccatgggcggaggtggaaaagcaagttccaaaaagttataggtgttgttcacacaaactatttggaatacgtgaaaagagagaaaaatggatacattagtgcgtttatcttaaaacacattaattcttgggttacagacatctattgtcataaggttataagattgtctgcagcaactcaggatgttccaaggtctgtgatttgtaatgttcatggagttaaccccaaatttattgagattggcaaattgaaacatcagcagctatgccaaagagagcaagcattcttcaagggtgcatattatatcggaaagatggtatggagtaaaggttacacagagcttcttcagcttcttcataagcaccaaatggaattgtctggccttaaaatggagttgtatggcagtggggaagatgctgatgaagtaaaggcatcagctgagcgactgagcttagatattagagtctatccaggccgtgatcatggagattcaatatttcacgactacaaggtcttcataaacccaagtacaactgatgtggtatgcacaacaactgcagaagctttggcaatggggaagattgtgatctgtgcaaaccatccttcaaatgtttttttcaaaagatttcctaattgtcacatgtacaatactgatgaagagtttgtgagactaacaatgaaagctttggcagaagaacctatcccactgtcagatgatttgcggcatgaactttcctgggaggcagcaacagaaagatttattagggttgctgatattgcaccaactgtgcctgtgggacaaccaccaccctcctcacagcatttcatgcgcatctccccagatgaactgcagaagaacatggaagaggcatcggcatttttccataatacaatctctgggtttgaagctgtgcgttgtgtgttcggtgcaataccaaacacactgcagccggatgaacagcaatgcaaggaacttgggtggaatttgcagggatagcattagcttttcttgcgatgctgttgccatggaccatagaatgaaccagtctaactcaacggcaaaaagatgtgtcgctcggagaggttctcagattgatcaaacatacattctatgtggtgttctggtgtggcggcactgcattttttcttcatatatcaaaggcgttctgaagttcctggatgcatcgtatcttctgattgttaatcttaagcagtctgaagtgcacactagtattacagtctcatatatgtggactgtttttcatcgtgttgtttcccaggattgacgcgtgtgttgaaaatcttattgtataataatatgccccttgttttcgcagccatccatgctgaaacttttactacaccgcctaaaatctgtgtgctagttgatactacctgtgttctcgataaataaaaaagaacagaaaaagtaaaaaaaaaaa

SEQ ID NO: 7142 - DNA, 1953 bp, Zea Mays
atccggggccactaaacgcagatttcctcggttccttgtacgttcagggccggacgacggggacagacagcggtgtcgcggggccacctgcttcccaacgccgaccgcacctgctgccctgtcgtccgccctccttcccttctcctcccctccaactgtttcctcaacctcccgacccaaccacggccgtgcccgccaaggcgccaaccgcacagcagctggggtgctgacgtgctgtgggtggttctgttgtccatggcgcggaagcatcagcatgttgccatatttaccacagcgtgcctgccgtggatgactgggactgcggtaaacccactgtttcgggctgcataccttgccaaggctggagattgggaggtcacgctggtggtgccttggctgtccaagggggatcaggagctcgtttatccaaacaagatgaggttcagtttgccggcagagcaggaaaactatgtgcggcggtggcttgaggaacggactgggctgttgccgaagtttgacataaagttctatcctgggaagttttcaactgagaaaagaagtattctacctgttggagacatcagtcagacaatatctgatgataaagcggatattgcagtgctagaagagccagaacatcttacttggtaccaccatgggcggaggttataagattgtctgcagcaactcaggatgttccaaggtctgtgatttgtaatgttcatggagttaaccccaaatttattgagattggcaaattgaaacatcagcagctatgccaaagagagcaagcattcttcaagggtgcatattatatcggaaagatggtatggagtaaaggttacacagagcttcttcagcttcttcataagcaccaaatggaattgtctggccttaaaatggagttgtatggcagtggggaagatgctgatgaagtaaaggcatcagctgagcgactgagcttagatattagagtctatccaggccgtgatcatggagattcaatatttcacgactacaaggtcttcataaacccaagtacaactgatgtggtatgcacaacaactgcagaagctttggcaatggggaagattgtgatctgtgcaaaccatccttcaaatgtttttttcaaaagatttcctaattgtcacatgtacaatactgatgaagagtttgtgagactaacaatgaaagctttggcagaagaacctatcccactgtcagatgatttgcggcatgaactttcctgggaggcagcaacagaaagatttattagggttgctgatattgcaccaactgtgcctgtgggacaaccaccaccctcctcacagcatttcatgcgcatctccccagatgaactgcagaagaacatggaagaggcatcggcatttttccataatacaatctctgggtttgaagctgtgcgttgtgtgttcggtgcaataccaaacacactgcagccggatgaacagcaatgcaaggaacttgggtggaatttgcagggatagcattagcttttcttgcgatgctgttgccatggaccatagaatgaaccagtctaactcaacggcaaaaagatgtgtcgctcggagaggttctcagattgatcaaacatacattctatgtggtgttctggtgtggcggcactgcattttttcttcatatatcaaaggcgttctgaagttcctggatgcatcgtatcttctgattgttaatcttaagcagtctgaagtgcacactagtattacagtctcatatatgtggactgtttttcatcgtgttgtttcccaggattgacgcgtgtgttgaaaatcttattgtataataatatgccccttgttttcgcagccatccatgctgaaacttttactacaccgcctaaaatctgtgtgctagttgatactacctgtgttctcgataaataaaaaagaacagaaaaagtaaaaaaaaaaa

SEQ ID NO: 7143 - DNA, 2010 bp, Zea Mays
atccggggccactaaacgcagatttcctcggttccttgtacgttcagggccggacgacggggacagacagcggtgtcgcggggccacctgcttcccaacgccgaccgcacctgctgccctgtcgtccgccctccttcccttctcctcccctccaactgtttcctcaacctcccgacccaaccacggccgtgcccgccaaggcgccaaccgcacagcagcagctggggtgctgacgtgctgtgggtggttctgttgtccatggcgcggaagcatcagcatgttgccatatttaccacagcgtgcctgccgtggatgactgggactgcggtaaacccactgtttcgggctgcataccttgccaaggctggagattgggaggtcacgctggtggtgccttggctgtccaagggggatcaggagctcgtttatccaaacaagatgaggttcagtttgccggcagagcaggaaaactatgtgcggcggtggcttgaggaacggactgggctgttgccgaagtttgacataaagttctatcctgggaagttttcaactgagaaaagaagtattctacctgttggagacatcagtcagacaatatctgatgataaagcggatattgcagtgctagaagagccagaacatcttacttggtaccaccatgggcggaggtggaaaagcaagttccaaaaagttataggtgttgttcacacaaactatttggaatacgtgaaaagagagaaaaatggatacattagtgcgtttatcttaaaacacattaattcttgggttacagacatctattgtcataaggttataagattgtctgcagcaactcaggatgttccaaggtctgtgatttgtaatgttcatggagttaaccccaaatttattgagattggcaaattgaaacatcagcagctatgccaaagagagcaagcattcttcaagggtgcatattatatcggaaagatggtggggaagatgctgatgaagtaaaggcatcagctgagcgactgagcttagatattagagtctatccaggccgtgatcatggagattcaatatttcacgactacaaggtcttcataaacccaagtacaactgatgtggtatgcacaacaactgcagaagctttggcaatggggaagattgtgatctgtgcaaaccatccttcaaatgtttttttcaaaagatttcctaattgtcacatgtacaatactgatgaagagtttgtgagactaacaatgaaagctttggcagaagaacctatcccactgtcagatgatttgcggcatgaactttcctgggaggcagcaacagaaagatttattagggttgctgatattgcaccaactgtgcctgtgggacaaccaccaccctcctcacagcatttcatgcgcatctccccagatgaactgcagaagaacatggaagaggcatcggcatttttccataatacaatctctgggtttgaagctgtgcgttgtgtgttcggtgcaataccaaacacactgcagccggatgaacagcaatgcaaggaacttgggtggaatttgcagggatagcattagcttttcttgcgatgctgttgccatggaccatagaatgaaccagtctaactcaacggcaaaaagatgtgtcgctcggagaggttctcagattgatcaaacatacattctatgtggtgttctggtgtggcggcactgcattttttcttcatatatcaaaggcgttctgaagttcctggatgcatcgtatcttctgattgttaatcttaagcagtctgaagtgcacactagtattacagtctcatatatgtggactgtttttcatcgtgttgtttcccaggattgacgcgtgtgttgaaaatcttattgtataataatatgccccttgttttcgcagccatccatgctgaaacttttactacaccgcctaaaatctgtgtgctagttgatactacctgtgttctcgataaataaaaaagaacagaaaaagtaaaaaaaaaaa

SEQ ID NO: 7144 - DNA, 2156 bp, Zea Mays
aaacgcaacccctctcgctctcaagcttcaaaatcccactagcgaaaggaaaacgggagaagctaggaagcagcagccgcggcatttcttccttgagcgttcgccttcggctgctcaacgcgtgcttcgtttcaggagagccttggtggcatctctgtttcatggccgagatctgctgtgaggcggcggcggcggcggcggggtcggaccagaagggggagtgcgccggcagccgcgcggcgcggcggcggaggatggagattcggcggctcagggtggtggccgaggaggcgtccgccaagaggcggagagacatggaggacgcggtgaccgcccgtccggagttcatcaacggccaccacttcttcggggtgttcgacggccacggctgctcacatgtggcgacgtcgtgcggggagcggatgcaccagattgtggccgaggaggcgacagctgccgcaggctcgtcggtttcggacgagaccgcgcggtggaggggtgtcatggagaagagctacgcgaggatggacgccgaggccgtcgtctccagggagaccgccggcccggcgcccacctgccgttgcgagatgcagcttcccaagtgcgaccacgtgggctccactgccgtcgtggccgtggtggggcctcgccacctcgtcgtcgccaactgcggcgactcccgcgcggtcctctccagcggaggcgccacgatccctctctcagctgaccacaagcctgaccgccccgacgagctcgaacggatccacgcagcgggagggcgcgtcatcttctgggacggcgcccgcgtcttcggcatgctcgccatgtcccgagccatcggtgacagctacctgaagccgttcgtgatctccgacccggaggtgctggtggtggagaggaaggacggcgaggacgagttcctgatcctggccagcgacgggctgtgggacgtggtgagcaacgaggtggcgtgcaaggtcgtgcgcacctgcctccggaacagggcgccgcgcggtggccgggagcggtcgagcccgacctccaacctgagccctaggcagagcagcgccagcggcggcagcagcagcagcggggacgaggaggctggtgggcccagcggcgacggcgcggggtccgagagcgacggcgagagcgccgaggacagggcgtgcgccgaggcggccatcctgctgaccaagctagcgctggcgcggcagagcgccgacaacgtcagcgtcgtcgtcatcaacctcaggcggcgcccgcgatcgtgatcggtggtggtggctctgtgatggactagccgttcttggttggtttggttttctggccccctccgtaagttcaaatgggagcccggttcaccttcgcttcggcagagcaatcatcagacaagatgtcaaagcgaagatcgaacaaaatgtgagatccttagcaaaattgcatgctacttccttttacagtagtacagcaggactattgtttcgttagcgtttttttatgggtgggttgaggggtgcgtttctgatctggtcggacagatcatcccgcctttcttcccccggtaaattctccaaatagaaaagcgcatgcgtctccgatgtttgaagaaactttaccgtgcgtccgagagatttaattgtaatatatagtccagtgcccctttcactagccaaatgcccaaatccttccaaccttctctgactaagatcgtgatgtgctcctccggttccgtgtttcatgttttatataaataaatttgacccaccatgattgtccagaacgcgttcggcgacgctgcgtcagctgcgcaaccctggatacaatatcccgggggacggatgttttcttggtggcgtcccgtgtcctccaaagttttttcattaacttccagatgagatggaacacacgcacagaacaaacatgacagtgtttcctgccggctcgttcgtcgctgaaaagtccgtcggtccttgctcctttccctgtggcctgtggtgtgctggtggtggtggtgggtgagccgtgcagcagggagtcaacagacagacaaccccgggctgccgcctaataatcatggcggacacgaggcacgcatccaccccaccccatgctacgacctgaccacgacgtcgcgtcgaggaaccccccaaaac

SEQ ID NO: 7145 - DNA, 887 bp, Zea Mays
cttggagatagcattatcggcgcatgtccacgttgattcatcaatcagttccacaatccacttgcctcggccgctatcgtgaccgggaacaacaactgcgagatggccacggtggagacctcgggcacggcgatagggtcctccgggagatgggcactacacggcaagacagccctcgtcaccggcggcacccgcggcatcgggtaaacaatgtaggaacaaacataaggaaaccaactactgagtttactgcagaggaatactcgtttctgatggctactaatcttgaatctgcatatcacttgtgccaaattgcacatcctcttttgaaattatctgggtcaggcagcattatattcatatcatctgttgctggagcgataggaatctttagtggaactatatatgctatgactaaaggtgccattaaccagctaaccaagaatttagcttgtgaatgggctaaggacaacataagagccaactctgtcgctccgtggtacatcaccacttcacttacggaaggaattttggcaaataagaactttgaggaacaagttgtgagtcgaactccgcttggacgtgtcggagaacctggagaagtatcggcacttgttgcttttctttgcatgccgggttccacttatattagcggccagacgattgcggtcgacggaggtatgactgtgaacgggttttaccctcccaagccctaggcggcagctgccatgtttctttgtgctgaggaaacgacaatagctgttgttcttggttgttgagaaaaaaaatctaataaaatgtatgtaaaggtaaggttgtcatgttgatactgttcattacattacataattctatcagggcaatgtgaagaacgttgtgtttagatc

SEQ ID NO: 7146 - DNA, 2912 bp, Zea Mays
cctgtatcaccccacctcgtctcgtcgcctaccctcccaacccgcattcgcggcgcgggcgccttggaaccctagtcacccgcgccccccctccactgtccactcaacccccgtcccctccctcggcggcggcggcatcggcgtcaaccaagatgtcgggcggcttcttccgggggacgtccgctgaccaggacacgcgcttctcgaataagcaagccaagctgctcaagacgcaaaagttcgcgcccgagcttgaccatctggtggatacgtcaaaggtaaagatggacgtgatgaagccctggattgctaagcgggtcactgagctccttgggttcgaggacgaagttctcatcaacttcatttatggcctcctcgaggagaaggaagccgatggaaagaagattcagatccagctgacagggttcatggagaagaacacagtgaagttcatgagggagctctggaccctccttctcagtgcacagcagaatgccagtggggtgcctcaacagtttctggatgaaaaagaggctgagatacagcagaaaaaggcagaggatgataggattgcacaggagattcaaaagaagcgagagatggaggaaaatgattcagaactggtaaagaacaaagtgatggatggggatgctggtaactcaagatcctatggcgatccagttggctctgctttaaatagtacaaatttcaataccgaggaagaaaagaacaatgatttcaagcgtagcttaagagcaaagaacaggggaagtcgcagatccaggagcatatctttgtcgccacgtgctaggcaaagatccatctctcctagaaataattctcgttctcctcctaggcgttcccactctattgatagacaccatagatcatcatggcgttcaacttcacctagacgttctatttctccccgaaggcattctccaagaagtaccccttcaatttctagaaggagatcaccttactcaaggagagggtcgccttccttgtcaagatatccatccccatttacacgccggagatctcctcttcgcagaaaatcaccatcatctgggccactaaggtcactttctcctcgccatcgccgctcaccagctcgtgtaccaaggaggtcaccatctcctgcaagtcgaaggtctcctgttcgacgcagattctcaccaggtagacgtacatctccatctccagtaaggcgcaggccaaggtctccatcacctgggaggcgtaggccaaggtctccatcacctgggaggcgtaggccaaggtccccatccccaagaaggcgtaggccaaggtccccatccccaggaaggcgcaggccacggtccccatccccaggaaggcgcaggctacggtccccatctccaggaaggcgcaggccacggtccccatccccaggaaggcgcaggccacggtccccatccccaggaaggcgcaggccacggtccccatccccaggaagacgcagacctttatcgccagagggaaggaggagtaccagtccgtacaatagcaggagtcctaatcgctctcgccagagtttaagtaaagatactgagaaagaaacaaatggcaccccttccgttaaggacagagttgtgcactcaagggggcaagaacaaaaatcagatgataataatagggatggtgcaaggattgttggcaataattccccagattctgagcatagattgtcaaagtccttgaggcctcctaactatgaagaaaggaattccacacgtgacagttcttacaagaactcagacaaacctatacctagtcagggcagcacagatacaagtggagatgaggaacacagtcgtgctagagaaaatgcccggaaagcaaattcatgtcgtaggaaaacaaaggatctctcggcaggtctgcaacctaagaaaatcagtgctggtgactcaagccccagagacaaatctccattcattttacaacagagtggcaaggtcgtccaaaagaaacaccccgatcaattgtcagaatcatcagaagatgagcttgctggtagaagaacaaagcatcaaactgattcacctgatgattctcgtcgaaaacagcattccccgactagaattgaaaatgatgagtcttattcaaagggtggtagaaacagtgagcatgtcatgagaggtttgcgtgatgattctgatgatgctattgatacaaagaaatatttgtctaaagtcaatgaggactcccaatcggacgatggaagtcctttgaaaaaaactaagaaaaaaacagatggtaataggcacattgattctggtagttcagggtctgaagagcctgacaaacatagaacccactcggagaagcgaaggcacaagaaaactcataagcataagaaacagtatgatgatagttccgagtctgattctgagccagatggcaaagacgcaaagaggaggaggaggaaggaagagaagaggctaagaaaagaggaaagacgtcgaagacgtgaagaacgacaccgcagaagggcagaacgccatgccagcaaacgaaaattaaagaacaccgatactgttacaatgccttcagactctgagaaggatcgggattctgattcagatggtgatgttaggaaaagagtttcaaacgctggaagagaagagtctgatcagaagaaactagaaattgaactccttgatctgatgattcctgagctgtttacttgatgcagctgaattcaggcttagcagccagttatctgattagctccatgtgcacaagctttttatgttcctcaggatgatatgatcaacgcctcaacaaaaacaagttggtaacatattgattggaaaatctgctaaagcattccttcttagtttcaggcgctggaaatttctggtgtgatgtcacgttaactcgct

SEQ ID NO: 7147 - DNA, 3042 bp, Zea Mays
gcccctgtatcaccccacctcgtctcgtcgcctaccctcccaacccgcattcgcggcgcgggcgccttggaaccctagtcacccgcgccccccctccactgtccactcaacccccgtcccctccctcggcggcggcggcatcggcgtcaaccaagatgtcgggcggcttcttccgggggacgtccgctgaccaggacacgcgcttctcgaataagcaagccaagctgctcaagacgcaaaagttcgcgcccgagcttgaccatctggtggatacgtcaaaggtaaagatggacgtgatgaagccctggattgctaagcgggtcactgagctccttgggttcgaggacgaagttctcatcaacttcatttatggcctcctcgaggagaaggaagccgatggaaagaagattcagatccagctgacagggttcatggagaagaacacagtgaagttcatgagggagctctggaccctccttctcagtgcacagcagaatgccagtggggtgcctcaacagtttctggatgaaaaagaggctgagatacagcagaaaaaggcagaggatgataggattgcacaggagattcaaaagaagcgagagatggaggaaaatgattcagaactggatggggatgctggtaactcaagatcctatggcgatccagttggctctgctttaaatagtacaaatttcaataccgaggaagaaaagaacaatgatttcaagcgtagcttaagagcaaagaacaggggaagtcgcagatccaggagcatatctttgtcgccacgtgctaggcaaagatccatctctcctagaaataattctcgttctcctcctaggcgttcccactctattgatagacaccatagatcatcatggcgttcaacttcacctagacgttctatttctccccgaaggcattctccaagaagtaccccttcaatttctagaaggagatcaccttactcaaggagagggtcgccttccttgtcaagatatccatccccatttacacgccggagatctcctcttcgcagaaaatcaccatcatctgggccactaaggtcactttctcctcgccatcgccgctcaccagctcgtgtaccaaggaggtcaccatctcctgcaagtcgaaggtctcctgttcgacgcagattctcaccaggtagacgtacatctccatctccagtaaggcgcaggccaaggtctccatcacctgggaggcgtaggccaaggtctccatcacctgggaggcgtaggccaaggtccccatccccaagaaggcgtaggccaaggtccccatccccaggaaggcgcaggccacggtccccatccccaggaaggcgcaggctacggtccccatctccaggaaggcgcaggccacggtccccatccccaggaaggcgcaggccacggtccccatccccaggaaggcgcaggccacggtccccatccccaggaagacgcagacctttatcgccagagggaaggaggagtaccagtccgtacaatagcaggagtcctaatcgctctcgccagagtttaagtaaagatactgagaaagaaacaaatggcaccccttccgttaaggacagagttgtgcactcaagggggcaagaacaaaaatcagatgataataatagggatggtgcaaggattgttggcaataattccccagattctgagcatagattgtcaaagtccttgaggcctcctaactatgaagaaaggaattccacacgtgacagttcttacaagaactcagacaaacctatacctagtcagggcagcacagatacaagtggagatgaggaacacagtcgtgctagagaaaatgcccggaaagcaaattcatgtcgtaggaaaacaaaggatctctcggcaggtctgcaacctaagaaaatcagtgctggtgactcaagccccagagacaaatctccattcattttacaacagagtggcaaggtcgtccaaaagaaacaccccgatcaattgtcagaatcatcagaagatgagcttgctggtagaagaacaaagcatcaaactgattcacctgatgattctcgtcgaaaacagcattccccgactagaattgaaaatgatgagtcttattcaaagggtggtagaaacagtgagcatgtcatgagaggtttgcgtgatgattctgatgatgctattgatacaaagaaatatttgtctaaagtcaatgaggactcccaatcggacgatggaagtcctttgaaaaaaactaagaaaaaaacagatggtaataggcacattgattctggtagttcagggtctgaagagcctgacaaacatagaacccactcggagaagcgaaggcacaagaaaactcataagcataagaaacagtatgatgatagttccgagtctgattctgagccagatggcaaagacgcaaagaggaggaggaggaaggaagagaagaggctaagaaaagaggaaagacgtcgaagacgtgaagaacgacaccgcagaagggcagaacgccatgccagcaaacgaaaattaaagaacaccgatactgttacaatgccttcagactctgagaaggatcgggattctgattcagatggtgatgttaggaaaagagtttcaaacgctggaagagaagagtctgatcagaagaaactagaaattgaactccgtgagaaggcccttgaatctcttagagcaaagaaagccatcaacaactagactgagaatttttttgtgacacatttgagtttctattttcaagtggaagtgtccttatatgatactatttaatgttctgtgtgtttatgtggcagttgatctgatgattcctgagctgtttacttgatgcagctgaattcaggcttagcagccagttatctgattagctccatgtgcacaagctttttatgttcctcaggatgatatgatcaacgcctcaacaaaaacaagttggtaacatattgattggaaaatctgctaaagcattccttcttagtttcaggcgctggaaatttctggtgtgatgtcacgttaactcgct

SEQ ID NO: 7148 - DNA, 3089 bp, Zea Mays
gtatcaccccacctcgtctcgtcgcctaccctcccaacccgcattcgcggcgcgggcgccttggaaccctagtcacccgcgccccccctccactgtccactcaacccccgtcccctccctcggcggcggcggcatcggcgtcaaccaagatgtcgggcggcttcttccgggggacgtccgctgaccaggacacgcgcttctcgaataagcaagccaagctgctcaagacgcaaaagttcgcgcccgagcttgaccatctggtggatacgtcaaaggtaaagatggacgtgatgaagccctggattgctaagcgggtcactgagctccttgggttcgaggacgaagttctcatcaacttcatttatggcctcctcgaggagaaggaagccgatggaaagaagattcagatccagctgacagggttcatggagaagaacacagtgaagttcatgagggagctctggaccctccttctcagtgcacagcagaatgccagtggggtgcctcaacagtttctggatgaaaaagaggctgagatacagcagaaaaaggcagaggatgataggattgcacaggagattcaaaagaagcgagagatggaggaaaatgattcagaactggatggggatgctggtaactcaagatcctatggcgatccagttggctctgctttaaatagtacaaatttcaataccgaggaagaaaagaacaatgatttcaagcgtagcttaagagcaaagaacaggggaagtcgcagatccaggagcatatctttgtcgccacgtgctaggcaaagatccatctctcctagaaataattctcgttctcctcctaggcgttcccactctattgatagacaccatagatcatcatggcgttcaacttcacctagacgttctatttctccccgaaggcattctccaagaagtaccccttcaatttctagaaggagatcaccttactcaaggagagggtcgccttccttgtcaagatatccatccccatttacacgccggagatctcctcttcgcagaaaatcaccatcatctgggccactaaggtcactttctcctcgccatcgccgctcaccagctcgtgtaccaaggaggtcaccatctcctgcaagtcgaaggtctcctgttcgacgcagattctcaccaggtagacgtacatctccatctccagtaaggcgcaggccaaggtctccatcacctgggaggcgtaggccaaggtctccatcacctgggaggcgtaggccaaggtccccatccccaagaaggcgtaggccaaggtccccatccccaggaaggcgcaggccacggtccccatccccaggaaggcgcaggccacggtccccatccccaggaaggcgcaggccacggtccccatccccaggaaggcgcaggccacggtccccatccccaggaagacgcagaccacgatccccatcgcctggaaggcgcaggccatggtctcggtctccaataagacgtcagtccccatctccaaaacgccagaggacatcaccaagttcaccgaagactcgttctgcaaatcgacctttatcgccagagggaaggagtccgtacaatagcaggagtcctaatcgctctcgccagagtttaagtaaagatactgagaaagaaacaaatggcaccccttccgttaaggacagagttgtgcactcaagggggcaagaacaaaaatcagatgataataatagggatggtgcaaggattgttggcaataattccccagattctgagcatagattgtcaaagtccttgaggcctcctaactatgaagaaaggaattccacacgtgacagttcttacaagaactcagacaaacctatacctagtcagggcagcacagatacaagtggagatgaggaacacagtcgtgctagagaaaatgcccggaaagcaaattcatgtcgtaggaaaacaaaggatctctcggcaggtctgcaacctaagaaaatcagtgctggtgactcaagccccagagacaaatctccattcattttacaacagagtggcaaggtcgtccaaaagaaacaccccgatcaattgtcagaatcatcagaagatgagcttgctggtagaagaacaaagcatcaaactgattcacctgatgattctcgtcgaaaacagcattccccgactagaattgaaaatgatgagtcttattcaaagggtggtagaaacagtgagcatgtcatgagaggtttgcgtgatgattctgatgatgctattgatacaaagaaatatttgtctaaagtcaatgaggactcccaatcggacgatggaagtcctttgaaaaaaactaagaaaaaaacagatggtaataggcacattgattctggtagttcagggtctgaagagcctgacaaacatagaacccactcggagaagcgaaggcacaagaaaactcataagcataagaaacagtatgatgatagttccgagtctgattctgagccagatggcaaagacgcaaagaggaggaggaggaaggaagagaagaggctaagaaaagaggaaagacgtcgaagacgtgaagaacgacaccgcagaagggcagaacgccatgccagcaaacgaaaattaaagaacaccgatactgttacaatgccttcagactctgagaaggatcgggattctgattcagatggtgatgttaggaaaagagtttcaaacgctggaagagaagagtctgatcagaagaaactagaaattgaactccgtgagaaggcccttgaatctcttagagcaaagaaagccatcaacaactagactgagaatttttttgtgacacatttgagtttctattttcaagtggaagtgtccttatatgatactatttaatgttctgtgtgtttatgtggcagttgatctgatgattcctgagctgtttacttgatgcagctgaattcaggcttagcagccagttatctgattagctccatgtgcacaagctttttatgttcctcaggatgatatgatcaacgcctcaacaaaaacaagttggtaacatattgattggaaaatctgctaaagcattccttcttagtttcagtaaaattt

SEQ ID NO: 7149 - DNA, 3104 bp, Zea Mays
cctgtatcaccccacctcgtctcgtcgcctaccctcccaacccgcattcgcggcgcgggcgccttggaaccctagtcacccgcgccccccctccactgtccactcaacccccgtcccctccctcggcggcggcggcatcggcgtcaaccaagatgtcgggcggcttcttccgggggacgtccgctgaccaggacacgcgcttctcgaataagcaagccaagctgctcaagacgcaaaagttcgcgcccgagcttgaccatctggtggatacgtcaaaggtaaagatggacgtgatgaagccctggattgctaagcgggtcactgagctccttgggttcgaggacgaagttctcatcaacttcatttatggcctcctcgaggagaaggaagccgatggaaagaagattcagatccagctgacagggttcatggagaagaacacagtgaagttcatgagggagctctggaccctccttctcagtgcacagcagaatgccagtggggtgcctcaacagtttctggatgaaaaagaggctgagatacagcagaaaaaggcagaggatgataggattgcacaggagattcaaaagaagcgagagatggaggaaaatgattcagaactggtaaagaacaaagtgatggatggggatgctggtaactcaagatcctatggcgatccagttggctctgctttaaatagtacaaatttcaataccgaggaagaaaagaacaatgatttcaagcgtagcttaagagcaaagaacaggggaagtcgcagatccaggagcatatctttgtcgccacgtgctaggcaaagatccatctctcctagaaataattctcgttctcctcctaggcgttcccactctattgatagacaccatagatcatcatggcgttcaacttcacctagacgttctatttctccccgaaggcattctccaagaagtaccccttcaatttctagaaggagatcaccttactcaaggagagggtcgccttccttgtcaagatatccatccccatttacacgccggagatctcctcttcgcagaaaatcaccatcatctgggccactaaggtcactttctcctcgccatcgccgctcaccagctcgtgtaccaaggaggtcaccatctcctgcaagtcgaaggtctcctgttcgacgcagattctcaccaggtagacgtacatctccatctccagtaaggcgcaggccaaggtctccatcacctgggaggcgtaggccaaggtctccatcacctgggaggcgtaggccaaggtccccatccccaagaaggcgtaggccaaggtccccatccccaggaaggcgcaggccacggtccccatccccaggaaggcgcaggctacggtccccatctccaggaaggcgcaggccacggtccccatccccaggaaggcgcaggccacggtccccatccccaggaaggcgcaggccacggtccccatccccaggaagacgcagacctttatcgccagagggaaggaggagtaccagtccgtacaatagcaggagtcctaatcgctctcgccagagtttaagtaaagatactgagaaagaaacaaatggcaccccttccgttaaggacagagttgtgcactcaagggggcaagaacaaaaatcagatgataataatagggatggtgcaaggattgttggcaataattccccagattctgagcatagattgtcaaagtccttgaggcctcctaactatgaagaaaggaattccacacgtgacagttcttacaagaactcagacaaacctatacctagtcagggcagcacagatacaagtggagatgaggaacacagtcgtgctagagaaaatgcccggaaagcaaattcatgtcgtaggaaaacaaaggatctctcggcaggtctgcaacctaagaaaatcagtgctggtgactcaagccccagagacaaatctccattcattttacaacagagtggcaaggtcgtccaaaagaaacaccccgatcaattgtcagaatcatcagaagatgagcttgctggtagaagaacaaagcatcaaactgattcacctgatgattctcgtcgaaaacagcattccccgactagaattgaaaatgatgagtcttattcaaagggtggtagaaacagtgagcatgtcatgagaggtttgcgtgatgattctgatgatgctattgatacaaagaaatatttgtctaaagtcaatgaggactcccaatcggacgatggaagtcctttgaaaaaaactaagaaaaaaacagatggtaataggcacattgattctggtagttcagggtctgaagagcctgacaaacatagaacccactcggagaagcgaaggcacaagaaaactcataagcataagaaacagtatgatgatagttccgagtctgattctgagccagatggcaaagacgcaaagaggaggaggaggaaggaagagaagaggctaagaaaagaggaaagacgtcgaagacgtgaagaacgacaccgcagaagggcagaacgccatgccagcaaacgaaaattaaagaacaccgatactgttacaatgccttcagactctgagaaggatcgggattctgattcagatggtgatgttaggaaaagagtttcaaacgctggaagagaagagtctgatcagaagaaactagaaattgaactccgtgagaaggcccttgaatctcttagagcaaagaaagccatcaacaactagactgagaatttttttgtgacacatttgagtttctattttcaagtggaagtgtccttatatgatactatttaatgttctgtgtgtttatgtggcagttgatctgatgattcctgagctgtttacttgatgcagctgaattcaggcttagcagccagttatctgattagctccatgtgcacaagctttttatgttcctcaggatgatatgatcaacgcctcaacaaaaacaagttggtaacatattgattggaaaatctgctaaagcattccttcttagtttcagtaacttatttatgatattgactgaagaaaaagaaatcctgtgccaccttctttcacatatggaatcagcaaaccagctggtgattt

SEQ ID NO: 7150 - DNA, 2931 bp, Zea Mays
ggttattcaagtgcagcaatgttgtttgtatatactgttcttattgaattgtgcatgcatgttgctcggcaggaagccgatggaaagaagattcagatccagctgacagggttcatggagaagaacacagtgaagttcatgagggagctctggaccctccttctcagtgcacagcagaatgccagtggggtgcctcaacagtttctggatgaaaaagaggctgagatacagcagaaaaaggcagaggatgataggattgcacaggagattcaaaagaagcgagagatggaggaaaatgattcagaactggtaaagaacaaagtgatgataacttctccgataatttgggttcatatcgttatttacctcaactgctgtaggatggggatgctggtaactcaagatcctatggcgatccagttggctctgctttaaatagtacaaatttcaataccgaggaagaaaagaacaatgatttcaagcgtagcttaagagcaaagaacaggggaagtcgcagatccaggagcatatctttgtcgccacgtgctaggcaaagatccatctctcctagaaataattctcgttctcctcctaggcgttcccactctattgatagacaccatagatcatcatggcgttcaacttcacctagacgttctatttctccccgaaggcattctccaagaagtaccccttcaatttctagaaggagatcaccttactcaaggagagggtcgccttccttgtcaagatatccatccccatttacacgccggagatctcctcttcgcagaaaatcaccatcatctgggccactaaggtcactttctcctcgccatcgccgctcaccagctcgtgtaccaaggaggtcaccatctcctgcaagtcgaaggtctcctgttcgacgcagattctcaccaggtagacgtacatctccatctccagtaaggcgcaggccaaggtctccatcacctgggaggcgtaggccaaggtctccatcacctgggaggcgtaggccaaggtccccatccccaagaaggcgtaggccaaggtccccatccccaggaaggcgcaggccacggtccccatccccaggaaggcgcaggctacggtccccatctccaggaaggcgcaggccacggtccccatccccaggaaggcgcaggccacggtccccatccccaggaaggcgcaggccacggtccccatccccaggaagacgcagaccacgatccccatcgcctggaaggcgcaggccatggtctcggtctccaataagacgtcagtccccatctccaaaacgccagaggacatcaccaagttcaccgaagactcgttctgcaaatcgacctttatcgccagagggaaggaggagtaccagtccgtacaatagcaggagtcctaatcgctctcgccagagtttaagtaaagatactgagaaagaaacaaatggcaccccttccgttaaggacagagttgtgcactcaagggggcaagaacaaaaatcagatgataataatagggatggtgcaaggattgttggcaataattccccagattctgagcatagattgtcaaagtccttgaggcctcctaactatgaagaaaggaattccacacgtgacagttcttacaagaactcagacaaacctatacctagtcagggcagcacagatacaagtggagatgaggaacacagtcgtgctagagaaaatgcccggaaagcaaattcatgtcgtaggaaaacaaaggatctctcggcaggtctgcaacctaagaaaatcagtgctggtgactcaagccccagagacaaatctccattcattttacaacagagtggcaaggtcgtccaaaagaaacaccccgatcaattgtcagaatcatcagaagatgagcttgctggtagaagaacaaagcatcaaactgattcacctgatgattctcgtcgaaaacagcattccccgactagaattgaaaatgatgagtcttattcaaagggtggtagaaacagtgagcatgtcatgagaggtttgcgtgatgattctgatgatgctattgatacaaagaaatatttgtctaaagtcaatgaggactcccaatcggacgatggaagtcctttgaaaaaaactaagaaaaaaacagatggtaataggcacattgattctggtagttcagggtctgaagagcctgacaaacatagaacccactcggagaagcgaaggcacaagaaaactcataagcataagaaacagtatgatgatagttccgagtctgattctgagccagatggcaaagacgcaaagaggaggaggaggaaggaagagaagaggctaagaaaagaggaaagacgtcgaagacgtgaagaacgacaccgcagaagggcagaacgccatgccagcaaacgaaaattaaagaacaccgatactgttacaatgccttcagactctgagaaggatcgggattctgattcagatggtgatgttaggaaaagagtttcaaacgctggaagagaagagtctgatcagaagaaactagaaattgaactccgtgagaaggcccttgaatctcttagagcaaagaaagccatcaacaactagactgagaatttttttgtgacacatttgagtttctattttcaagtggaagtgtccttatatgatactatttaatgttctgtgtgtttatgtggcagttgatctgatgattcctgagctgtttacttgatgcagctgaattcaggcttagcagccagttatctggtaatgtttgcttctacagatttgtacgcgaaccataaccctgaaaaggatatgttttgttatgtgagcatctgcttccttttttttcattgtgtgaaatgatattctcatgtttctttactagtgtatgatgttgtgttatcgcatacgctgttaaaaaataaccttgcac

SEQ ID NO: 7151 - DNA, 3069 bp, Zea Mays
gtatcaccccacctcgtctcgtcgcctaccctcccaacccgcattcgcggcgcgggcgccttggaaccctagtcacccgcgccccccctccactgtccactcaacccccgtcccctccctcggcggcggcggcatcggcgtcaaccaagatgtcgggcggcttcttccgggggacgtccgctgaccaggacacgcgcttctcgaataagcaagccaagctgctcaagacgcaaaagttcgcgcccgagcttgaccatctggtggatacgtcaaaggtaaagatggacgtgatgaagccctggattgctaagcgggtcactgagctccttgggttcgaggacgaagttctcatcaacttcatttatggcctcctcgaggagaaggaagccgatggaaagaagattcagatccagctgacagggttcatggagaagaacacagtgaagttcatgagggagctctggaccctccttctcagtgcacagcagaatgccagtggggtgcctcaacagtttctggatgaaaaagaggctgagatacagcagaaaaaggcagaggatgataggattgcacaggagattcaaaagaagcgagagatggaggaaaatgattcagaactggtaaagaacaaagtgatggatggggatgctggtaactcaagatcctatggcgatccagttggctctgctttaaatagtacaaatttcaataccgaggaagaaaagaacaatgatttcaagcgtagcttaagagcaaagaacaggggaagtcgcagatccaggagcatatctttgtcgccacgtgctaggcaaagatccatctctcctagaaataattctcgttctcctcctaggcgttcccactctattgatagacaccatagatcatcatggcgttcaacttcacctagacgttctatttctccccgaaggcattctccaagaagtaccccttcaatttctagaaggagatcaccttactcaaggagagggtcgccttccttgtcaagatatccatccccatttacacgccggagatctcctcttcgcagaaaatcaccatcatctgggccactaaggtcactttctcctcgccatcgccgctcaccagctcgtgtaccaaggaggtcaccatctcctgcaagtcgaaggtctcctgttcgacgcagattctcaccaggtagacgtacatctccatctccagtaaggcgcaggccaaggtctccatcacctgggaggcgtaggccaaggtctccatcacctgggaggcgtaggccaaggtccccatccccaagaaggcgtaggccaaggtccccatccccaggaaggcgcaggccacggtccccatccccaggaaggcgcaggctacggtccccatctccaggaaggcgcaggccatggtctcggtctccaataagacgtcagtccccatctccaaaacgccagaggacatcaccaagttcaccgaagactcgttctgcaaatcgacctttatcgccagagggaaggaggagtaccagtccgtacaatagcaggagtcctaatcgctctcgccagagtttaagtaaagatactgagaaagaaacaaatggcaccccttccgttaaggacagagttgtgcactcaagggggcaagaacaaaaatcagatgataataatagggatggtgcaaggattgttggcaataattccccagattctgagcatagattgtcaaagtccttgaggcctcctaactatgaagaaaggaattccacacgtgacagttcttacaagaactcagacaaacctatacctagtcagggcagcacagatacaagtggagatgaggaacacagtcgtgctagagaaaatgcccggaaagcaaattcatgtcgtaggaaaacaaaggatctctcggcaggtctgcaacctaagaaaatcagtgctggtgactcaagccccagagacaaatctccattcattttacaacagagtggcaaggtcgtccaaaagaaacaccccgatcaattgtcagaatcatcagaagatgagcttgctggtagaagaacaaagcatcaaactgattcacctgatgattctcgtcgaaaacagcattccccgactagaattgaaaatgatgagtcttattcaaagggtggtagaaacagtgagcatgtcatgagaggtttgcgtgatgattctgatgatgctattgatacaaagaaatatttgtctaaagtcaatgaggactcccaatcggacgatggaagtcctttgaaaaaaactaagaaaaaaacagatggtaataggcacattgattctggtagttcagggtctgaagagcctgacaaacatagaacccactcggagaagcgaaggcacaagaaaactcataagcataagaaacagtatgatgatagttccgagtctgattctgagccagatggcaaagacgcaaagaggaggaggaggaaggaagagaagaggctaagaaaagaggaaagacgtcgaagacgtgaagaacgacaccgcagaagggcagaacgccatgccagcaaacgaaaattaaagaacaccgatactgttacaatgccttcagactctgagaaggatcgggattctgattcagatggtgatgttaggaaaagagtttcaaacgctggaagagaagagtctgatcagaagaaactagaaattgaactccgtgagaaggcccttgaatctcttagagcaaagaaagccatcaacaactagactgagaatttttttgtgacacatttgagtttctattttcaagtggaagtgtccttatatgatactatttaatgttctgtgtgtttatgtggcagttgatctgatgattcctgagctgtttacttgatgcagctgaattcaggcttagcagccagttatctggtaatgtttgcttctacagatttgtacgcgaaccataaccctgaaaaggatatgttttgttatgtgagcatctgcttccttttttttcattgtgtgaaatgatattctcatgtttctttactagtgtatgatgttgtgttatcgcatacgctgttaaaaaataaccttgcac

SEQ ID NO: 7152 - DNA, 460 bp, Zea Mays
atgggaacgacgtgcttaccgctgccgagcggaagcctgcaagagcgcgacggcgaggcccttcctcccccgaacgttgtcctgctgatcgtccgacgttccgcccatcgatccatgctggtctgtgccgtctcgctaagatccggctcggcggtgaccttcaagctccagacctccagcctggcggccttgccccgcccccggcacggtgcacgacggatatggctgctgctttctctgggccattcccgcgcgtctctctagagcgtggcagtgctggtgggttcgtcgtgccatggccatggatacccagctgtaaataagaagtaccgggatgttacttggttattaggggtacacagcacactgatagctactagcgtacatgaagaaatctttcgcaaggcatcagaaacgtatatatgctagtgttgcactatccaagcaaggcagaagcaca

SEQ ID NO: 7153 - DNA, 3616 bp, Zea Mays
caagagtcatcatcatcatcgcttcccaatatccagaagtgtaagtatctcgcgtcgccgcgatcgaacacacacatcaccagctttgggagccgctgagagaaaccggacgcgcggtggtttgctttcgccggaagcgccgtcggattaagaagcataaagggaggaggacagatggcgggggatcggctgagctgggcggggctgctcaaatggagcctctcctacgtcgacggggcgggaccctctcgcgccgtcagagaggaggagcggcggtggctggcggacgcggtggagcagcacatgatgatggacgtggtgagccggatgagggagattgcgctgctcatgagcaccccgcccgccgtcctggaggcgcagggcatcacccacgacgacatcgaagatttgctgagtgagctgcaggtgcatgttgagtctatcgacatggcaaatggtggctaaacaaatggatggaggcaactatagtggtatttggcaatagaacattgttattcagatttgcattctgttggtgggttggttccagttatcaagtacctcagaaattctaatgctcgtatccgagcgaaggcagctgatgtggtaacaacagtggttcagaacaatccgaccagccagcagttggtcatggaagctagtgggtttgaacctctcttatccaatttcagatcagatcctgaccttactgctcggataaaagctcttggtgcactatcttctctgattcgaaacaacaaaccaggagtttctgcatttcgtttagccaacggatatagtggactaagagatgcattgaattcagaaagtgcaaggtttcagaggaaagcattgagtctgactcactatctgctcagcgaaagccattcagattgttcagtatttgcacagttaggtttcccccaccttatgatgcgtttggcatccagcgatgactccggtgttcgagaggcagcattagggggcttgcttgagcttgcaagggacacgacacttggaaataggaatctactagcagaacatgacaggttacgaaggcttctccgtggacgtatggaaagcataaggacgatgactcctgaagatttggatgctgcacgagaagagcggcagcttgttgactcactttggatcacatgctaccatgaaccctccatgctccgcaatgaagggctccttgttctgcctggggaggaatcctttgagcaacctcctgatgtggctggtagattgttcgagccaatgcgccgagcttctgctaggagggcaccccctgctgagagatcagacccaagggatgaaactgggggaggaatggttttgcttttaggtggtccagcacaagatggtagatcaaactcccccaatcactgatctttctgggcggtgaggccgtgcgttaggaatggagaaatgaagcaaaccgtactgctgccttgtaataattatataagttgcttcgaacaacattatgtaatgtgtaattaggatttagggacctggcatccagtctcaaataagtaaatactacgttgtgtttatgcttgtatagtattagtggctcccaatcatgttatatacttgtacatgtgtttgttcgacgttgagtaaacagtgtgaatgctaaacattacatccattaaatctaagtagcacaacatttctactttcatggtagcatcaaatagaccaacacatgcatttgtaggaaactcttggatgtttgcttctgcaaatctgggcaactatgaatctgtgatcaatcaattctgttcctttgatctcagaccatatatcgctctcgattatgtagactcactctaaccagctgcagccatgcagcttcttcatgcgccgtctctttgccagcctcttcatcttcataacatcatcttgtctgcctacacttgccagcgagtccgagagtaggaggcaacttgctgcattggccggctcgacggttagcaggtgggacgcagccagctcggcaagcttgatgtcgccatggctccggcatgcccccagcaacgccccccaaacgaagcagtcaggccccaggggcatggctttgatgaaatcataagcctcggcgagccagccggctcggccaagcaaatgcaccatgcatgcacaatgctccagcctcggctcgatgccgtgttcttcctgcatggcgcggtacaggcccttcccgagctccaccatgccggcgtagctgcaaaccgtcagagcggcggtgaacgtcaggtgatccggccttgctccgtcgcacagcatccggttgaagagaccgatggcttcttggcagtgaccggaattcgccagcccgaagatcatggaattccatgtcaccgtgcttctttccgacatcttgtcaaacagcctgcgggcttcgaccacaaacccgctcttcgtgtacatatctactagagcactgctcacattgagctcctgttcgacgccggtcaccacggcgtaggcgtggacttccttgccacgcttcacgtcagcaacattggcgaacgcaggcaggatgctggcaatcgtggccgagctcggcaggacagggttggcagtggtcatcattctccggaacagcacgcgcgccctggcatactggaagttcagcaccgagccggatacaagcgatgtccaagtgaccacgtccggctggaacccgtccacctccatggcgccgaccaattttgtggccatttggtcgtcgccggccagtgcaaaaccggagacgacggcgttccatgtcaccaggtcggggcacaggcactggccccgcattttgatagccagcaccagtgcgcgctccgggagggcgtggcgcgcgtagcatgcgaccagcgcgttccaggcgacgaggtcatccctactcggcatttcgtcgaacaccctctgggcactcgcgacaaggccacatttggcgtacatgtcgagaagcgcggtggcggcgacggcgtcggaggcgagggacgggaaccgggtgaggacgagcgcgtggattaggcggccggaagaggcgtttccgaggcgcgcgcaggcgcggagtgccgtggggacggccgcgcggtgcagctctaccacgcccctgtcgccgcgtcgtaggtgggtgaagagaaggtggaggacgcggccgtggcggccttgccgggaagcgttcatcagctgcttcatccatgagctggtggttgtcgtgcgtgcgcacatgagccctacgcctctacctcatctgtcatctcacgttcatgttcatccatgtccatgaatcttagacatggagcttgaagccgatcgaagtgatgcaccttttgcaaacagggatggaggcataaaaaaagtttacgaggaattgaactaaactctgcagtatgtaatctacttctacgttacattgtatatattttagattagaaaaggttacatcgtatatattttagattagagaagctccataagatcggcgtaggggctcgagttcggcccgccgtggacccgtggtaccgagagtagttaactagttattagttggtaaacatgtgacgatcctacagttctaatgttaatccctgatgtattttcttca

SEQ ID NO: 7154 - DNA, 3537 bp, Zea Mays
tggctatacaagagtcatcatcatcatcgcttcccaatatccagaagtgtaagtatctcgcgtcgccgcgatcgaacacacacatcaccagctttgggagccgctgagagaaaccggacgcgcggtggtttgctttcgccggaagcgccgtcggattaagaagcataaagggaggaggacagatggcgggggatcggctgagctgggcggggctgctcaaatggagcctctcctacgtcgacggggcgggaccctctcgcgccgtcagagaggaggagcggcggtggctggcggacgcggtggagcagcacatgatgatggacgtggtgagccggatgagggagattgcgctgctcatgagcaccccgcccgccgtcctggaggcgcagggcatcacccacgacgacatcgaagatttgctgagtgagctgcaggtgcatgttgagtctatcgacatggcaaatgatttgcattctgttggtgggttggttccagttatcaagtacctcagaaattctaatgctcgtatccgagcgaaggcagctgatgtggtaacaacagtggttcagaacaatccgaccagccagcagttggtcatggaagctagtgggtttgaacctctcttatccaatttcagatcagatcctgaccttactgctcggataaaagctcttggtgcactatcttgagtttctgcatttcgtttagccaacggatatagtggactaagagatgcattgaattcagaaagtgcaaggtttcagaggaaagcattgagtctgactcactatctgctcagcgaaagccattcagattgttcagtatttgcacagttaggtttcccccaccttatgatgcgtttggcatccagcgatgactccggtgttcgagaggcagcattagggggcttgcttgagcttgcaagggacacgacacttggaaataggaatctactagcagaacatgacaggttacgaaggcttctccgtggacgtatggaaagcataaggacgatgactcctgaagatttggatgctgcacgagaagagcggcagcttgttgactcactttggatcacatgctaccatgaaccctccatgctccgcaatgaagggctccttgttctgcctggggaggaatcctttgagcaacctcctgatgtggctggtagattgttcgagccaatgcgccgagcttctgctaggagggcaccccctgctgagagatcagacccaagggatgaaactgggggaggaatggttttgcttttaggtggtccagcacaagatggtagatcaaactcccccaatcactgatctttctgggcggtgaggccgtgcgttaggaatggagaaatgaagcaaaccgtactgctgccttgtaataattatataagttgcttcgaacaacattatgtaatgtgtaattaggatttagggacctggcatccagtctcaaataagtaaatactacgttgtgtttatgcttgtatagtattagtggctcccaatcatgttatatacttgtacatgtgtttgttcgacgttgagtaaacagtgtgaatgctaaacattacatccattaaatctaagtagcacaacatttctactttcatggtagcatcaaatagaccaacacatgcatttgtaggaaactcttggatgtttgcttctgcaaatctgggcaactatgaatctgtgatcaatcaattctgttcctttgatctcagaccatatatcgctctcgattatgtagactcactctaaccagctgcagccatgcagcttcttcatgcgccgtctctttgccagcctcttcatcttcataacatcatcttgtctgcctacacttgccagcgagtccgagagtaggaggcaacttgctgcattggccggctcgacggttagcaggtgggacgcagccagctcggcaagcttgatgtcgccatggctccggcatgcccccagcaacgccccccaaacgaagcagtcaggccccaggggcatggctttgatgaaatcataagcctcggcgagccagccggctcggccaagcaaatgcaccatgcatgcacaatgctccagcctcggctcgatgccgtgttcttcctgcatggcgcggtacaggcccttcccgagctccaccatgccggcgtagctgcaaaccgtcagagcggcggtgaacgtcaggtgatccggccttgctccgtcgcacagcatccggttgaagagaccgatggcttcttggcagtgaccggaattcgccagcccgaagatcatggaattccatgtcaccgtgcttctttccgacatcttgtcaaacagcctgcgggcttcgaccacaaacccgctcttcgtgtacatatctactagagcactgctcacattgagctcctgttcgacgccggtcaccacggcgtaggcgtggacttccttgccacgcttcacgtcagcaacattggcgaacgcaggcaggatgctggcaatcgtggccgagctcggcaggacagggttggcagtggtcatcattctccggaacagcacgcgcgccctggcatactggaagttcagcaccgagccggatacaagcgatgtccaagtgaccacgtccggctggaacccgtccacctccatggcgccgaccaattttgtggccatttggtcgtcgccggccagtgcaaaaccggagacgacggcgttccatgtcaccaggtcggggcacaggcactggccccgcattttgatagccagcaccagtgcgcgctccgggagggcgtggcgcgcgtagcatgcgaccagcgcgttccaggcgacgaggtcatccctactcggcatttcgtcgaacaccctctgggcactcgcgacaaggccacatttggcgtacatgtcgagaagcgcggtggcggcgacggcgtcggaggcgagggacgggaaccgggtgaggacgagcgcgtggattaggcggccggaagaggcgtttccgaggcgcgcgcaggcgcggagtgccgtggggacggccgcgcggtgcagctctaccacgcccctgtcgccgcgtcgtaggtgggtgaagagaaggtggaggacgcggccgtggcggccttgccgggaagcgttcatcagctgcttcatccatgagctggtggttgtcgtgcgtgcgcacatgagccctacgcctctacctcatctgtcatctcacgttcatgttcatccatgtccatgaatcttagacatggagcttgaagccgatcgaagtgatgcaccttttgcaaacagggatggaggcataaaaaaagtttacgaggaattgaactaaactctgcagtatgtaatctacttctacgttacattgtatatattttagattagaaaaggttacatcgtatatattttagattagagaagctccataagatcggcgtaggggctcgagttcggcccgccgtggacccgtggtaccgagagtagttaactagttattagttggtaaacatgtgacgatcctacagttctaatgttaatccctgatgtattttcttca

SEQ ID NO: 7155 - DNA, 623 bp, Zea Mays
ctcgaagcagatgatcccctcgaagcagtcctccaggcccagcctcttgagggctctcacggcgtggaccatgtcaccgttggtgaatatctggaacaggttcttgagaatgtgcttgagaatggggtcaggcttgatgttgtcgtacggcagccttccatggacgaaggcgtggtactcatcgtaatcgaagctgtagccgatggcctgggaaatccaaaggaatggggaaaaaaaggtagggcctttttagctcactgattcactaatagaaaaagcaaacaactcaaagcaacagggaagctgcaatacacgtaccctgagtccagccatcgtggtgccgtagttcttgtacagcagattgcccaggttctcgatcttggtctcgtcaatacccagcttctcaaccatgtaatctgaaatgaatggtggcaaaagcgaagagttgcaggcactcagctcactgaacttttagacagtaaaaaaagaagaagcaggcagtaacagcaggagaacaggaacctcaccttcaatgttcttcttgacatggcctgcgatcccggcgctcagcggatacagggtgtcgtcgaggtctgtaggcgagaaccgatcagaaaaaccct

SEQ ID NO: 7156 - DNA, 3057 bp, Zea Mays
gtcgtttccttccttctggcggtcaagtgaagcaacgggaaagctgcttctctcgggtcttccagcaaggttacgtggagtttaccaatgggtctggataatacttatggcgacctatctggcatgttctatggaggcctgtcttatgatggctacacagaccacagcagcgcaagtgattacttcagatttgccgatccacttcctgccactgtgccccagatggcaccagaagcctgttcaaatccttcctccactgtgtcaagggccaatactgaaactgacaacccagaggattgggaattcatctcagatgagtccctcgactatatcagccggatgctcatggaggaggatattgatgagaaagttagcatgtaccaggcggagtcagcagcactgcgtgctgctgcaaagccgttctatgacattcttgggcacaagttcccaccgtctcctgaccgccagctgatctcttggtccatggacagccccagtgagagtagcagtagcatctgcacacaatctgtggcaagtactgtcacgagcagcagtgttggtggcacagtggatagcaaccggcgctatgacattggacttagtgagcagctggaagcttaccgaggcttgtgtggtcaagcttctcatccacttgttggtacatcaagtgatgcttccaatgcagtggatgtgctagaagaccctttgatcacgaacggtcagatccctgagtatttgtttgagagccttccaacttgggatttcaggagaggtattgaggaagcccagaagtttcttcctgttaacaataaactagtcattggtttagaagctggtggtattgcaagaccccaagaggcaaggaaagatgtttctttgaatgccaaaaaggcagatgcattgaaggtcaagaaaaatagacagagtgaagaccttgacgtgattgaaggccggaacattaaacagtctgcattttgttccgatgaacctgattggattgaaatgttcgatgatctgcttcttcaaaccgagaagaaggccacagatctgcgagagctgatgcggaatgaagcttccaagaattctcaggtcacccagacgaaaggaccaagtggaccacggccacggggaaggaaaccaacaaagaaggatgtggtggaccttaggaccatcctcatccactgtgcacaggctgtggcagcagatgaccgcaggactgctaatgaattgttaaagcaaataaggcaccattccaagccaaatggtgatggaacccagaggttagcacattgctttgcagatggtcttgaggctcgattggcaggcacagggagtcagctttaccgcaagcttatagcaaaacgaacaactgcctcagacatgcttaaagcttaccacctttaccttgcggcatgcccatttaagaggctttcacattttctttccaatcaaacaatcttgagtatgactaaacatgcatcaaaggtgcatatcattgacttcggcatttatttcggcttccaatggccatgcctaatcaggcgtctctccaagagggaaggtggtccacctgttctgcgcattactggaattgatgtacctcagccaggtttccgacctactgagagaattgaagagactggacaaaggcttgcagaatatgctgagaagttgaaggtgccttttgagtatcagggaatagcatctaagtgggaaaccatccgagttgaggatctcaaagttggcaaggacgaagttgtgattgttaattgcctatacagattcagaaacctgattgatgaaacagttgctgtagacagtcctaggaatagagtgctcaacaccataaggcaagtaaacccagcaattttcattcatggaattgtgaatgggtcatacagtgttcccttcttcatcacacgtttccgtgaggcgctgttccatttctctgcattgtttgacatgctagagacaactgtcccacgggatgatgcacagcgtgcactcatagagagggaaatgtttggccgagaggcactcaatgttattgcatgtgagggctcagacagagttgagagacccgagacatataaacagtggcaggtgaggaacctcagggctggatttgttcagtccccgttaaaccaagaaatcgtgatgaaagccaaggacaaagtaaaagacatttatcacaaggactttgtcatagatgaagacagcggatggctcctgcaaggctggaaaggaaggataatctatgcaatatctacctggaagcctaagaataactaggttcttggtctcacatgttacgtttcctattccattgacggtggcagctaattaaccagtcctgctatgttatagcatgtggaccttgacttgtgaacctgtctgatcaaggaaatggcttgaagacggataatgatcaacatggagctttgctagcttcacatctgtccagccagtactctgatagactggatgtaggcctctctaccttggtgttggtacaatcacttctattaaatttcgtagttttcttctttccatttacttctatgatcggccaggcgtcctattagcaataaccagatcactgcttctagttaattggttagccaaactacctactatcttgagcttagtatttttgacttgtatccatccatgttgaacattatttggttttcagcaccagcagataaaaaattccccaacgaggaagcatgaagcatctaaatttgttatacgagaatgggcgctgctgtttgtgtggaatgtagtatctcatggagtgctttgcctttgaattctccattttttatttcatctctttgtagcaagtgatgcgtgctgtcacaaaatgactctttaaacttgagtggagcactagtttgagaatatcgctagaaagtggcgctacagatttttggagacgactagcgaatggtgccaccacaaggcggcatgatattagtgcaatgcgaccactatcagcgtatcttcatttgataacgcattgttttagctgatcctttcagtccattctctttt

SEQ ID NO: 7157 - DNA, 694 bp, Zea Mays
gagcacaccatcctcgcattattcttttcggatttgctccacccctccactcccatgcccgtgtccatctcaggctgcgtcacatcatcgccgccacacccagcaccagcaccagcggcggcgcaccaccaccggcgccatcaccagcgccagcgctagcgccggcgcaggcggaggcccgggcgacgcggactgggcgaagttactggccttcttttcgtcagcggcgtcccttgccatcaagctaaggaaatggcttgaagacggataatgatcaacatggagctttgctagcttcacatctgtccagccagtactctgatagactggatcaccagcagataaaaaattccccaacgaggaagcatgaagcatctaaatttgttatacgagaatgggcgctgctgtttgtgtggaatgtagtatctcatggagtgctttgcctttgaattctccattttttatttcatctctttgtagcaagtgatgcgtgctgtcacaaaatgactctttaaacttgagtggagcactagtttgagaatatcgctagaaagtggcgctacagatttttggagacgactagcgaatggtgccaccacaaggcggcatgatattagtgcaatgcgaccactatcagcgtatcttcatttgataacgcattgttttagctgatcctttcagtccattctctttt

SEQ ID NO: 7158 - DNA, 1482 bp, Zea Mays
cttttgccccatccgacgagagtagaactatttactactccatttcgcgattgttgggagtcagaggtggtgagcgaggatggcaccgagctcccgttacaatgcccagggaccgccggttctaagagcgtcagcaagaacgcggccgacaccagcaccttcggcaccaagacgtccggctcgtcgtcgtcggtgccgccaacccctcgtacggaggcggagatcctggagtcgtcgaatgtccgcaagttcagcttcggcgagctcaaaggctccacgaggaacttcaggccggacagcctgctcggggaggggggcttcgggtccgtgttcaaggggtggatggatgagcgcacgctcgcgcccgtcaggccgggcgccgggatcatcgtcgccgtcaagaagctcaagctcgacagcttccaagggcaccgggaatggctggcggaggtcaattacctggggcagttatcccaccctaatctcgtgaaactcatcggctactgcttggaggacgagcagcggcttcttgtgtacgagtatatgccgagagggagcctggagcatcatctcttcaggaggggctcgaacttccagccgctcccatggaacttacgcatgaaggttgctctcgaggctgccagaggtcttgctttcctgcacggcgaccaggccaaagttatctaccgcgatttcaagacctccaatatccttctcgactcggagtacaacgcaaaactgtctgatttcggtttggcaaaggacggtccaagcggtgataagagccatgtttctactagggtcatggggacacaaggatacgctgcccctgaatatcttgcgacaggccatttgacagcgaagagcgatgtgtacagctacggtgtggttcttctggagctgctgtccgggcagcgcgctctggacaagaaccgcccgcccggtcagcacaatctggtggagtgggctagaccttacatcaccaacaagaggagggtcattcatgtcctggactcacggctgggttcccagtattcccttcccgcggctcagaaggtggcaacactggcgctgcaatgcttatcgatggacgcacgatgcaggcctggcatggatcaggttgtgactgcattagaacaacttcaaaggccaagggctcactgaaaaagatgtccatctacatctgtggagtctggagcatcctcctgtaatactttaggggagtaaaaaaacagagaacggacgagggtttgaagggctaagtggcttgtgaagagaatataatattgccttgctttgtgtacagctagttgcttcgtcgttgtaacttgggtctctacttatatattttattagtcttcgatgtaccagcggttcaaagggtaagttcttttgttccacttcaccgcaagattccagtttgaatgttcttgagagtgtaagaaatgcttcttaaaagaccgccgctgcaaattgcttgcc

SEQ ID NO: 7159 - DNA, 1494 bp, Zea Mays
tttcggtccggcgggatcgaaactctcgcacccgagagccctttatatccgctagggtttacgcgcatttttgctcctcactgccgcgccgccaccctctacagataaggaagaggaggagggcaggatgtcgcaccgtaagttcgagcacccgaggcacggctcagtcattccctagggatgacgccaagaagccttgccatctcactgccttccttggctacaaggctggcatgactcacattgtccgtgaggttgagaagccaggatccaaactccataagaaggaaacttgtgaggctgttaccatcattgaaacccctcctcttgtcattgttgggctcgtggcatatgtgaagactcctcgtggcctccgcacactcaactctgtttgggcccaacatcttagcgaagaagtgaggagaaggttctacaagaactggtgcaagagcaagaagaaggctttcacaaagtatgctctcaaatatgaaaatgatgctggcaagaaggaaattcagctgcagcttgagaagatgaagaaatatgcttctgttatccgtgtcattgctcatacccagattaggaagatgaagggtttgaagcagaagaaggctcacctgatggagattcaggtcaatggtggtaccattgctgacaaggtggactatggctacaaattctttgagaaagaggtccctgttgatgctgtcttccagaaggatgagatgattgacatcattggtgtgaccaaggggaaaggttatgagggtgtggtcactcgttggggtgtcacccggcttccccgcaagacccacaggggtctccgcaaagttgcttgtatcggtgcatggcatccggctagggtctcctatacggttgctcgtgctggtcagaatgggtaccaccaccgcactgagatgaacaagaaggtttacaagatcggcaaggctggacaagagacccacgatgcctccacagagtttgacaggactgagaaggacatcactcccatgggtggcttcccccattatggtatcgtgaagggtgactacctgatgatcaagggctgctgtgtgggtccaaagaagagggtggtgaccctccgccagtccctcctgaagcagacttcccggctggcgctggaggagatcaagctcaagttcatcgacacatcgtccaaatttgggcacggtcgcttccagactaccgatgagaagcagaggttctttggcaagctcaaggcgtaaggtgctgcggtgcagcgaagtcccatttctcaaaatcatcaaactgtgatacttttgtttgtaaccttgctgtaccaagttttgtagccatggtccagtcgtctatggattgttccatgcttcagaactgcactgtctatgttttgtgctattttggttgtttaatgccccaatcattgcatatagattctaattgttttggtgtttgatgatcaatataactatttatactaattgtgtttccgaa

SEQ ID NO: 7160 - DNA, 1540 bp, Zea Mays
atttcggtccggcgggatcgaaactctcgcacccgagagccctttatatccgctagggtttacgcgcatttttgctcctcactgccgcgccgccaccctctacagataaggaagaggaggagggcaggatgtcgcaccgtaagttcgagcacccgaggcacggctccctcggcttccttcccaggaagcgctcctcccgtcaccgcggcaaggtcattccctagggatgacgccaagaagccttgccatctcactgccttccttggctacaaggctggcatgactcacattgtccgtgaggttgagaagccaggatccaaactccataagaaggaaacttgtgaggctgttaccatcattgaaacccctcctcttgtcattgttgggctcgtggcatatgtgaagactcctcgtggcctccgcacactcaactctgtttgggcccaacatcttagcgaagaagtgaggagaaggttctacaagaactggtgcaagagcaagaagaaggctttcacaaagtatgctctcaaatatgaaaatgatgctggcaagaaggaaattcagctgcagcttgagaagatgaagaaatatgcttctgttatccgtgtcattgctcatacccagattaggaagatgaagggtttgaagcagaagaaggctcacctgatggagattcaggtcaatggtggtaccattgctgacaaggtggactatggctacaaattctttgagaaagaggtccctgttgatgctgtcttccagaaggatgagatgattgacatcattggtgtgaccaaggggaaaggttatgagggtgtggtcactcgttggggtgtcacccggcttccccgcaagacccacaggggtctccgcaaagttgcttgtatcggtgcatggcatccggctagggtctcctatacggttgctcgtgctggtcagaatgggtaccaccaccgcactgagatgaacaagaaggtttacaagatcggcaaggctggacaagagacccacgatgcctccacagagtttgacaggactgagaaggacatcactcccatgggtggcttcccccattatggtatcgtgaagggtgactacctgatgatcaagggctgctgtgtgggtccaaagaagagggtggtgaccctccgccagtccctcctgaagcagacttcccggctggcgctggaggagatcaagctcaagttcatcgacacatcgtccaaatttgggcacggtcgcttccagactaccgatgagaagcagaggttctttggcaagctcaaggcgtaaggtgctgcggtgcagcgaagtcccatttctcaaaatcatcaaactgtgatacttttgtttgtaaccttgctgtaccaagttttgtagccatggtccagtcgtctatggattgttccatgcttcagaactgcactgtctatgttttgtgctattttggttgtttaatgccccaatcattgcatatagattctaattgttttggtgtttgatgatcaatataactatttatactaattgtgtttccgaa

SEQ ID NO: 7161 - DNA, 1676 bp, Zea Mays
cttctctctgcatctccctttatgcttaataagcaaggtcagcagccgagggcgaatgggggagctgatgcaccgttgctgcccctgggtccggcggcagctacatcggcggctccggagcaaggtgggttgcctagaagctcatcaatggctaatgccgccgtggctgcgcacgcgaggcccaactcaatggcggagcgcgcgcggctggcgcggatgccgcatccggagccagcgctcaagtgcccgcgttgcgaatccaccaacaccaagttctgctactacaacaactactccctctcccagccccgccacttctgcaagacgtgccgccgctactggacgcgcggcggatcccttcgcaacgtccccgtaggtggaggctgccgtcgcaacaagcgttcgtccaagtcctcatcctcctctgctgggtcttcctcctcaaagatgtctccctcaggaaggctactgggtggtccatcagctacaccgtccaccaccccaggcactaccggtgcgatcattactccgggtctcagctctttctctcaccacttgccgttcttgggctccatgcacccgtcagggcccaacctaggtctagctttctccgccggactgccgctagtcggcatgcagcacctggacacggtggatcagtttccggtggcaagcggcggcggcaccaccataggtgcatctctagagcagtggagagtgcgacagcagcagcagcagttcccattcatgactgggggaatactggatctgtcgcagccgccgacgtaccaattcggtttggaagctaaccgaggaggcagcggctcagctgcggtggcgttcaattcaggacagaccacgacgaccagtgctaccacgggaaggcaggaagggtcatcaaagaagatgggggatagtaaaggagaagatatgagcttacagaagcagtacatggtacctctacgccacggatcaggatcacacggtgtctgggatgggagtgctggtggaactggcagcaacggtggtggtactggcaatggcggttcaagttggccaatgaacatgattcctggattccattcttcgtccactagcggttgcaatgacagtggcttgtcgtagtactctctagctaggggctggggcaatgtcctatcaagaaaaatattttggagatgcatggttgagtctgagcaaatgctagctatagctaggacgatggaggaacaggcgatgaccaatccacaggcatgttcatcatctgctattcttcatcggaattgtagaagcacactgctacctcatgatggtcacaggtaggagtttaaagtaaagctgctctttgtttaaacctttttctgtcatttggttttgaacttaaaggtgttctctgcattgtgtccatagcggccgccacttttctacttttcacactattgttcacagggattaattaatcaaatttggtgcctggtatactatgtgataaggtatatttgacatggacgaaaccgattagttgtttcatcactactacttgtgtggaagattgcatgaaattaatgtgtatattggtttgttgccaagttacttccatatatatgtttttcttctatatattctatcctgtattcagggagtttgattaaagacaacatataactaaacttcaa

SEQ ID NO: 7162 - DNA, 1924 bp, Zea Mays
ctcgccttcgacttggtgggatgtgattctccaccacctccgagcttgccagaggactccacctctttcttctcgcatgcttccttttctttccaaacacaaatgcgcagcaaagaaagtgcaaatcataaagaaaagagcagaattcaaagcagccggaaagctgactagctagaaggagtgaagagagagaagtatatctcagcaacgcctccatggtcttcccttcaccttcagtgcaggtctacctagatccacatccacctaattggaataaccagcaaggtcagcagccgagggcgaatgggggagctgatgcaccgttgctgcccctgggtccggcggcagctacatcggcggctccggagcaaggtgggttgcctagaagctcatcaatggctaatgccgccgtggctgcgcacgcgaggcccaactcaatggcggagcgcgcgcggctggcgcggatgccgcatccggagccagcgctcaagtgcccgcgttgcgaatccaccaacaccaagttctgctactacaacaactactccctctcccagccccgccacttctgcaagacgtgccgccgctactggacgcgcggcggatcccttcgcaacgtccccgtaggtggaggctgccgtcgcaacaagcgttcgtccaagtcctcatcctcctctgctgggtcttcctcctcaaagatgtctccctcaggaaggctactgggtggtccatcagctacaccgtccaccaccccaggcactaccggtgcgatcattactccgggtctcagctctttctctcaccacttgccgttcttgggctccatgcacccgtcagggcccaacctaggtctagctttctccgccggactgccgctagtcggcatgcagcacctggacacggtggatcagtttccggtggcaagcggcggcggcaccaccataggtgcatctctagagcagtggagagtgcgacagcagcagcagcagttcccattcatgactgggggaatactggatctgtcgcagccgccgacgtaccaattcggtttggaagctaaccgaggaggcagcggctcagctgcggtggcgttcaattcaggacagaccacgacgaccagtgctaccacgggaaggcaggaagggtcatcaaagaagatgggggatagtaaaggagaagatatgagcttacagaagcagtacatggtacctctacgccacggatcaggatcacacggtgtctgggatgggagtgctggtggaactggcagcaacggtggtggtactggcaatggcggttcaagttggccaatgaacatgattcctggattccattcttcgtccactagcggttgcaatgacagtggcttgtcgtagtactctctagctaggggctggggcaatgtcctatcaagaaaaatattttggagatgcatggttgagtctgagcaaatgctagctatagctaggacgatggaggaacaggcgatgaccaatccacaggcatgttcatcatctgctattcttcatcggaattgtagaagcacactgctacctcatgatggtcacaggtaggagtttaaagtaaagctgctctttgtttaaacctttttctgtcatttggttttgaacttaaaggtgttctctgcattgtgtccatagcggccgccacttttctacttttcacactattgttcacagggattaattaatcaaatttggtgcctggtatactatgtgataaggtatatttgacatggacgaaaccgattagttgtttcatcactactacttgtgtggaagattgcatgaaattaatgtgtatattggtttgttgccaagttacttccatatatatgtttttcttctatatattctatcctgtattcagggagtttgattaaagacaacatataactaaacttcaa

SEQ ID NO: 7163 - DNA, 1227 bp, Zea Mays
catgagtcatcaatagaaccttgtagttgtttgcgagttcctagtaatataaaaataaatgacgcaaaacaataaacaaagtgctaatctaaaaaatgactttccactagagaattaaaatttatacttccagtttgcatgtgagaactcaatagtgctaatctaatgctagaaagcgttaccatcggtagtaaccactcattcacgggcagatgatgattcaccaatacatggctgttttcccttgtcccgtacactgcctccttccatcacaatcaaaactgcaaacaaggcatttccatcacaaccaaaactcaaacacctgcatatcaatggcgcatcaaagagctcgacctatcattgtagatccagcactgcaggtcccaaataaaactgaggttcatcttgggtgatgcttagtcgatcgttcctggagttttgcttgcgatgggacaaccttcctcgcacactactgatgtatttcaccaacttcctctcatcctcagagggctacttccacacagtgatctgcaactcagagcactaccagaacaccactgtcaacagtgacctgcggttcatggcctgggataagccccctctgacgcaccctgttaacctcacaacagagcattttgatgcgatggcaaacaacggggcgccatttgcacactctttcgccaatgacaattcagtcctggatatgattgacgccaagttgttgggccgggcacctggccgcttcaccccgggtggatggtgtttgggtagctcagtaggcgggaaagatccgtgcaccttcttgggaagatcctttattctcaggccgaccaaaggttcggccaagctagagaagttgttgaaacttttggaacctgataacttcaggcctaaacaatgtaaataggactcattttgcatgtagcattttgtgggtactgttcagaagccaaagtttgacgaaatctttctagttattgcggcagttaggcatacatacaagtgtgttgttgtatacttgcatctggaaagcttatctcaaaagtgatttgagaccatacatgtactactgcggtttcatcgcttccacggatgttaaacaaccgatgataatcagagacttcagcaattttcaggaagtcagtcttaggagattgttcgacgttttgttcctaccctgttccatctcttggaagtaaaacgcttcggtttgtgcggcagattttt

SEQ ID NO: 7164 - DNA, 2009 bp, Zea Mays
catgagtcatcaatagaaccttgtagttgtttgcgagttcctagtaatataaaaataaatgacgcaaaacaataaacaaagtgctaatctaaaaaatgactttccactagagaattaaaatttatacttccagtttgcatgtgagaactcaatagtgctaatctaatgctagaaagcgttaccatcggtagtaaccactcattcacgggcagatgatgattcaccaatacatggctgttttcccttgtcccgtacactgcctccttccatcacaatcaaaactgcaaacaaggcatttccatcacaaccaaaactcaaacacctgcatatcaatggcgtaagtgtagaagcgcagtgtggtcctcctagagttgtctcacataccagtccaagcctgcaggtgagtggcgagcgacgagcaggcgcgcggcgagcgggcagagcgcgtggcgagagtgggattggagggagagccgccgccaaatgcccaaatttcgggtgggattggagggagtgagtcaggatttagggtttgggggatttgtgggctgttttgcagcccgttttggcgtggagcccaaatttacacgtttttttggccaaagtgctttttttcgcccccagccgaaaccaccgaaatttcggaatttccatttggaaattgctaaccctggtaccaactaccgagttaatcaacttaatgtcataacatgagtgcagccagagcatcaagcccatcacagttgggtccatcttaatgtgtaacctaagggacaccaactgaattatcaagagcagtaaatgctggatctcaatattagtaggactggatgcaaaacggaagttgttcaagcttctggacttgctcaaaagtcttaagattgttaatatctatggatattttttttttcaaaacaaaaaagttatcaacctgttgttttgtagtacaacaattgtttgttcgaagtgctctacaaactggcacccccccaaaaaacaattattgaaactaatatttatgttgttgcccccatatttatcagacatccttcatatcctctcttacatgccaaaaggtctcaattttattgagcacacaatcaatattggttggaaagagcatcaaagagctcgacctatcattgtagatccagcactgcaggtcccaaataaaactgaggttcatcttgggtgatgcttagtcgatcgttcctggagttttgcttgcgatgggacaaccttcctcgcacactactgatgtatttcaccaacttcctctcatcctcagagggctacttccacacagtgatctgcaactcagagcactaccagaacaccactgtcaacagtgacctgcggttcatggcctgggataagccccctctgacgcaccctgttaacctcacaacagagcattttgatgcgatggcaaacaacggggcgccatttgcacactctttcgccaatgacaattcagtcctggatatgattgacgccaagttgttgggccgggcacctggccgcttcaccccgggtggatggtgtttgggtagctcagtaggcgggaaagatccgtgcaccttcttgggaagatcctttattctcaggccgaccaaaggttcggccaagctagagaagttgttgaaacttttggaacctgataacttcaggcctaaacaatgtaaataggactcattttgcatgtagcattttgtgggtactgttcagaagccaaagtttgacgaaatctttctagttattgcggcagttaggcatacatacaagtgtgttgttgtatacttgcatctggaaagcttatctcaaaagtgatttgagaccatacatgtactactgcggtttcatcgcttccacggatgttaaacaaccgatgataatcagagacttcagcaattttcaggaagtcagtcttaggagattgttcgacgttttgttcctaccctgttccatctcttggaagtaaaacgcttcggtttgtgcggcagattttt

SEQ ID NO: 7165 - DNA, 1499 bp, Zea Mays
catgagtcatcaatagaaccttgtagttgtttgcgagttcctagtaatataaaaataaatgacgcaaaacaataaacaaagtgctaatctaaaaaatgactttccactagagaattaaaatttatacttccagtttgcatgtgagaactcaatagtgctaatctaatgctagaaagcgttaccatcggtagtaaccactcattcacgggcagatgatgattcaccaatacatggctgttttcccttgtcccgtacactgcctccttccatcacaatcaaaactgcaaacaaggcatttccatcacaaccaaaactcaaacacctgcatatcaatggcacatccttcatatcctctcttacatgccaaaaggtctcaattttattgagcacacaatcaatattggttggaaagagtaaggatatgttttcaatgtcaatttgtggttcttaagggctagtttaacaactccattttccgaagggaaaatgaactaatttccattgggaaaatggaaattccttagaaaaatgacgttgccaaactagccctagttcttaacccattttcttgtttcttattatgatatgattcttggattccatatgcaggcatcaaagagctcgacctatcattgtagatccagcactgcaggtcccaaataaaactgaggttcatcttgggtgatgcttagtcgatcgttcctggagttttgcttgcgatgggacaaccttcctcgcacactactgatgtatttcaccaacttcctctcatcctcagagggctacttccacacagtgatctgcaactcagagcactaccagaacaccactgtcaacagtgacctgcggttcatggcctgggataagccccctctgacgcaccctgttaacctcacaacagagcattttgatgcgatggcaaacaacggggcgccatttgcacactctttcgccaatgacaattcagtcctggatatgattgacgccaagttgttgggccgggcacctggccgcttcaccccgggtggatggtgtttgggtagctcagtaggcgggaaagatccgtgcaccttcttgggaagatcctttattctcaggccgaccaaaggttcggccaagctagagaagttgttgaaacttttggaacctgataacttcaggcctaaacaatgtaaataggactcattttgcatgtagcattttgtgggtactgttcagaagccaaagtttgacgaaatctttctagttattgcggcagttaggcatacatacaagtgtgttgttgtatacttgcatctggaaagcttatctcaaaagtgatttgagaccatacatgtactactgcggtttcatcgcttccacggatgttaaacaaccgatgataatcagagacttcagcaattttcaggaagtcagtcttaggagattgttcgacgttttgttcctaccctgttccatctcttggaagtaaaacgcttcggtttgtgcggcagattttt

SEQ ID NO: 7166 - DNA, 1882 bp, Zea Mays
catgagtcatcaatagaaccttgtagttgtttgcgagttcctagtaatataaaaataaatgacgcaaaacaataaacaaagtgctaatctaaaaaatgactttccactagagaattaaaatttatacttccagtttgcatgtgagaactcaatagtgctaatctaatgctagaaagcgttaccatcggtagtaaccactcattcacgggcagatgatgattcaccaatacatggctgttttcccttgtcccgtacactgcctccttccatcacaatcaaaactgcaaacaaggcatttccatcacaaccaaaactcaaacacctgcatatcaatggcgtaagtgtagaagcgcagtgtggtcctcctagagttgtctcacataccagtccaagcctgcaggtgagtggcgagcgacgagcaggcgcgcggcgagcgggcagagcgcgtggcgagagtgggattggagggagagccgccgccaaatgcccaaatttcgggtgggattggagggagtgagtcaggatttagggtttgggggatttgtgggctgttttgcagcccgttttggcgtggagcccaaatttacacgtttttttggccaaagtgctttttttcgcccccagccgaaaccaccgaaatttcggaatttccatttggaaattgctaaccctggtaccaactaccgagttaatcaacttaatgtcataacatgagtgcagccagagcatcaagcccatcacagttgggtccatcttaatgtgtaacctaagggacaccaactgaattatcaagagcagtaaatgctggatctcaatattagtaggactggatgcaaaacggaagttgttcaagcttctggacttgctcaaaagtcttaagattgttaatatctatggatattttttttttcaaaacaaaaaagttatcaacctgttgttttgtagtacaacaattgtttgttcgaagtgctctacaaactggcacccccccaaaaaacaattattgaaactaatatttatgttgttgcccccatatttatcagacatccttcatatcctctcttacatgccaaaaggtctcaattttattgagcacacaatcaatattggttggaaagagcatcaaagagctcgacctatcattgtagatccagcactgcaggtcccaaataaaactgaggttgtaacgacaaaggagaaaaggagttcatcttgggtgatgcttagtcgatcgttcctggagttttgcttgcgatgggacaaccttcctcgcacactactgatagcattttgatgcgatggcaaacaacggggcgccatttgcacactctttcgccaatgacaattcagtcctggatatgattgacgccaagttgttgggccgggcacctggccgcttcaccccgggtggatggtgtttgggtagctcagtaggcgggaaagatccgtgcaccttcttgggaagatcctttattctcaggccgaccaaaggttcggccaagctagagaagttgttgaaacttttggaacctgataacttcaggcctaaacaatgtaaataggactcattttgcatgtagcattttgtgggtactgttcagaagccaaagtttgacgaaatctttctagttattgcggcagttaggcatacatacaagtgtgttgttgtatacttgcatctggaaagcttatctcaaaagtgatttgagaccatacatgtactactgcggtttcatcgcttccacggatgttaaacaaccgatgataatcagagacttcagcaattttcaggaagtcagtcttaggagattgttcgacgttttgttcctaccctgttccatctcttggaagtaaaacgcttcggtttgtgcggcagattttt

SEQ ID NO: 7167 - DNA, 1318 bp, Zea Mays
ctccatgagtcatcaatagaaccttgtagttgtttgcgagttcctagtaatataaaaataaatgacgcaaaacaataaacaaagtgctaatctaaaaaatgactttccactagagaattaaaatttatacttccagtttgcatgtgagaactcaatagtgctaatctaatgctagaaagcgttaccatcggtagtaaccactcattcacgggcagatgatgattcaccaatacatggctgttttcccttgtcccgtacactgcctccttccatcacaatcaaaactgcaaacaaggcatttccatcacaaccaaaactcaaacacctgcatatcaatggcgtaagtgtagaagcgcagtgtggtcctcctagagttgtctcacataccagtccaagcctgcaggcatcaaagagctcgacctatcattgtagatccagcactgcaggtcccaaataaaactgaggttgtaacgacaaaggagaaaaggagttcatcttgggtgatgcttagtcgatcgttcctggagttttgcttgcgatgggacaaccttcctcgcacactactgatgtatttcaccaacttcctctcatcctcagagggctacttccacacagtgatctgcaactcagagcactaccagaacaccactgtcaacagtgacctgcggttcatggcctgggataagccccctctgacgcaccctgttaacctcacaacagagcattttgatgcgatggcaaacaacggggcgccatttgcacactctttcgccaatgacaattcagtcctggatatgattgacgccaagttgttgggccgggcacctggccgcttcaccccgggtggatggtgtttgggtagctcagtaggcgggaaagatccgtgcaccttcttgggaagatcctttattctcaggccgaccaaaggttcggccaagctagagaagttgttgaaacttttggaacctgataacttcaggcctaaacaatgtaaataggactcattttgcatgtagcattttgtgggtactgttcagaagccaaagtttgacgaaatctttctagttattgcggcagttaggcatacatacaagtgtgttgttgtatacttgcatctggaaagcttatctcaaaagtgatttgagaccatacatgtactactgcggtttcatcgcttccacggatgttaaacaaccgatgataatcagagacttcagcaattttcaggaagtcagtcttaggagattgttcgacgttttgttcctaccctgttccatctcttggaagtaaaacgcttcggtttgtgcggcagattttt

SEQ ID NO: 7168 - DNA, 1341 bp, Zea Mays
ctcaccatgactccatgagtcatcaatagaaccttgtagttgtttgcgagttcctagtaatataaaaataaatgacgcaaaacaataaacaaagtgctaatctaaaaaatgactttccactagagaattaaaatttatacttccagtttgcatgtgagaactcaatagtgctaatctaatgctagaaagcgttaccatcggtagtaaccactcattcacgggcagatgatgattcaccaatacatggctgttttcccttgtcccgtacactgcctccttccatcacaatcaaaactgcaaacaaggcatttccatcacaaccaaaactcaaacacctgcatatcaatggcacatccttcatatcctctcttacatgccaaaaggtctcaattttattgagcacacaatcaatattggttggaaagagcatcaaagagctcgacctatcattgtagatccagcactgcaggtcccaaataaaactgaggttgtaacgacaaaggagaaaaggagttcatcttgggtgatgcttagtcgatcgttcctggagttttgcttgcgatgggacaaccttcctcgcacactactgatgtatttcaccaacttcctctcatcctcagagggctacttccacacagtgatctgcaactcagagcactaccagaacaccactgtcaacagtgacctgcggttcatggcctgggataagccccctctgacgcaccctgttaacctcacaacagagcattttgatgcgatggcaaacaacggggcgccatttgcacactctttcgccaatgacaattcagtcctggatatgattgacgccaagttgttgggccgggcacctggccgcttcaccccgggtggatggtgtttgggtagctcagtaggcgggaaagatccgtgcaccttcttgggaagatcctttattctcaggccgaccaaaggttcggccaagctagagaagttgttgaaacttttggaacctgataacttcaggcctaaacaatgtaaataggactcattttgcatgtagcattttgtgggtactgttcagaagccaaagtttgacgaaatctttctagttattgcggcagttaggcatacatacaagtgtgttgttgtatacttgcatctggaaagcttatctcaaaagtgatttgagaccatacatgtactactgcggtttcatcgcttccacggatgttaaacaaccgatgataatcagagacttcagcaattttcaggaagtcagtcttaggagattgttcgacgttttgttcctaccctgttccatctcttggaagtaaaacgcttcggtttgtgcggcagattttt

SEQ ID NO: 7169 - DNA, 1328 bp, Zea Mays
cttaccttcactctccttagcacacccgcaataagcacacttgaatccctgtttcttccacttctcaccatgactccatgagtcatcaatagaaccttgtagttgtttgcgagttcctagtaatataaaaataaatgacgcaaaacaataaacaaagtgctaatctaaaaaatgactttccactagagaattaaaatttatacttccagtttgcatgtgagaactcaatagtgctaatctaatgctagaaagcgttaccatcggtagtaaccactcattcacgggcagatgatgattcaccaatacatggctgttttcccttgtcccgtacactgcctccttccatcacaatcaaaactgcaaacaaggcatttccatcacaaccaaaactcaaacacctgcatatcaatggcgcatcaaagagctcgacctatcattgtagatccagcactgcaggtcccaaataaaactgaggttgtaacgacaaaggagaaaaggagttcatcttgggtgatgcttagtcgatcgttcctggagttttgcttgcgatgggacaaccttcctcgcacactactgatgtatttcaccaacttcctctcatcctcagagggctacttccacacagtgatctgcaactcagagcactaccagaacaccactgtcaacagtgacctgcggttcatggcctgggataagccccctctgacgcaccctgttaacctcacaacagagcattttgatgcgatggcaaacaacggggcgccatttgcacactctttcgccaatgacaattcagtcctggatatgattgacgccaagttgttgggccgggcacctggccgcttcaccccgggtggatggtgtttgggtagctcagtaggcgggaaagatccgtgcaccttcttgggaagatcctttattctcaggccgaccaaaggttcggccaagctagagaagttgttgaaacttttggaacctgataacttcaggcctaaacaatgtaaataggactcattttgcatgtagcattttgtgggtactgttcagaagccaaagtttgacgaaatctttctagttattgcggcagttaggcatacatacaagtgtgttgttgtatacttgcatctggaaagcttatctcaaaagtgatttgagaccatacatgtactactgcggtttcatcgcttccacggatgttaaacaaccgatgataatcagagacttcagcaattttcaggaagtcagtcttaggagattgttcgacgttttgttcctaccctgttccatctcttggaagtaaaacgcttcggtttgtgcggcagattttt

SEQ ID NO: 7170 - DNA, 934 bp, Zea Mays
cacctggaggcttggactggcatcaaagagctcgacctatcattgtagatccagcactgcaggtcccaaataaaactgaggttgtaacgacaaaggagaaaaggagttcatcttgggtgatgcttagtcgatcgttcctggagttttgcttgcgatgggacaaccttcctcgcacactactgatgtatttcaccaacttcctctcatcctcagagggctacttccacacagtgatctgcaactcagagcactaccagaacaccactgtcaacagtgacctgcggttcatggcctgggataagccccctctgacgcaccctgttaacctcacaacagagcattttgatgcgatggcaaacaacggggcgccatttgcacactctttcgccaatgacaattcagtcctggatatgattgacgccaagttgttgggccgggcacctggccgcttcaccccgggtggatggtgtttgggtagctcagtaggcgggaaagatccgtgcaccttcttgggaagatcctttattctcaggccgaccaaaggttcggccaagctagagaagttgttgaaacttttggaacctgataacttcaggcctaaacaatgtaaataggactcattttgcatgtagcattttgtgggtactgttcagaagccaaagtttgacgaaatctttctagttattgcggcagttaggcatacatacaagtgtgttgttgtatacttgcatctggaaagcttatctcaaaagtgatttgagaccatacatgtactactgcggtttcatcgcttccacggatgttaaacaaccgatgataatcagagacttcagcaattttcaggaagtcagtcttaggagattgttcgacgttttgttcctaccctgttccatctcttggaagtaaaacgcttcggtttgtgcggcagattttt

SEQ ID NO: 7171 - DNA, 965 bp, Zea Mays
caagatcagtcgccttgctaattgctccctgctgtatctgaaactctcgagcatcaaagagctcgacctatcattgtagatccagcactgcaggtcccaaataaaactgaggttgtaacgacaaaggagaaaaggagttcatcttgggtgatgcttagtcgatcgttcctggagttttgcttgcgatgggacaaccttcctcgcacactactgatgtatttcaccaacttcctctcatcctcagagggctacttccacacagtgatctgcaactcagagcactaccagaacaccactgtcaacagtgacctgcggttcatggcctgggataagccccctctgacgcaccctgttaacctcacaacagagcattttgatgcgatggcaaacaacggggcgccatttgcacactctttcgccaatgacaattcagtcctggatatgattgacgccaagttgttgggccgggcacctggccgcttcaccccgggtggatggtgtttgggtagctcagtaggcgggaaagatccgtgcaccttcttgggaagatcctttattctcaggccgaccaaaggttcggccaagctagagaagttgttgaaacttttggaacctgataacttcaggcctaaacaatgtaaataggactcattttgcatgtagcattttgtgggtactgttcagaagccaaagtttgacgaaatctttctagttattgcggcagttaggcatacatacaagtgtgttgttgtatacttgcatctggaaagcttatctcaaaagtgatttgagaccatacatgtactactgcggtttcatcgcttccacggatgttaaacaaccgatgataatcagagacttcagcaattttcaggaagtcagtcttaggagattgttcgacgttttgttcctaccctgttccatctcttggaagtaaaacgcttcggtttgtgcggcagattttt

SEQ ID NO: 7172 - DNA, 2021 bp, Zea Mays
cagcaggaaacgccgctgccccagcctgcctggctgcccacgaatccgcaaaaccctaaatcctgactcagtctctccaatcccacccaaaatttgggcatttggcggcggctctccctccaatcccactctcgccgcgcgcagccgctcgctctgctcgccactcgcctgctgctcgccgctccgcgccctctgctcggccgcgctcgcctgctcgccgctcctctgctcggccgcgctcgcctgctcgtcgctcgccactcacctgctcggccgccactcacctggaggcttggactgttttgattacgatggaatgatgcaatgtacgtgacaagggaaaagagttatgtattggtgaatcaccatctgctgcagccagcctgtgaatgagtggttattaccgatgctaacgctttctagcattagattagcactattgagttctcacattcaaactggaagtagaaattttagttctctagtgaaaagttatttattgttttagattagcactttgtttattgttttgcgttatttatttttatattactaggaactcgcaaacaactgcaaggttctattgatgacccatggagtcatagtgataagcggaagaaacagggattcaagtgtgcttattgcgggtgtgctaaggagagtggaggtaagacccgtctaaggtgtcatctagctgatttgtcaggagaagacaagtcatgcctgaatgtaccaaagcgtgtgaggaagataatgttgaatgactatgcaagagggaaaaaggagggcggattataaagagcataaactctttgtgtataaggcgattatggatctagcatatagtgatgctagaagagaaaaaatacctagggatgaagctgaataaatggcgtgggcaataagggaatcattgttggatcaaagggcatctgacaatagttcacctgtaggcagaagtagcactgggacaagcaataccaccccaccattagctgcaggctctcgtaggcagagtaggatggataggtactatcggagtctaagtgtaactcaggacatatgtgatatagatttgcaatgcagtaagatgtcaacacaacctaaaatagacattatgccatatgggggtgccaaagagagacttggtaaaacttgggcgaaatggttctatgccaatgatattcctggaaggaaagcagactgtccatattttgtagcagcagtaaaactataaaactatctcagcagcttggggaaagagtgactgctccaaggggaagagatatagatgggtcattactaaatatgaactatgaggacctacaaactcacatagaccgatacaaggaagattgatgttgctttggggtcactattatgtgttcttggacagggccaaacatgatgtgcattattaattttatgatttgttgcaatggtcgcatgttctttcataaaaccgtggatgcaactggtcaaatacaaaatgcagaatttttttatgattgcattaatgaagttgttgttaaagatgttggagaaagttatgttgttcaaattgtgactgataatggttccaattacaataaagcatgcaaacaacttatagccgagtatccacatattacttggcagatatgtgctgctcacactattaatttaatgttgaaggacatagcacgctatgatgaggttgatgaacaattgtatagtactaagcggatatgcagatttttgtacaagcataatagataatatttatattgtggaattcttgtacaagcataatagttaatatttttatagttaatctgatgatattctaatattaatcttatgttattctgatttttcagtatgcatgctatgatgaaagagaagataggtggagagcttgttagatggaatgccatgaggtttggcacactttttttgttcttacagagtttttgggacagacaagacttgttcgaagcttagatgatgtctaacgattggaaaaataatgatgaagagac

SEQ ID NO: 7173 - DNA, 1634 bp, Zea Mays
atggagcacgactttgatggcgagcggcggcgagcggcaactgtgcggtctgcggcgtcctcgactgctccccctgcgcacaggaagaagcaacgtgaagtctactcaaataatggcgtgtgggctcaaactattcagaagcctaatgacctttatcttggtagcaccggaactcgcaaacaactgcaaggttctattgatgacccatggagtcatagtgataagcggaagaaacagggattcaagtgtgcttattgcgggtgtgctaaggagagtggaggtaagacccgtctaaggtgtcatctagctgatttgtcaggagaagacaagtcatgcctgaatgtaccaaagcgtgtgaggaagataatgttgaatgactatgcaagagggaaaaaggagggcggattataaagagcataaactctttgtgtataaggcgattatggatctagcatatagtgatgctagaagagaaaaaatacctagggatgaagctgaataaatggcgtgggcaataagggaatcattgttggatcaaagggcatctgacaatagttcacctgtaggcagaagtagcactgggacaagcaataccaccccaccattagctgcaggctctcgtaggcagagtaggatggataggtactatcggagtctaagtgtaactcaggacatatgtgatatagatttgcaatgcagtaagatgtcaacacaacctaaaatagacattatgccatatgggggtgccaaagagagacttggtaaaacttgggcgaaatggttctatgccaatgatattcctggaaggaaagcagactgtccatattttgtagcagcagtaaaactataaaactatctcagcagcttggggaaagagtgactgctccaaggggaagagatatagatgggtcattactaaatatgaactatgaggacctacaaactcacatagaccgatacaaggaagattgatgttgctttggggtcactattatgtgttcttggacagggccaaacatgatgtgcattattaattttatgatttgttgcaatggtcgcatgttctttcataaaaccgtggatgcaactggtcaaatacaaaatgcagaatttttttatgattgcattaatgaagttgttgttaaagatgttggagaaagttatgttgttcaaattgtgactgataatggttccaattacaataaagcatgcaaacaacttatagccgagtatccacatattacttggcagatatgtgctgctcacactattaatttaatgttgaaggacatagcacgctatgatgaggttgatgaacaattgtatagtactaagcggatatgcagatttttgtacaagcataatagataatatttatattgtggaattcttgtacaagcataatagttaatatttttatagttaatctgatgatattctaatattaatcttatgttattctgatttttcagtatgcatgctatgatgaaagagaagataggtggagagcttgttagatggaatgccatgaggtttggcacactttttttgttcttacagagtttttgggacagacaagacttgttcgaagcttagatgatgtctaacgattggaaaaataatgatgaagagac

SEQ ID NO: 7174 - DNA, 2285 bp, Zea Mays
cgatgcacggattgcagcacatcgagcagacaaccagtctttcgacacaacggaaacgaaatgtaacacactaggtgtatccccatacaagaactaaggtgctgtttggttcaaaaaatgtaacgcaaatggtaatggtaatggtttcagctcgattactggcggtaacaaatttgaataggctggtatcaaattttagtgtggtatctgattacggttggactaaaacaaacatgatttaatgttatccgttacccattacgttacaaatatgtgaaccaaacagcacctaagtaatgcaagcatgttccttgcgacccgtagcatatttcctaaaatgttccaaacgctgcggcggccaactaccagaatgcttcaatcaatcaaggactgtttcccatcaaaattagcaaaactgagctgcatttgttgtgcagtagccttagccttacggcaaacctccacaccgtatgtgtgtctccccccgcaagctatagggttaggagaaaacaaaacatcagtcaggtgccaacaagaatggactagtaataactactgcaagggcatccatcacacaccttggaaacaggtttcattggcaccaggacgagggtggcctcatggacacatgcacttcgtgttcttcagggccaacgcggaacttcgggacaataatctccagccctgtccctgtttcatcgcagtacgcttccagagtggcgtcttcagggattcgggtagggagtgggatctcccggacaaactctcccggcgggcaatgctcaggagcaggatccgccaacctgaaagtccgatcatgccttttcaggagtggcatccgaccaacgctagtgcatgataccttaacgatcccatttgtaagagtgttcttccatgaaaccttcaccttctgaaaatcagcgaaaggcaggctaacgatgatcaagtagcccttgctgtcctcgtatattgtttttgcagcggttactggtccagaagcatggcgcatcacacctgagaagtcattcatccatgatggctcgaaggtgtggatcacatccatgtcttgggccttgtccgaattcgaattgctgcagtcctcttccattgcggtcggtgaggaatccttcctgcgcttgttacaggtggctgtgatctccatgccatccccagaactgtgattggatggttgcgtcgagaggttaaggccagaaccgttcagcaacttcttgtggtgtccatgtgaactgctctttgcaggagccgcggttgctggcctctcgagctcaaagtctgtgctcggcagattcctccaggactcaaaatcactcgcctcagttgggaccgagaaattggcgtccctcccagtgagctgcatccacctctttaaatcagcctcaggtacacccgccaaatttggcgccctcacgatttcgatcccatgaagacactgtgggttagagaggccacggtagtgcttgcgctgcatccggtgtgagcgcacaaaccctttgtctgcgctgaatgggaactgtggctccccaaggcgtgagtgcccattcatgaagctcctcagctgcatcttccccagggcattctccggacgctccttaaacacccacatgtagatgttctccatgtcgtgctgcaccaggaaagcgtccagtgtggcgctattgccgttcccgccggtggtggggccctggtgcgggtggtgggctgtggcggtgtccatggagagcgcggtgagcagcgactcgcccatggcggcggcggcggcggcggccgtcgtcctcctggcggctcgctcctcgtccgcctgctgctccccttccgtcgctgcgctgtccaaatcgtcggcgcttcctcctccaccgcctccgcacggcgcgctcctctcctccgaatctctccacgagcatcagttagcgaccaggcttcacacctccctcgcgtccatccgccggccgagagggaaatggggctggtgttttttacctttcaaatcaggcggaaaaccggatcaatacccccatccaggacccaaatctaagatccaaccgaactaggagcacgtacctacgcaggtccaagaaacccggtgccctcaaatcgacgaaccgcctccaccatccagccgaacgacggtccaacgatccctcccttcccctcctcctgctgctgcggtgctttgcaatcaaatcaaatgaaataaaaaaaataaacgtagtcgaatcggcgggcgggggctcgtcgcggtcgatggatgagcacagcggggtggg

SEQ ID NO: 7175 - DNA, 1128 bp, Zea Mays
cgtggaagctagcgggcatctcgccgcttgcatgcgtgccacctcgtcccacgccgtggaacctgccgcccgcgtgcataaaagggcggggcagggggctcaggccgtctggactctggactggagggcaccaagctaacatttagttgcaaaggagcgctaggaagaagaagcaacgagccatggcctccggtggcccgaaacccaaactggcctacatcatcttgtacgtgagggacgtggagaaggccgcctccttctacgacgccgccttcggctacaccgtccgccgcctcgaccagtcccgcaagtgggcggagctggagagcggggcgacgaccatcgcgttcacgccgctgcaccagcgggagacggacgagctgtcgggggcggtgcagctgccggactcgtcggccgccgggaggggctccgtagaggtctgcttcgcctacgcggacgtcgacgcggcgtacaagcgcgccgtggacaacggggccgtggccgtgagcgcgccggaggacaagccctggggccagaagtccggcttcgtgcgggacatggacggcaacatcgtgcgcatcgcgagctacgtgcgagagtagtcgcattccgctgcatcaccatcggtcatgtttgtcttgggagaggtaggaccgtggaagatgtaaatggaaccgtggagcagtgaatacaaaaagcgccatctcgtccctgtttccattgatctgtacaattaatgaatagagacttctaaatccgtgtcttagttcttatatttcttcaaatacaatggtagaaaaatatatacttatatttgtttcaaatataatgtatatttgtttcaaatataatggtagactagtcggttgaccgtgcgttgcgacggcatacaacaatacccacgtaaactatccataaaaaaattcaagaatttttattgattgtctccgcccacgtaaactatccataaaaaaatttaagattttttattgattgtcttcattctctgtataatatattttttgatttggctaactgatgttattatttatttcatgcaaatatgtcttggtacaacacggtcaatgaagtgagcgattataagagagttcacaacgattaactgaa

SEQ ID NO: 7176 - DNA, 1855 bp, Zea Mays
tgataattgggaagaaatttgattaattctattattgaattgctgaaaatagatttttgtcatatccgatggatatccgaaacccaatggacatgagcatggatatgaatttctacccgcgggtatagtcctcccaccaaaaagatctccaattccccaccccaaagagctaccctgaccagatttggccgcttcctcctctgcctcccgctaaccctagtccagcaccccgagatctgctccgcgcgagcagccatggcggagacgctcgacatgaccctcgatgacatcatcaagaacaacaagaagagtaacccctcctccggcggggcccgccgcagccgcggcggatccgcccctggcggcggcagcggcggggtcgggccgaccaggcgctccttcaagagggctgggaacaggcaggcgccctaccagccgccgaaggcccctgacgctgcgtggcagcacgacatgtaccctgcggtcgccgcaggaggcggcggcggcgggagggtctcggcgctcgagacgggcaccaagctctacatctccaacctggactttggggtttcgaacgacgatatcaaggagctgttctctgagctaggtgatctgaagcgtttttcgataatatatgatcgaagtgggaggtctaagggaacagctgaagttgtatttgcaaggcgttctgatgctgtagcggcggtgaagaaatataacaatgtccaacttgatggtaagcccatgaagatagagatagttgggaccaatactccaactgcatctgctgctcttccagtctccaatggtggccatgctaggaatgctgtgaggagtgcaccgaggggtgctgccccagcaggtgtgccgcagcgaagacctcatcagaggggtgggaggcgtagtggtggatctgggggtggtcgtcgtggcaaggagcgcagcaagccaaagtcggctgaagaactcgacgctgacttggagaagtatcatgctgatgcgatgcagaccaactaaatgtgttcacaaatttgatattcaacatcaaatatcaagcacattagtccttccattccagctgtttgtgctactatgttcaggggacaacaaaccttatgtttgtgggggtattgctttactgaattttgtgggttttgtttacaatagaactagagttggatgatgctgagtacttccatggaaattacttgcttgcctttagtttctgtacctaatgccgaggagacaagaatcatccaagttactcgacatgtgaaagttgatgatgtatgaaggtacccacatttcctttgaccccccaccgtataatatatcttggaggtaaaagagactgggcttcagatgttccttggtgatctagttgtgcgctttcgatctggtattgctcagatgtttctccgctgtaggctggttcaagatcaagccatctaaggaggaggtggcctgttcatattgtgaaacatcatgatgcttattttgggcatcttaagctatcttctctggcacatcaatgatttcatgagcttcaaggcccctttattttaaaagttgattctttgcataatcctctctgtgggtgcctacaaagtttaaatgtggacatggctgtcactagtctcattgaagcatcatggtgcaaatcctgcttcaagggctcttcgaccgttgcacggtagacgcgtggccacaaacactgctcgtgagcaatccagctatacgtcttcgctgcggaccagaaatctcaattcaatccagctaagtcgtgactcgtgacgtcctccagccctgactcacgattctgcatctgctcgcgtcgcatccgcctcaacgccgc

SEQ ID NO: 7177 - DNA, 1991 bp, Zea Mays
attgtcggtgtcagaagtgggcccatgctcggttcggccacgccccaccagccagccagccagggacccgtcgctgccctctggcgatgagggatattacgggtctgccctgaccaccgcccacgcgcagccaggggtagaaacgaccgcgtcaccgtatttgacccctcaccgtcccacaccagtgtcggcgagtccctcctgtgcctcgtcctccccctttcccctccgagtccagcccggcgccacccactcagccgcggatccgaggcgcagatccgatccggcgatggcgtccacggcggcgaggcggctgcgggagctgcaggcgcagacggggaacaagacctgcgtggactgcgcgcagcggaacccgcagtgggcgagcgtctcctatggggtgttcatgtgcctcgagtgctcgggcaagcaccggggcctcggcgtgcacatcagcttcgtgcgctcggtcaccatggactcctggaccgaggcgcagctccgcaagatggaggccggtggcaacgaccgactcaacgccttcctcacagctcgcggcgttcctaaggagacgccccacgtcgccaagtacaactccaacgccgcagccgcctaccgcgaccgcatcgccgcgctcgctgagggaaagccgtggactgacccgcccgtggtcaaggagacgcccggatctggcgcccccgcccccgctaggaagccgcccgtgcacacatctgccgcctccggcggcggcgggtgggacgactgggacgacgattttcggccggacatgaggcggaatcagtcggttggatcgttcgccgccgcgggtgcgcagtcagggaggcagccgccgaggtccaaatcaacacaggacatgtacacgaggcagcaactggaggcgtcggcggcaaataaggaggactttttcgccaggaggatggcggagaacgagtccaagcctgacgggatcccgccatcccagggcggcaagtacgttgggttcggatccagcccaccgccgtcggctaacaggaacggcggtgctgcccagggcgatgtcatgcagggatttggacgcctttcattagttgcagcatctgctgcccagtctgctgccagtgctgtccaagttggcacaaaagaaatccaatcaaagatgagggatgggggctatgaccagaaggtgaatgaaactgtcagtgttgttgccaataaaactgcagagattggaagcaggacttgggggatcatgagaggagttatggcgctggcctcacaaaaggtagaggaatatgccaaggaaggaggagtgggtggctggggagaggattggcaacacagcgagcagaaaagtgagccttaccaaaggtttgagcatgagaccaacggcaacagttggaattcctcccaaaattcttcatcgaagaacaattccagttcttgggacgattgggacgacccaggcaagaaagatgagcctgcgaaaccgcaccagagcagtgactcctgggctggctgggatgatgggaaggatgatggttttgatagccctagttacaacaatcacagcacctccaacaaggggagcaaccaaaacgggacatccggtggcacattttggacagaaggcggcttccgctgaaaccagtctcttttccatagagctatactttcagagttgttacatgccaggaaacgtgagggtccagtggttggtattatttgggatacttaaacagtcgggtgaaagggtttgtgtgttttgtaccatgtctacaactgttattatatctagtgagatatatttctgtggtcagatgccattcaacactgcccaaatgactaagaaatgtcgatttgaaactgtaatttactcgactttgtcgcatactctttattggttttcgttggttttgtaccgggcagaggcttgccgatatttgccgtggtgggtgttctggcgactggtggcaagcttgtatcacagtagt

SEQ ID NO: 7178 - DNA, 3168 bp, Zea Mays
gttttggactgcgttgatgttattcttattcagtgcaaagatctagagatacagagtggcatatccacagtctgatactctgattaagttacaattatctatctagtggctgaagatccagggatacagatatctatctagtgactatcttgtttctgttattactctgtactgagtggctttatgcctctatttttgtctgttgatgttggtcatcgttcatattctacttcagtatcttgaaaccaatgtacagtgtacctctattgtaactaggctatgtgtcgtccattcagagtggtatactaaattatatcttcatggatgtttggtaacttagcgattggatttttattggtgattcggtacaaccaaaaaggatttccgaaccttgtcctgtgtccgccattggtcggcgctgcagtttgagaagcacgtgggggcggagtcgaagaaccagaacggtaacatcctcctcatcaacgacaagttgctctacgacctgttccacgagctcagaaattggcccccttgtgcggaggagttttgggcgaccgccggggtactcatgactgtgcctgccaccgaagcctcatctgcgccgcaggggcagcaagcaggcgcgcccgctagctgggaacccaacggggttcaggttgacggcgtgacggtggatccccctttgcctggacggggagccatggtgatgctgaccgaggaggagaaagccagcttgtgtctgcttggtttgaagcaaagcagttccacggctgagttggacactatatgcggcattgaagggcctgctgcggaacagatcaaagatgaagcaggtggtgaccatgtgatgcacgatgctctagtgggagtgacagaaacagagtatcagctagacagtgaccttagagatgttagaggactgctgtccactggacttcttgaaggtttcagggtgacctacatgaaggatgaggtggaggaggttggacggataaatggacagggttattcttgtggctgctcaaagtgtaattacaatagtaatattatgaatgcgtgcgagtttgaggagcattatggtcagtcatttgacaaccagattgatcacatcttcttggataccgggatttctctattcagggtggtggaagcactgaaaccttgtaagcttaacatgcttggggatttcattgaagagaagattggtttccctcctaatttggatgagtataacaagtggaaagcttcatttcagaagagaaaagattatttagatgctgtggcttcagatggttgtttgactcagagttcacaggggttggctgcaggggagatgatttacagtttgagagattacttgaaagattctgtcagcaatagcatctcaaaccttaactggagtgcatctaaaaggcggtctgggagacggtttagacaaggagacactgggacttcaactccaacctttagcggaagcccaggcaaagggggttttggccactctactgacacctcagagaagaaaggcactgaagaaactcacaggctttctttatcaagtccagtaaaaatcacgcaaaggccactccgaaactgcagcatagactcaaagtcaaaagaatcaaaaacaagggataccactttgcatccactgattttcaaggaggatggccttgcagataatactttgttgacttacaagttaaagaatggagaggctctaaagcaagggtataaacggggaacatgcatcatctgtaactgttgcaatcaagagttttctccttcccactttgaagaacatgctggcatggggagaagacggcaaccgtatcacaacatttatacattagaaggattatcacttcataagctagctctgcaactgcaagatcatttgaatccaaatggattcgacaatgctagtgtttccagcgtcagtgactaccataaccttacttcttcaggttgtggcagagaaccttctactaccagtggacctattgttcctctgaaacggactttacaagaaagagtggtagaaacagagagttgctatttctgtgggtatggccacacaacgattggaaatatcaatccagacacgattattttctgtaaccagtgcgagagaccatgccacatcaaatgttacaacaatagagttgtaaaaaagaaggtgcctctggaaattttgaaagaatacatgtgttttcacttcttgtgctgccaagaatgtcaatcactccgtgcccgtctagaagaaggactggaaaagtgtgtagggattaccttccttagacggataagatctaatatttgttggcgacttttaagtggaatggatgcaagtagggatgtcaaactctacatgcctcaggtcattgatatcttcaaagatgcatttatggattctactgatgagcacagtgacatcatctcagacatggttaatggcaaaaatggagaccaagagaaggattttcgaggaatgtattgtgcactgttaactgcaagcacacatgttgtctctgctgcgattctgaaagtgcgcatcgaacaaatcgcagaacttgtcctcattgctactcgtagcgagtgcagaaaaaagggttacttcatacttctcctaaagtcgatcgaggcaaatttgagagcctggaatgtaagccttcttactgcgcctgttgaccctgaaatggcacaaatctggtcagagaagctcgggttcaccattttatcagctgaagagaaggagtcaatgctggagtcgcaccccttggtgatgttcaagaacctagtcttggtgcagaaatcacttgcttgagcaaatctgatctatgtttgtttgtactactttagaaatgaaaacccggtttcgagagcttagacagtacggggttaggccgtgttaagtcattttgtttattatttagatttaaaatatttttaaactatttaaatatatattataaattatatctctacgcttgagcgggaaactggaacagtcccaaacactcccatagagtttagacggactagatgttcgtgtattgttacggttttatgtcacatggacacagatagattttgttttaataaataaaatatatgtgctctaatggttaggtggatgtagatgtgaaatcaataactaaggtgtgg

SEQ ID NO: 7179 - DNA, 3098 bp, Zea Mays
gttcgatcccctcccctcgccgcctgccctcgttgtcggccgcctgccgccgccatctcacggcctcctaccttccctcgtggtgggctccaccgcggtctggttcgtcttcgatcgtgtgggatacagcttcctctccgtcctcttgaaagctatcagagcaagcaagccagccactttacctagctagtgttccggctgattccactggcgacgattcgagaaccttgtcctgtgtccgccattggtcggcgctgcagtttgagaagcacgtgggggcggagtcgaagaaccagaacggtaacatcctcctcatcaacgacaagttgctctacgacctgttccacgagctcagaaattggcccccttgtgcggaggagttttgggcgaccgccggggtactcatgactgtgcctgccaccgaagcctcatctgcgccgcaggggcagcaagcaggcgcgcccgctagctgggaacccaacggggttcaggttgacggcgtgacggtggatccccctttgcctggacggggagccatggtgatgctgaccgaggaggagaaagccagcttgtgtctgcttggtttgaagcaaagcagttccacggctgagttggacactatatgcggcattgaagggcctgctgcggaacagatcaaagatgaagcaggtggtgaccatgtgatgcacgatgctctagtgggagtgacagaaacagagtatcagctagacagtgaccttagagatgttagaggactgctgtccactggacttcttgaaggtttcagggtgacctacatgaaggatgaggtggaggaggttggacggataaatggacagggttattcttgtggctgctcaaagtgtaattacaatagtaatattatgaatgcgtgcgagtttgaggagcattatggtcagtcatttgacaaccagattgatcacatcttcttggataccgggatttctctattcagggtggtggaagcactgaaaccttgtaagcttaacatgcttggggatttcattgaagagaagattggtttccctcctaatttggatgagtataacaagtggaaagaagagaaaagattatttagatgctgtggcttcagatggttgtttgactcagagttcacaggggttggctgcaggggagatgatttacagtttgagagattacttgaaagattctgtcagcaatagcatctcaaaccttaactggagtgcatctaaaaggcggtctgggagacggtttagacaaggagacactgggacttcaactccaacctttagcggaagcccaggcaaagggggttttggccactctactgacacctcagagaagaaaggcactgaagaaactcacagtgagaacacaggagaccctctcagcatcgatggtgttaagtctgattctccattacctactgcagtaaccactaaccactctaaacacgattcaacaaatttagggctttctttatcaagtccagtaaaaatcacgcaaaggccactccgaaactgcagcatagactcaaagtcaaaagaatcaaaaacaagggataccactttgcatccactgattttcaaggaggatggccttgcagataatactttgttgacttacaagttaaagaatggagaggctctaaagcaagggtataaacggggaacatgcatcatctgtaactgttgcaatcaagagttttctccttcccactttgaagaacatgctggcatggggagaagacggcaaccgtatcacaacatttatacattagaaggattatcacttcataagctagctctgcaactgcaagatcatttgaatccaaatggattcgacaatgctagtgtttccagcgtcagtgactaccataaccttacttcttcaggttgtggcagagaaccttctactaccagtggacctattgttcctctgaaacggactttacaagaaagagtggtagaaacagagagttgctatttctgtgggtatggccacacaacgattggaaatatcaatccagacacgattattttctgtaaccagtgcgagagaccatgccacatcaaatgttacaacaatagagttgtaaaaaagaaggtgcctctggaaattttgaaagaatacatgtgttttcacttcttgtgctgccaagaatgtcaatcactccgtgcccgtctagaagaaggactggaaaagtgtgtagggattaccttccttagacggataagatctaatatttgttggcgacttttaagtggaatggatgcaagtagggatgtcaaactctacatgcctcaggtcattgatatcttcaaagatgcatttatggattctactgatgagcacagtgacatcatctcagacatggttaatggcaaaaatggagaccaagagaaggattttcgaggaatgtattgtgcactgttaactgcaagcacacatgttgtctctgctgcgattctgaaagtgcgcatcgaacaaatcgcagaacttgtcctcattgctactcgtagcgagtgcagaaaaaagggttacttcatacttctcctaaagtcgatcgaggcaaatttgagagcctggaatgtaagccttcttactgcgcctgttgaccctgaaatggcacaaatctggtcagagaagctcgggttcaccattttatcagctgaagagaaggagtcaatgctggagtcgcaccccttggtgatgttcaagaacctagtcttggtgcagaaatcacttgcttgagcaaatctgatctatgtttgtttgtactactttagaaatgaaaacccggtttcgagagcttagacagtacggggttaggccgtgttaagtcattttgtttattatttagatttaaaatatttttaaactatttaaatatatattataaattatatctctacgcttgagcgggaaactggaacagtcccaaacactcccatagagtttagacggactagatgttcgtgtattgttacggttttatgtcacatggacacagatagattttgttttaataaataaaatatatgtgctctaatggttaggtggatgtagatgtgaaatcaataactaaggtgtgg

SEQ ID NO: 7180 - DNA, 2656 bp, Zea Mays
ctactcaccacgctagccgttcgatcccctcccctcgccgcctgccctcgttgtcggccgcctgccgccgccatctcacggcctcctaccttccctcgtggtgggctccaccgcggtctggttcgtcttcgatcgtgtgggatacagcttcctctccgtcctcttgaaagctatcagagcaagcaagccagccactttacctagctagtgttccggctgattccactggcgacgattcgaggcaaagcagttccacggctgagttggacactatatgcggcattgaagggcctgctgcggaacagatcaaagatgaagcaggtggtgaccatgtgatgcacgatgctctagtgggagtgacagaaacagagtatcagctagacagtgaccttagagatgttagaggactgctgtccactggacttcttgaaggtttcagggtgacctacatgaaggatgaggtggaggaggttggacggataaatggacagggttattcttgtggctgctcaaagtgtaattacaatagtaatattatgaatgcgtgcgagtttgaggagcattatggtcagtcatttgacaaccagattgatcacatcttcttggataccgggatttctctattcagggtggtggaagcactgaaaccttgtaagcttaacatgcttggggatttcattgaagagaagattggtttccctcctaatttggatgagtataacaagtggaaagcttcatttcagaagagaaaagattatttagatgctgtggcttcagatggttgtttgactcagagttcacaggggttggctgcaggggagatgatttacagtttgagagattacttgaaagattctgtcagcaatagcatctcaaaccttaactggagtgcatctaaaaggcggtctgggagacggtttagacaaggagacactgggacttcaactccaacctttagcggaagcccaggcaaagggggttttggccactctactgacacctcagagaagaaaggcactgaagaaactcacaggctttctttatcaagtccagtaaaaatcacgcaaaggccactccgaaactgcagcatagactcaaagtcaaaagaatcaaaaacaagggataccactttgcatccactgattttcaaggaggatggccttgcagataatactttgttgacttacaagttaaagaatggagaggctctaaagcaagggtataaacggggaacatgcatcatctgtaactgttgcaatcaagagttttctccttcccactttgaagaacatgctggcatggggagaagacggcaaccgtatcacaacatttatacattagaaggattatcacttcataagctagctctgcaactgcaagatcatttgaatccaaatggattcgacaatgctagtgtttccagcgtcagtgactaccataaccttacttcttcaggttgtggcagagaaccttctactaccagtggacctattgttcctctgaaacggactttacaagaaagagtggtagaaacagagagttgctatttctgtgggtatggccacacaacgattggaaatatcaatccagacacgattattttctgtaaccagtgcgagagaccatgccacatcaaatgttacaacaatagagttgtaaaaaagaaggtgcctctggaaattttgaaagaatacatgtgttttcacttcttgtgctgccaagaatgtcaatcactccgtgcccgtctagaagaaggactggaaaagtgtgtagggattaccttccttagacggataagatctaatatttgttggcgacttttaagtggaatggatgcaagtagggatgtcaaactctacatgcctcaggtcattgatatcttcaaagatgcatttatggattctactgatgagcacagtgacatcatctcagacatggttaatggcaaaaatggagaccaagagaaggattttcgaggaatgtattgtgcactgttaactgcaagcacacatgttgtctctgctgcgattctgaaagtgcgcatcgaacaaatcgcagaacttgtcctcattgctactcgtagcgagtgcagaaaaaagggttacttcatacttctcctaaagtcgatcgaggcaaatttgagagcctggaatgtaagccttcttactgcgcctgttgaccctgaaatggcacaaatctggtcagagaagctcgggttcaccattttatcagctgaagagaaggagtcaatgctggagtcgcaccccttggtgatgttcaagaacctagtcttggtgcagaaatcacttgcttgagcaaatctgatctatgtttgtttgtactactttagaaatgaaaacccggtttcgagagcttagacagtacggggttaggccgtgttaagtcattttgtttattatttagatttaaaatatttttaaactatttaaatatatattataaattatatctctacgcttgagcgggaaactggaacagtcccaaacactcccatagagtttagacggactagatgttcgtgtattgttacggttttatgtcacatggacacagatagattttgttttaataaataaaatatatgtgctctaatggttaggtggatgtagatgtgaaatcaataactaaggtgtgg

SEQ ID NO: 7181 - DNA, 3136 bp, Zea Mays
ctgcttggtcggcctactcaccacgctagccgttcgatcccctcccctcgccgcctgccctcgttgtcggccgcctgccgccgccatctcacggcctcctaccttccctcgtggtgggctccaccgcggtctggttcgtcttcgatcgtgtgggatacagcttcctctccgtcctcttgaaagctatcagagcaagcaagccagccactttacctagctagtgttccggctgattccactggcgacgattcgagcaatgtacagtgtacctctattgtaactaggctatgtgtcgtccattcagagtggtatactaaattatatcttcatggatgtttggtaacttagcgattggatttttattggtgattcggtacaaccaaaaaggatttccggtatttattttgagaagcacgtgggggcggagtcgaagaaccagaacggtaacatcctcctcatcaacgacaagttgctctacgacctgttccacgagctcagaaattggcccccttgtgcggaggagttttgggcgaccgccggggtactcatgactgtgcctgccaccgaagcctcatctgcgccgcaggggcagcaagcaggcgcgcccgctagctgggaacccaacggggttcaggttgacggcgtgacggtggatccccctttgcctggacggggagccatggtgatgctgaccgaggaggagaaagccagcttgtgtctgcttggtttgaagcaaagcagttccacggctgagttggacactatatgcggcattgaagggcctgctgcggaacagatcaaagatgaagcaggtggtgaccatgtgatgcacgatgctctagtgggagtgacagaaacagagtatcagctagacagtgaccttagagatgttagaggactgctgtccactggacttcttgaaggtttcagggtgacctacatgaaggatgaggtggaggaggttggacggataaatggacagggttattcttgtggctgctcaaagtgtaattacaatagtaatattatgaatgcgtgcgagtttgaggagcattatggtcagtcatttgacaaccagattgatcacatcttcttggataccgggatttctctattcagggtggtggaagcactgaaaccttgtaagcttaacatgcttggggatttcattgaagagaagattggtttccctcctaatttggatgagtataacaagtggaaagaagagaaaagattatttagatgctgtggcttcagatggttgtttgactcagagttcacaggggttggctgcaggggagatgatttacagtttgagagattacttgaaagattctgtcagcaatagcatctcaaaccttaactggagtgcatctaaaaggcggtctgggagacggtttagacaaggagacactgggacttcaactccaacctttagcggaagcccaggcaaagggggttttggccactctactgacacctcagagaagaaaggcactgaagaaactcacaggctttctttatcaagtccagtaaaaatcacgcaaaggccactccgaaactgcagcatagactcaaagtcaaaagaatcaaaaacaagggataccactttgcatccactgattttcaaggaggatggccttgcagataatactttgttgacttacaagttaaagaatggagaggctctaaagcaagggtataaacggggaacatgcatcatctgtaactgttgcaatcaagagttttctccttcccactttgaagaacatgctggcatggggagaagacggcaaccgtatcacaacatttatacattagaaggattatcacttcataagctagctctgcaactgcaagatcatttgaatccaaatggattcgacaatgctagtgtttccagcgtcagtgactaccataaccttacttcttcaggttgtggcagagaaccttctactaccagtggacctattgttcctctgaaacggactttacaagaaagagtggtagaaacagagagttgctatttctgtgggtatggccacacaacgattggaaatatcaatccagacacgattattttctgtaaccagtgcgagagaccatgccacatcaaatgttacaacaatagagttgtaaaaaagaaggtgcctctggaaattttgaaagaatacatgtgttttcacttcttgtgctgccaagaatgtcaatcactccgtgcccgtctagaagaaggactggaaaagtgtgtagggattaccttccttagacggataagatctaatatttgttggcgacttttaagtggaatggatgcaagtagggatgtcaaactctacatgcctcaggtcattgatatcttcaaagatgcatttatggattctactgatgagcacagtgacatcatctcagacatggttaatggcaaaaatggagaccaagagaaggattttcgaggaatgtattgtgcactgttaactgcaagcacacatgttgtctctgctgcgattctgaaagtgcgcatcgaacaaatcgcagaacttgtcctcattgctactcgtagcgagtgcagaaaaaagggttacttcatacttctcctaaagtcgatcgaggcaaatttgagagcctggaatgtaagccttcttactgcgcctgttgaccctgaaatggcacaaatctggtcagagaagctcgggttcaccattttatcagctgaagagaaggagtcaatgctggagtcgcaccccttggtgatgttcaagaacctagtcttggtgcagaaatcacttgcttgagcaaatctgatctatgtttgtttgtactactttagaaatgaaaacccggtttcgagagcttagacagtacggggttaggccgtgttaagtcattttgtttattatttagatttaaaatatttttaaactatttaaatatatattataaattatatctctacgcttgagcgggaaactggaacagtcccaaacactcccatagagtttagacggactagatgttcgtgtattgttacggttttatgtcacatggacacagatagattttgttttaataaataaaatatatgtgctctaatggttaggtggatgtagatgtgaaatcaataactaaggtgtgg

SEQ ID NO: 7182 - DNA, 3085 bp, Zea Mays
gtcgacgccaagggcggacatgggcaaggcccaacccatctagagctctactgcttggtcggcctactcaccacgctagccgttcgatcccctcccctcgccgcctgccctcgttgtcggccgcctgccgccgccatctcacggcctcctaccttccctcgtggtgggctccaccgcggtctggttcgtcttcgatcgtgtgggatacagcttcctctccgtcctcttgaaagctatcagagcaagcaagccagccactttacctagctagtgttccggctgattccactggcgacgattcgagaaccttgtcctgtgtccgccattggtcggcgctgcagtttgagaagcacgtgggggcggagtcgaagaaccagaacggtaacatcctcctcatcaacgacaagttgctctacgacctgttccacgagctcagaaattggcccccttgtgcggaggagttttgggcgaccgccggggtactcatgactgtgcctgccaccgaagcctcatctgcgccgcaggggcagcaagcaggcgcgcccgctagctgggaacccaacggggttcaggttgacggcgtgacggtggatccccctttgcctggacggggagccatggtgatgctgaccgaggaggagaaagccagcttgtgtctgcttggtttgaagcaaagcagttccacggctgagttggacactatatgcggcattgaagggcctgctgcggaacagatcaaagatgaagcaggtggtgaccatgtgatgcacgatgctctagtgggagtgacagaaacagagtatcagctagacagtgaccttagagatgttagaggactgctgtccactggacttcttgaaggtttcagggtgacctacatgaaggatgaggtggaggaggttggacggataaatggacagggttattcttgtggctgctcaaagtgtaattacaatagtaatattatgaatgcgtgcgagtttgaggagcattatggtcagtcatttgacaaccagattgatcacatcttcttggataccgggatttctctattcagggtggtggaagcactgaaaccttgtaagcttaacatgcttggggatttcattgaagagaagattggtttccctcctaatttggatgagtataacaagtggaaagcttcatttcagaagagaaaagattatttagatgctgtggcttcagatggttgtttgactcagagttcacaggggttggctgcaggggagatgatttacagtttgagagattacttgaaagattctgtcagcaatagcatctcaaaccttaactggagtgcatctaaaaggcggtctgggagacggtttagacaaggagacactgggacttcaactccaacctttagcggaagcccaggcaaagggggttttggccactctactgacacctcagagaagaaaggcactgaagaaactcacaggctttctttatcaagtccagtaaaaatcacgcaaaggccactccgaaactgcagcatagactcaaagtcaaaagaatcaaaaacaagggataccactttgcatccactgattttcaaggaggatggccttgcagataatactttgttgacttacaagttaaagaatggagaggctctaaagcaagggtataaacggggaacatgcatcatctgtaactgttgcaatcaagagttttctccttcccactttgaagaacatgctggcatggggagaagacggcaaccgtatcacaacatttatacattagaaggattatcacttcataagctagctctgcaactgcaagatcatttgaatccaaatggattcgacaatgctagtgtttccagcgtcagtgactaccataaccttacttcttcaggttgtggcagagaaccttctactaccagtggacctattgttcctctgaaacggactttacaagaaagagtggtagaaacagagagttgctatttctgtgggtatggccacacaacgattggaaatatcaatccagacacgattattttctgtaaccagtgcgagagaccatgccacatcaaatgttacaacaatagagttgtaaaaaagaaggtgcctctggaaattttgaaagaatacatgtgttttcacttcttgtgctgccaagaatgtcaatcactccgtgcccgtctagaagaaggactggaaaagtgtgtagggattaccttccttagacggataagatctaatatttgttggcgacttttaagtggaatggatgcaagtagggatgtcaaactctacatgcctcaggtcattgatatcttcaaagatgcatttatggattctactgatgagcacagtgacatcatctcagacatggttaatggcaaaaatggagaccaagagaaggattttcgaggaatgtattgtgcactgttaactgcaagcacacatgttgtctctgctgcgattctgaaagtgcgcatcgaacaaatcgcagaacttgtcctcattgctactcgtagcgagtgcagaaaaaagggttacttcatacttctcctaaagtcgatcgaggcaaatttgagagcctggaatgtaagccttcttactgcgcctgttgaccctgaaatggcacaaatctggtcagagaagctcgggttcaccattttatcagctgaagagaaggagtcaatgctggagtcgcaccccttggtgatgttcaagaacctagtcttggtgcagaaatcacttgcttgagcaaatctgatctatgtttgtttgtactactttagaaatgaaaacccggtttcgagagcttagacagtacggggttaggccgtgttaagtcattttgtttattatttagatttaaaatatttttaaactatttaaatatatattataaattatatctctacgcttgagcgggaaactggaacagtcccaaacactcccatagagtttagacggactagatgttcgtgtattgttacggttttatgtcacatggacacagatagattttgttttaataaataaaatatatgtgctctaatggttaggtggatgtagatgtgaaatcaataactaaggtgtgg

SEQ ID NO: 7183 - DNA, 3098 bp, Zea Mays
cttcatcttctcatgggtttcttctttgcgccgcgcaggtgctgtcgtctgtcgacgccaagggcggacatgggcaaggcccaacccatctagagctctactgcttggtcggcctactcaccacgctagccgttcgatcccctcccctcgccgcctgccctcgttgtcggccgcctgccgccgccatctcacggcctcctaccttccctcgtggtgggctccaccgcggtctggttcgtcttcgatcgtgtgggatacagcttcctctccgtcctcttgaaagctatcagagcaagcaagccagccactttacctagctagtgttccggctgattccactggcgacgattcgagtttgagaagcacgtgggggcggagtcgaagaaccagaacggtaacatcctcctcatcaacgacaagttgctctacgacctgttccacgagctcagaaattggcccccttgtgcggaggagttttgggcgaccgccggggtactcatgactgtgcctgccaccgaagcctcatctgcgccgcaggggcagcaagcaggcgcgcccgctagctgggaacccaacggggttcaggttgacggcgtgacggtggatccccctttgcctggacggggagccatggtgatgctgaccgaggaggagaaagccagcttgtgtctgcttggtttgaagcaaagcagttccacggctgagttggacactatatgcggcattgaagggcctgctgcggaacagatcaaagatgaagcaggtggtgaccatgtgatgcacgatgctctagtgggagtgacagaaacagagtatcagctagacagtgaccttagagatgttagaggactgctgtccactggacttcttgaaggtttcagggtgacctacatgaaggatgaggtggaggaggttggacggataaatggacagggttattcttgtggctgctcaaagtgtaattacaatagtaatattatgaatgcgtgcgagtttgaggagcattatggtcagtcatttgacaaccagattgatcacatcttcttggataccgggatttctctattcagggtggtggaagcactgaaaccttgtaagcttaacatgcttggggatttcattgaagagaagattggtttccctcctaatttggatgagtataacaagtggaaagcttcatttcagaagagaaaagattatttagatgctgtggcttcagatggttgtttgactcagagttcacaggggttggctgcaggggagatgatttacagtttgagagattacttgaaagattctgtcagcaatagcatctcaaaccttaactggagtgcatctaaaaggcggtctgggagacggtttagacaaggagacactgggacttcaactccaacctttagcggaagcccaggcaaagggggttttggccactctactgacacctcagagaagaaaggcactgaagaaactcacaggctttctttatcaagtccagtaaaaatcacgcaaaggccactccgaaactgcagcatagactcaaagtcaaaagaatcaaaaacaagggataccactttgcatccactgattttcaaggaggatggccttgcagataatactttgttgacttacaagttaaagaatggagaggctctaaagcaagggtataaacggggaacatgcatcatctgtaactgttgcaatcaagagttttctccttcccactttgaagaacatgctggcatggggagaagacggcaaccgtatcacaacatttatacattagaaggattatcacttcataagctagctctgcaactgcaagatcatttgaatccaaatggattcgacaatgctagtgtttccagcgtcagtgactaccataaccttacttcttcaggttgtggcagagaaccttctactaccagtggacctattgttcctctgaaacggactttacaagaaagagtggtagaaacagagagttgctatttctgtgggtatggccacacaacgattggaaatatcaatccagacacgattattttctgtaaccagtgcgagagaccatgccacatcaaatgttacaacaatagagttgtaaaaaagaaggtgcctctggaaattttgaaagaatacatgtgttttcacttcttgtgctgccaagaatgtcaatcactccgtgcccgtctagaagaaggactggaaaagtgtgtagggattaccttccttagacggataagatctaatatttgttggcgacttttaagtggaatggatgcaagtagggatgtcaaactctacatgcctcaggtcattgatatcttcaaagatgcatttatggattctactgatgagcacagtgacatcatctcagacatggttaatggcaaaaatggagaccaagagaaggattttcgaggaatgtattgtgcactgttaactgcaagcacacatgttgtctctgctgcgattctgaaagtgcgcatcgaacaaatcgcagaacttgtcctcattgctactcgtagcgagtgcagaaaaaagggttacttcatacttctcctaaagtcgatcgaggcaaatttgagagcctggaatgtaagccttcttactgcgcctgttgaccctgaaatggcacaaatctggtcagagaagctcgggttcaccattttatcagctgaagagaaggagtcaatgctggagtcgcaccccttggtgatgttcaagaacctagtcttggtgcagaaatcacttgcttgagcaaatctgatctatgtttgtttgtactactttagaaatgaaaacccggtttcgagagcttagacagtacggggttaggccgtgttaagtcattttgtttattatttagatttaaaatatttttaaactatttaaatatatattataaattatatctctacgcttgagcgggaaactggaacagtcccaaacactcccatagagtttagacggactagatgttcgtgtattgttacggttttatgtcacatggacacagatagattttgttttaataaataaaatatatgtgctctaatggttaggtggatgtagatgtgaaatcaataactaaggtgtgg

SEQ ID NO: 7184 - DNA, 3239 bp, Zea Mays
cttcatcttctcatgggtttcttctttgcgccgcgcaggtgctgtcgtctgtcgacgccaagggcggacatgggcaaggcccaacccatctagagctctactgcttggtcggcctactcaccacgctagccgttcgatcccctcccctcgccgcctgccctcgttgtcggccgcctgccgccgccatctcacggcctcctaccttccctcgtggtgggctccaccgcggtctggttcgtcttcgatcgtgtgggatacagcttcctctccgtcctcttgaaagctatcagagcaagcaagccagccactttacctagctagtgttccggctgattccactggcgacgattcgagcaatgtacagtgtacctctattgtaactaggctatgtgtcgtccattcagagtggtatactaaattatatcttcatggatgtttggtaacttagcgattggatttttattggtgattcggtacaaccaaaaaggatttccgtttgagaagcacgtgggggcggagtcgaagaaccagaacggtaacatcctcctcatcaacgacaagttgctctacgacctgttccacgagctcagaaattggcccccttgtgcggaggagttttgggcgaccgccggggtactcatgactgtgcctgccaccgaagcctcatctgcgccgcaggggcagcaagcaggcgcgcccgctagctgggaacccaacggggttcaggttgacggcgtgacggtggatccccctttgcctggacggggagccatggtgatgctgaccgaggaggagaaagccagcttgtgtctgcttggtttgaagcaaagcagttccacggctgagttggacactatatgcggcattgaagggcctgctgcggaacagatcaaagatgaagcaggtggtgaccatgtgatgcacgatgctctagtgggagtgacagaaacagagtatcagctagacagtgaccttagagatgttagaggactgctgtccactggacttcttgaaggtttcagggtgacctacatgaaggatgaggtggaggaggttggacggataaatggacagggttattcttgtggctgctcaaagtgtaattacaatagtaatattatgaatgcgtgcgagtttgaggagcattatggtcagtcatttgacaaccagattgatcacatcttcttggataccgggatttctctattcagggtggtggaagcactgaaaccttgtaagcttaacatgcttggggatttcattgaagagaagattggtttccctcctaatttggatgagtataacaagtggaaagcttcatttcagaagagaaaagattatttagatgctgtggcttcagatggttgtttgactcagagttcacaggggttggctgcaggggagatgatttacagtttgagagattacttgaaagattctgtcagcaatagcatctcaaaccttaactggagtgcatctaaaaggcggtctgggagacggtttagacaaggagacactgggacttcaactccaacctttagcggaagcccaggcaaagggggttttggccactctactgacacctcagagaagaaaggcactgaagaaactcacaggctttctttatcaagtccagtaaaaatcacgcaaaggccactccgaaactgcagcatagactcaaagtcaaaagaatcaaaaacaagggataccactttgcatccactgattttcaaggaggatggccttgcagataatactttgttgacttacaagttaaagaatggagaggctctaaagcaagggtataaacggggaacatgcatcatctgtaactgttgcaatcaagagttttctccttcccactttgaagaacatgctggcatggggagaagacggcaaccgtatcacaacatttatacattagaaggattatcacttcataagctagctctgcaactgcaagatcatttgaatccaaatggattcgacaatgctagtgtttccagcgtcagtgactaccataaccttacttcttcaggttgtggcagagaaccttctactaccagtggacctattgttcctctgaaacggactttacaagaaagagtggtagaaacagagagttgctatttctgtgggtatggccacacaacgattggaaatatcaatccagacacgattattttctgtaaccagtgcgagagaccatgccacatcaaatgttacaacaatagagttgtaaaaaagaaggtgcctctggaaattttgaaagaatacatgtgttttcacttcttgtgctgccaagaatgtcaatcactccgtgcccgtctagaagaaggactggaaaagtgtgtagggattaccttccttagacggataagatctaatatttgttggcgacttttaagtggaatggatgcaagtagggatgtcaaactctacatgcctcaggtcattgatatcttcaaagatgcatttatggattctactgatgagcacagtgacatcatctcagacatggttaatggcaaaaatggagaccaagagaaggattttcgaggaatgtattgtgcactgttaactgcaagcacacatgttgtctctgctgcgattctgaaagtgcgcatcgaacaaatcgcagaacttgtcctcattgctactcgtagcgagtgcagaaaaaagggttacttcatacttctcctaaagtcgatcgaggcaaatttgagagcctggaatgtaagccttcttactgcgcctgttgaccctgaaatggcacaaatctggtcagagaagctcgggttcaccattttatcagctgaagagaaggagtcaatgctggagtcgcaccccttggtgatgttcaagaacctagtcttggtgcagaaatcacttgcttgagcaaatctgatctatgtttgtttgtactactttagaaatgaaaacccggtttcgagagcttagacagtacggggttaggccgtgttaagtcattttgtttattatttagatttaaaatatttttaaactatttaaatatatattataaattatatctctacgcttgagcgggaaactggaacagtcccaaacactcccatagagtttagacggactagatgttcgtgtattgttacggttttatgtcacatggacacagatagattttgttttaataaataaaatatatgtgctctaatggttaggtggatgtagatgtgaaatcaataactaaggtgtgg

SEQ ID NO: 7185 - DNA, 1826 bp, Zea Mays
cccctcgccgcctgccctcgttgtcggccgcctgccgccgccatctcacggcctcctaccttccctcgtggtgggctccaccgcggtctggttcgtcttcgatcgtgtgggatacagcttcctctccgtcctcttgaaagctatcagagcaagcaagccagccactttacctagctagtgttccggctgattccactggcgacgattcgagattggatttttattggtgattcggtacaaccaaaaaggatttccgaaccttgtcctgtgtccgccattggtcggcgctgcagtttgagaagcacgtgggggcggagtcgaagaaccagaacggtaacatcctcctcatcaacgacaagttgctctacgacctgttccacgagctcagaaattggcccccttgtgcggaggagttttgggcgaccgccggggtactcatgactgtgcctgccaccgaagcctcatctgcgccgcaggggcagcaagcaggcgcgcccgctagctgggaacccaacggggttcaggttgacggcgtgacggtggatccccctttgcctggacggggagccatggtgatgctgaccgaggaggagaaagccagcttgtgtctgcttggtttgaagcaaagcagttccacggctgagttggacactatatgcggcattgaagggcctgctgcggaacagatcaaagatgaagcaggtggtgaccatgtgatgcacgatgctctagtgggagtgacagaaacagagtatcagctagacagtgaccttagagatgttagaggactgctgtccactggacttcttgaaggtttcagggtgacctacatgaaggatgaggtggaggaggttggacggataaatggacagggttattcttgtggctgctcaaagtgtaattacaatagtaatattatgaatgcgtgcgagtttgaggagcattatggtcagtcatttgacaaccagattgatcacatcttcttggataccgggatttctctattcagggtggtggaagcactgaaaccttgtaagcttaacatgcttggggatttcattgaagagaagattggtttccctcctaatttggatgagtataacaagtggaaagcttcatttcagaagagaaaagattatttagatgctgtggcttcagatggttgtttgactcagagttcacaggggttggctgcaggggagatgatttacagtttgagagattacttgaaagattctgtcagcaatagcatctcaaaccttaactggagtgcatctaaaaggcggtctgggagacggtttagacaaggagacactgggacttcaactccaacctttagcggaagcccaggcaaagggggttttggccactctactgacacctcagagaagaaaggcactgaagaaactcacagtgagaacacaggagaccctctcagcatcgatggtgttaagtctgattctccattacctactgcagtaaccactaaccactctaaacacgattcaacaaatttagggctttctttatcaagtccagtaaaaatcacgcaaaggccactccgaaactgcagcatagactcaaagtcaaaagaatcaaaaacaagggataccactttgcatccactgattttcaaggaggatggccttgcagataatactttgttgacttacaagttaaagaatggagaggctctaaagcaagggtataaacggggaacatgcatcatctgtaactgttgcaatcaagagttttctccttcccactttgaagaacatgctggcatggggagaagacggcaacctggtgaaaattttatgtttcag

SEQ ID NO: 7186 - DNA, 1626 bp, Zea Mays
gtttgaatatgggcatgagtatggggtgatcttggctatcaggatgcagtggatagtgcagatgctgttgccaagcttctcaatgtaagcacagataacatactgattcagtctactggtgtcattggtcaaaggataaagaaggaggcacttttaaattcactacctagacttgtgggctcactgtcttcttcagttcagggtgcgaattctgctgctgtggccattacaactacagaccttgttagcaagagcattgctgtccagactgagattggaggagtggctattagaataggtgggatggctaaaggttctggaatgattcacccaaatatggcaacaatgcttggtgttttgaccacagatgctcaagtcagcagtgatgtctggagagaaatgatccggatgtcagtgagtagaagtttcaaccaaattacagtggatggtgatactagtaccaatgactgtgttattgctatggcaagtgggttgtctggtttatctggaattcaaagtcttgatagcattgaggctcaacagttccaagcatgcctagatgcagtaatgcaaagtcttgcaaaatccatagcatgggatggtgagggtgcaacatgcctaattgaggttactgtaagtggcgccaacaacgaggcagaagctgctaaaattgctcgttcagtagcatcttcttctttggttaaagccgctatatttggaagagacccaaattggggacgaattgcttgctcagttggttattcaggcattcaatttgacgcaaatcgacttgatatttctctgggagttattccactaatgaaaaatgggcaaccactcccctttgacagattgaccgctagcaagtatctcaaagatgctggagatgcccatggtacagtaaacattgatatatcagttgggagtggaggaggaaatggaaaggcatggggctgtgatctgagctacaaatatgttgaaataaatgctgaatatacaacatgagatttatatttgccatgaagaaaaaaaatcttgaaatgatgaatgggtgcgactaccgtcaggagaatgtagtttcgtgttgcaatggcagccttgcggatgtattatttcacgtgagatcaatcagaccaatatttcataagtgtaataatgtgatgaataacgatgggcgcaataacaacactgacgatgccaccttgttcggttctgaatttctgatgatgagaaagcattggtcagacaaataattttggaattcggtatacaaagctctggttctgccgtcctgcgtatcaaactgaagctccacttttatgtcagttggactgatatggtgttaatttcaccactgatacctatatcaattggattccttgacggtttgccagccgcagttctcttgttttaacattttagccttacaaacacaacgtgatgttgatgtagtttgtaacgtggaatgtcagaaataatattgatacaatgttgtagatttgttgttttatttgaaattatgtacattgctttagacgaatctcactaagtcatattcgatttggaaaagccaacgtttctaggttcatgaatagttataatatgagagaataaagatgtgctgtt

SEQ ID NO: 7187 - DNA, 2788 bp, Zea Mays
gcatagcaagcggcaagcgctcttttgaccggtctcccgaccccgaagaccacttgccccctccaggccgaggccgccgccgccaactactgacacagtgacacgcaccaatgaccaacccggcggccggccacgaacgataacacgccggcccgcctcgccacgctcccaccctcctgcctccgcgcgccacgaccagccgccccagcagcagatgtcgcctccgtccgtcctgctcctccactcccgcatcccgcttcagccccgccccttcaggatgaactcccgggcagctccgagcagggtcgtcgtctgctccgtcgcgtctaccgaggggttcatctccgcagcgccgatcctcctccccgatggcccttggaaacaggtggaaggcggcgtcactgccgcgaaggggttcaaggcggcgggtatctacagtgggttgcgtgccaaaggcgagaagcctgacttggcactggtcgcctgcgacgtcgacgccactgtagcaggagcatttacaacaaacgtcgtagccgccgcacctgttttgtattgcaagcatgtccttagtacatcgaaaacaggtcgtgctgtgttaattaatgctggacaagcaaatgctgcaactgtaagtgtttataagcaccatgtcatagtcatcagtagcagttatgaactcagtgactgatatttgttgaagtgttaggctgactccagcagttcacccaaagcttacccataagcactgttttgcactgtagactgcactgttcgcagagtggagtttgaatatgggcatgagtatgggtaagttgttggagatagtcttagagtggacgcgctagcgagttcgacccaaaaggttaagctgatgggagaaagtagtttatgcaccttttgggttgaactggttagtgcatccactctaacttggtatcaaagccagaggtctcaagttcgaatcctggcagaggctttatttgtgccttcacccattttattccatgtttgcgcctttctctttggctgcgtttgctcctttctctctggctgcacgtgagtgaagatgttgaagtgtataagtggataaactatcttcttccgtcagcttaagcttttgggtcgaactggctagtacctccactctaacaatattgaggttttgtctcaaatgattgcctatcagggtgatcttggctatcaggatgcagtggatagtgcagatgctgttgccaagcttctcaatgtaagcacagataacatactgattcagtctactggtgtcattggtcaaaggataaagaaggaggcacttttaaattcactacctagacttgtgggctcactgtcttcttcagttcagggtgcgaattctgctgctgtggccattacaactacagaccttgttagcaagagcattgctgtccagactgagattggaggagtggctattagaataggtgggatggctaaaggttctggaatgattcacccaaatatggcaacaatgcttggtgttttgaccacagatgctcaagtcagcagtgatgtctggagagaaatgatccggatgtcagtgagtagaagtttcaaccaaattacagtggatggtgatactagtaccaatgactgtgttattgctatggcaagtgggttgtctggtttatctggaattcaaagtcttgatagcattgaggctcaacagttccaagcatgcctagatgcagtaatgcaaagtcttgcaaaatccatagcatgggatggtgagggtgcaacatgcctaattgaggttactgtaagtggcgccaacaacgaggcagaagctgctaaaattgctcgttcagtagcatcttcttctttggttaaagccgctatatttggaagagacccaaattggggacgaattgcttgctcagttggttattcaggcattcaatttgacgcaaatcgacttgatatttctctgggagttattccactaatgaaaaatgggcaaccactcccctttgacagattgaccgctagcaagtatctcaaagatgctggagatgcccatggtacagtaaacattgatatatcagttgggagtggaggaggaaatggaaaggcatggggctgtgatctgagctacaaatatgttgaaataaatgctgaatatacaacatgagatttatatttgccatgaagaaaaaaaatcttgaaatgatgaatgggtgcgactaccgtcaggagaatgtagtttcgtgttgcaatggcagccttgcggatgtattatttcacgtgagatcaatcagaccaatatttcataagtgtaataatgtgatgaataacgatgggcgcaataacaacactgacgatgccaccttgttcggttctgaatttctgatgatgagaaagcattggtcagacaaataattttggaattcggtatacaaagctctggttctgccgtcctgcgtatcaaactgaagctccacttttatgtcagttggactgatatggtgttaatttcaccactgatacctatatcaattggattccttgacggtttgccagccgcagttctcttgttttaacattttagccttacaaacacaacgtgatgttgatgtagtttgtaacgtggaatgtcagaaataatattgatacaatgttgtagatttgttgttttatttgaaattatgtacattgctttagacgaatctcactaagtcatattcgatttggaaaagccaacgtttctaggttcatgaatagttataatatgagagaataaagatgtgctgtt

SEQ ID NO: 7188 - DNA, 2245 bp, Zea Mays
gcatagcaagcggcaagcgctcttttgaccggtctcccgaccccgaagaccacttgccccctccaggccgaggccgccgccgccaactactgacacagtgacacgcaccaatgaccaacccggcggccggccacgaacgataacacgccggcccgcctcgccacgctcccaccctcctgcctccgcgcgccacgaccagccgccccagcagcagatgtcgcctccgtccgtcctgctcctccactcccgcatcccgcttcagccccgccccttcaggatgaactcccgggcagctccgagcagggtcgtcgtctgctccgtcgcgtctaccgaggggttcatctccgcagcgccgatcctcctccccgatggcccttggaaacaggtggaaggcggcgtcactgccgcgaaggggttcaaggcggcgggtatctacagtgggttgcgtgccaaaggcgagaagcctgacttggcactggtcgcctgcgacgtcgacgccactgtagcaggagcatttacaacaaacgtcgtagccgccgcacctgttttgtattgcaagcatgtccttagtacatcgaaaacaggtcgtgctgtgttaattaatgctggacaagcaaatgctgcaactggtgatcttggctatcaggatgcagtggatagtgcagatgctgttgccaagcttctcaatgtaagcacagataacatactgattcagtctactggtgtcattggtcaaaggataaagaaggctttggcattgtaggaggcacttttaaattcactacctagacttgtgggctcactgtcttcttcagttcagggtgcgaattctgctgctgtggccattacaactacagaccttgttagcaagagcattgctgtccagactgagattggaggagtggctattagaataggtgggatggctaaaggttctggaatgattcacccaaatatggcaacaatgcttggtgttttgaccacagatgctcaagtcagcagtgatgtctggagagaaatgatccggatgtcagtgagtagaagtttcaaccaaattacagtggatggtgatactagtaccaatgactgtgttattgctatggcaagtgggttgtctggtttatctggaattcaaagtcttgatagcattgaggctcaacagttccaagcatgcctagatgcagtaatgcaaagtcttgcaaaatccatagcatgggatggtgagggtgcaacatgcctaattgaggttactgtaagtggcgccaacaacgaggcagaagctgctaaaattgctcgttcagtagcatcttcttctttggttaaagccgctatatttggaagagacccaaattggggacgaattgcttgctcagttggttattcaggcattcaatttgacgcaaatcgacttgatatttctctgggagttattccactaatgaaaaatgggcaaccactcccctttgacagattgaccgctagcaagtatctcaaagatgctggagatgcccatggtacagtaaacattgatatatcagttgggagtggaggaggaaatggaaaggcatggggctgtgatctgagctacaaatatgttgaaataaatgctgaatatacaacatgagatttatatttgccatgaagaaaaaaaatcttgaaatgatgaatgggtgcgactaccgtcaggagaatgtagtttcgtgttgcaatggcagccttgcggatgtattatttcacgtgagatcaatcagaccaatatttcataagtgtaataatgtgatgaataacgatgggcgcaataacaacactgacgatgccaccttgttcggttctgaatttctgatgatgagaaagcattggtcagacaaataattttggaattcggtatacaaagctctggttctgccgtcctgcgtatcaaactgaagctccacttttatgtcagttggactgatatggtgttaatttcaccactgatacctatatcaattggattccttgacggtttgccagccgcagttctcttgttttaacattttagccttacaaacacaacgtgatgttgatgtagtttgtaacgtggaatgtcagaaataatattgatacaatgttgtagatttgttgttttatttgaaattatgtacattgctttagacgaatctcactaagtcatattcgatttggaaaagccaacgtttctaggttcatgaatagttataatatgagagaataaagatgtgctgtt

SEQ ID NO: 7189 - DNA, 1586 bp, Zea Mays
gttcgggctcctccttttccgttgccccggcgtgctcctcttctcttctcttctctgcctgcccatccgcacatccatccactaatattggcagagcggcgtccgagtggaaacggcagcagacgaaaagcccaagcagaccacgcattgatcgcagctcatcatcaaccatcaatcatcatcatcacggcggcgcgcacgtcgtcgtactgctctgctagccagccctttgtatttaagccgacgctctgctgggctcgcttctcccttcctctccgctcgtctccgctagctagctgcaccatcgtgcatgcgttcccggccgccgcgccgcccgcctgcaggacccgcgctgccgatcgacgtcggtgcacaatgtggaactgctcgtcgctcctgctgcagtacggcgacgactacgcagccaggtgcgagagctctagttcaccggcaggagctgtgggcctggacaggatactagcggcggagtatggccggttcgattctctggacctgtcgccgccgccgccgcttcacggtcttcaggcgcagacgctttttgctattcacggttcttcagagaactgcctaggaataggcgcgaatccaatctacagcaccgaggcccggcccgcgttctcgcagctcagcttcacccagccagctgctgataccgctgcccactactcgatgaaatggacggcagcgggggagacggcgaccggtggcgggggaagccgtctcaggggatcgaagaggctcaagacaaagacgccagccacagcacaaggtccacagcaccacggccagcggtgcagtccgaaaccaacaacaagtcagtctatcaaggcaccaccatgtaagaggagccagaagctgggggacaagatcacggcgcttcagcagctagtctccccttatggcaagacggatacggcatcagtgctccacgaggcagccacctgcatcaagcacctccacgagcagatccaggtgagcagatggcgcatcgtcctcttacttactcagaatggtcatgcgacggacgctcgggcacgaggagcaacagatttgcagcaagtcacgttctccagcgtcacagcaggacacgggcgacgaagagggcggcgcgacgggtctgcgccggcgaggcctgtgcgtggcgtcgctgtccccggccgtcgtgcagctcgtgtcggccgaggccgcgctcggcaaccgcgacacggaagaccactggcgctggctcggcactctgtaagtctgtagccggggcggagaacgatgctgtgctgccatgcttcagttcgtagacggtaggagcacgagacatggccgcaggggttggtgtcatcaggccttcagatacagcgttagacctcaatttcactggggaaaaaataaatattactcacctgcttcgagaggttattagttagtacaatggatatattatatactacattaatacgtcaccttctgttttatcctgatcctgatggttgcctctatagtctgtactgcaagtttactccatgatgtgcttaactatggactatatatggtgggtgatgtttatgcgtatc

SEQ ID NO: 7190 - DNA, 2731 bp, Zea Mays
ctaggcgcacccctctgccccccgcctcttcgccggcgagcggcgacgagccgccgtggaggagctcagcgtggagtggcttcctctggtgtgggagacgctgccgaatttctttgacctggtcgtcgttacggtgtgccgccgagaaaagagtttttcaaagggtctctctcctttgcggcactggcctcttagagttagtttattaggaggcggctcgcccacgtttcggaagcgacccggtcgtcgccgccgccaccgccgcgtgttcccgtagtcgccgtctcggggctggctgtggtgatgagttcagtcgtatcctagggtttttgaattctgacggcttcgtcgagctgcgcaaggcgtcgagaaggagatggtgccgagtgggttgttcgggtgggcgtcgccccatgtacagccgctcacacccgtatccgaggtctccgagccgccggagtcgccgtcgccgtacggggacgggccggcgggggatgccggcgtggggacgagggagggggaaggcgctggcgccggagaggaggaagtggaggacgacgaggtcgagccgccgcccgcggcggtgtcattctggaggctttttgagtttgccgatggggtcgactgggcccttatggctgctggggcgcttgctgctgctgcgcatggcgcggcgctggttgtgtaccttcactacttcgggagggctctgaatttgctcgactctgagcgggttgggtcgtctctctatggacgcggcgaggaactgctccaccggtttaaggagcatgccttgtatattgtctttatagctgctggtgttttcgtcgcaggatggatagcaggaggaatatctaacatattccttcataggctggccgaaaacattcaagatgcatatgcagaagcggctagcattgctgaacaggccatcttatacatcaggactctgtatgcttttacaaatgagactcttgcaaagtactcctatgccacctcacttcaagccacacttagatatggaattttgattagccttgtccaaggaattggtcttggatttacatatggactcgccatttgctcttgtgctttgcaactttgggttggaagacatctgatccatcgtggaaaagctgatggtggtgaagttgtggtagctttattctctgtaattctgagcggccttggtttgaatcaagcagctacaaacttctattcattcgagcaaggacgcattgctgcttatagactatatgagatgattagtcgttcaacctccagcaccaatcaagaaggggcaaccttaccccaggtgcaggggaatattgaatttcgaaatgtgtactttagctacctgtctcgccctgagatcccaatattaagtggattcttcctcactgtaccggcgagaaaaactgtggcacttgttggtagaaatggctccgggaaaagcagtataattcctcttatggagagattctatgacccaacattaggtgaagttcttttggatggggaaaacataaaaaatttgaaagtagaatggttaagaagccaaattggtctggtgacacaagaaccagccttattgagtttgagcattcgggaaaacattgcttatggaagatctggtacctttgaccagatagaagaggcagcaaaaacagcccatgcccatgggttcatcagttcacttgaaaaggggtatgaaacccaggttggtctagctggtgtagccctcactgatgaacagaaaatcaaaatttctattgctcgtgctgtgctttcgaatccatccattctgttgcttgatgaggtcacgggaggacttgattttgaagctgaaaaggctgtacaagaagcattagatgttctcatgttgggaaggtcaaccattataattgctagacgtctttgcctcattaaaaatgctgattatatagctgtaatggaggagggtcatcttgttgaaatgggaacacatgatgaacttttaaacttggatggcctttatgctgaacttttaaggtgtgaggaagcaacaaaacttcccaaaaggatgcctaccaagaatagcagggagcgtaagtcgcttcaagcggaggacacatcggtgagccaatactttcaagaatcgtcctctcctaagatggcaaaatcaccttcactacaaaggacacacggcatgcttcaattttggcgatcagataccaacagaaactctcatgattcaccaaaggatccaagtccaccttctgaacaaactatagacaacgggataccgatggttgcaattgaaacagaaaggacaccatccattaagagacaagatagttttgaaatgaagttacctgaccttcctaaagttgatgtccatcgtatacagcggcagtcatctaagaattcagatcctgactcacccatatctcctcttttgacttctgatcctaaaaacgagcgttcacattcacagacttttagcagaccccagagtgaacgggatgatacgagttctgaacacagtgaactcgatgaggttcagcaccagaaaccgccatctttttggcgtcttgcaacacttagtattgctgagtggccttatgctcttttaggtacaattggtgctgctgtatttggctcatttaatccactgcttgcttacacaatagcacttatagtgtcagcatactatcaaattgaaatccgtgatatgcgccatgaagtgaga

SEQ ID NO: 7191 - DNA, 3126 bp, Zea Mays
gaaaagggccacagccatgtgggcccgcccatcacaccgcaatcacacgactggccccttcttacctttcctacgcgcacgccagaagcgaagaaaacccataactaggcgcacccctctgccccccgcctcttcgccggcgagcggcgacgagccgccgtggaggagctcagcgtggagtggcttcctctggtgtgggagacgctgccgaatttctttgacctggtcgtcgttacggtgtgccgccgagaaaagagtttttcaaagggtctctctcctttgcggcactggcctcttagagttagtttattaggaggcggctcgcccacgtttcggaagcgacccggtcgtcgccgccgccaccgccgcgtgttcccgtagtcgccgtctcggggctggctgtggtgatgagttcagtcgtatcctagggtttttgaattctgacggcttcgtcgagctgcgcaaggcgtcgagaaggagatggtgccgagtgggttgttcgggtgggcgtcgccccatgtacagccgctcacacccgtatccgaggtctccgagccgccggagtcgccgtcgccgtacggggacgggccggcgggggatgccggcgtggggacgagggagggggaaggcgctggcgccggagaggaggaagtggaggacgacgaggtcgagccgccgcccgcggcggtgtcattctggaggctttttgagtttgccgatggggtcgactgggcccttatggctgctggggcgcttgctgctgctgcgcatggcgcggcgctggttgtgtaccttcactacttcgggagggctctgaatttgctcgactctgagcgggttgggtcgtctctctatggacgcggcgaggaactgctccaccggtttaaggagcatgccttgtatattgtctttatagctgctggtgttttcgtcgcaggatggatagaggtatcttgctggattctcactggggaacggcagactgctgtcatcagatcaaaatatgttcaggttttgctaaatcaagacatgagtttttttgatacatatggtaacaacggagatattgttagtcaagtgctcagtgatgtattgctcattcagtcagctataagcgagaaagttgggaactacatacataatatggctacatttgttgttggtctcattgttggccttctgaattgttggcaaatagcacttctaactcttgccactggacccttgattgttgcagcaggaggaatatctaacatattccttcataggctggccgaaaacattcaagatgcatatgcagaagcggctagcattgctgaacaggccatcttatacatcaggactctgtatgcttttacaaatgagactcttgcaaagtactcctatgccacctcacttcaagccacacttagatatggaattttgattagccttgtccaaggaattggtcttggatttacatatggactcgccatttgctcttgtgctttgcaactttgggttggaagacatctgatccatcgtggaaaagctgatggtggtgaagttgtggtagctttattctctgtaattctgagcggccttggtttgaatcaagcagctacaaacttctattcattcgagcaaggacgcattgctgcttatagactatatgagatgattagtcgttcaacctccagcaccaatcaagaaggggcaaccttaccccaggtgcaggggaatattgaatttcgaaatgtgtactttagctacctgtctcgccctgagatcccaatattaagtggattcttcctcactgtaccggcgagaaaaactgtggcacttgttggtagaaatggctccgggaaaagcagtataattcctcttatggagagattctatgacccaacattaggtgaagttcttttggatggggaaaacataaaaaatttgaaagtagaatggttaagaagccaaattggtctggtgacacaagaaccagccttattgagtttgagcattcgggaaaacattgcttatggaagatctggtacctttgaccagatagaagaggcagcaaaaacagcccatgcccatgggttcatcagttcacttgaaaaggggtatgaaacccaggttggtctagctggtgtagccctcactgatgaacagaaaatcaaaatttctattgctcgtgctgtgctttcgaatccatccattctgttgcttgatgaggtcacgggaggacttgattttgaagctgaaaaggctgtacaagaagcattagatgttctcatgttgggaaggtcaaccattataattgctagacgtctttgcctcattaaaaatgctgattatatagctgtaatggaggagggtcatcttgttgaaatgggaacacatgatgaacttttaaacttggatggcctttatgctgaacttttaaggtgtgaggaagcaacaaaacttcccaaaaggatgcctaccaagaatagcagggagcgtaagtcgcttcaagcggaggacacatcggtgagccaatactttcaagaatcgtcctctcctaagatggcaaaatcaccttcactacaaaggacacacggcatgcttcaattttggcgatcagataccaacagaaactctcatgattcaccaaaggatccaagtccaccttctgaacaaactatagacaacgggataccgatggttgcaattgaaacagaaaggacaccatccattaagagacaagatagttttgaaatgaagttacctgaccttcctaaagttgatgtccatcgtatacagcggcagtcatctaagaattcagatcctgactcacccatatctcctcttttgacttctgatcctaaaaacgagcgttcacattcacagacttttagcagaccccagagtgaacgggatgatacgagttctgaacacagtgaactcgatgaggttcagcaccagaaaccgccatctttttggcgtcttgcaacacttagtattgctgagtggccttatgctcttttaggtacaattggtgctgctgtatttggctcatttaatccactgcttgcttacacaatagcacttatagtgtcagcatactatcaaattgaaatccgtgatatgcgccatgaagtgaga

SEQ ID NO: 7192 - DNA, 643 bp, Zea Mays
taggtagaaaaggttagacaaactgtgacccgtataagtgcaaaagctcagcgtaagattgcaagagagatcaaaaccgcacgtgcgtttgggttaatgccttttacaacaatgggtagaagaccattcatttttggcagaagtgcggaggagcattattgggatgatggatatttcggctatgtgaagcagaaggatggtgagcctgttgagaatgaggatgctgagccaaatgtggaggctgtgtaaacattctgaagcatccttttgcaagcgctccgttcagtttcttctggtgccttcatgacacaagtcacacaatgcttgttttgcgtcttcagatcatagcgtagctcagcttgaataaaactgtaacatcacgcaagttttgtgaaactcgtgccttgctcaattgtgccactttagcagacatccccagctcacctcatcctggctggagatcatatgcagatatgaaatggaacgtgggatcagagttttagttgacgctcaaaattttgagatagcagcactgatttcagtttctgttggataatgattgtttggctgttcaacgagaaaaatattgtatgcacgtacaaaacgttagattttttaacaacgaaaatattttcttcaaatt

SEQ ID NO: 7193 - DNA, 642 bp, Zea Mays
gctaattgtgtcacaacttgcctaagacccgtataagtgcaaaagctcagcgtaagattgcaagagagatcaaaaccgcacgtgcgtttgggttaatgccttttacaacaatgggtagaagaccattcatttttggcagaagtgcggaggagcattattgggatgatggatatttcggctatgtgaagcagaaggatggtgagcctgttgagaatgaggatgctgagccaaatgtggaggctgtgtaaacattctgaagcatccttttgcaagcgctccgttcagtttcttctggtgccttcatgacacaagtcacacaatgcttgttttgcgtcttcagatcatagcgtagctcagcttgaataaaactgtaacatcacgcaagttttgtgaaactcgtgccttgctcaattgtgccactttagcagacatccccagctcacctcatcctggctggagatcatatgcagatatgaaatggaacgtgggatcagagttttagttgacgctcaaaattttgagatagcagcactgatttcagtttctgttggataatgattgtttggctgttcaacgagaaaaatattgtatgcacgtacaaaacgttagattttttaacaacgaaaatattttcttcaaatt

SEQ ID NO: 7194 - DNA, 961 bp, Zea Mays
gacactcctacacctctgttatgtgataacttgagtgctatacagatttctcatgatccagtgaagcatgaacttactaaacacattggtgtcgatgcatcaattactcggtctcattgtcagcagaagactattgatcttcaatatgtaccctcagaatcttaattggcagatttctttaccaaagcacaaacaagagcacaacatcaatttcacttgatcaaactcaacgcttcagatcctccttttccacattgagtttgaggaggggtgttaaggcccaggcctacagcctatatatatcatatagtccttagggactcattattaattgttaatctcaagacccgtataagtgcaaaagctcagcgtaagattgcaagagagatcaaaaccgcacgtgcgtttgggttaatgccttttacaacaatgggtagaagaccattcatttttggcagaagtgcggaggagcattattgggatgatggatatttcggctatgtgaagcagaaggatggtgagcctgttgagaatgaggatgctgagccaaatgtggaggctgtgtaaacattctgaagcatccttttgcaagcgctccgttcagtttcttctggtgccttcatgacacaagtcacacaatgcttgttttgcgtcttcagatcatagcgtagctcagcttgaataaaactgtaacatcacgcaagttttgtgaaactcgtgccttgctcaattgtgccactttagcagacatccccagctcacctcatcctggctggagatcatatgcagatatgaaatggaacgtgggatcagagttttagttgacgctcaaaattttgagatagcagcactgatttcagtttctgttggataatgattgtttggctgttcaacgagaaaaatattgtatgcacgtacaaaacgttagattttttaacaacgaaaatattttcttcaaatt

SEQ ID NO: 7195 - DNA, 1684 bp, Zea Mays
attgcaaaaaaaaaaaaaagttggtccgctcccaccctccgtccgaccgtcctcgacctcccgtcccgccgcctcccacagtcgcaaccctagtcccacccgccgtcctcccgccctcccgcttcccattttcagtcgccgagccgcgtacagcgcacgcactgcacgcgcatcggcacttccagcgacgcgtcgtgagctcctcccttcgacccttcctgtggcgcgtcgtaagctctgtgcaggcgacggcggcgcgctaccagtgacggggggatacggcggcatcgtccccctcggcccctcctccatcccggtgcggcggcgccagcctacagggcaggagtaccaccaagcgagcgcgatggtgagctccgcactgaggcgctgtctcccctgccatgcctctctctgtcatgccttccctccccatccgctgctggccgctgccggcgtcttccgtcgttcattccagtccggggatggtgagactatggacgaattcgaagaacggttgtttgggggcaaggacacagacaaaggatcactctacgagaagctcgatagggctgagaacactggtaggagatacaatatgggctctgggatgggtggtttgactgggttaagtgacaagagcagatctgggttgtccaagggtggtttcacttggttaagtgacagtagcagctctggtttccctgggtttcctgcatctggcgacaggagcaattcaggatggatggatggttatgattcttttaatgatggcttaaatgatacgattgctaatgcggcacgcaacatccaaatggaggaggacgaggacgtcgacggtgactgggaagatgactttgagttcaggcctgatgtgcggtttaggcaaggttcaacgtattctgttcggtgtaggaccttgaccttagaaaacctgcagccgcaaagaaccctcctagacgacagtttgaaacaactacagcggaggtactgaagaaggctgattttaggaatgttagattcctctccaactttcttacggaagctggaattatcatcaagagaagccagacccgtataagtgcaaaagctcagcgtaagattgcaagagagatcaaaaccgcacgtgcgtttgggttaatgccttttacaacaatgggtagaagaccattcatttttggcagaagtgcggaggagcattattgggatgatggatatttcggctatgtgaagcagaaggatggtgagcctgttgagaatgaggatgctgagccaaatgtggaggctgtgtaaacattctgaagcatccttttgcaagcgctccgttcagtttcttctggtgccttcatgacacaagtcacacaatgcttgttttgcgtcttcagatcatagcgtagctcagcttgaataaaactgtaacatcacgcaagttttgtgaaactcgtgccttgctcaattgtgccactttagcagacatccccagctcacctcatcctggctggagatcatatgcagatatgaaatggaacgtgggatcagagttttagttgacgctcaaaattttgagatagcagcactgatttcagtttctgttggataatgattgtttggctgttcaacgagaaaaatattgtatgcacgtacaaaacgttagattttttaacaacgaaaatattttcttcaaatt

SEQ ID NO: 7196 - DNA, 1669 bp, Zea Mays
cagacttaaatagaattttgcatatcatagttatgtttatcgttccatatttatgttttatactattttatctctcgtggcaacgtacgggcacacacctagtttgtgaaaataaaatccaaaaaggctaaattgcaaaaaaaaaaaaaagttggtccgctcccaccctccgtccgaccgtcctcgacctcccgtcccgccgcctcccacagtcgcaaccctagtcccacccgccgtcctcccgccctcccgcttcccattttcagtcgccgagccgcgtacagcgcacgcactgcacgcgcatcggcacttccagcgacgcgtcgtgagctcctcccttcgacccttcctgtggcgcgtcgtaagctctgtgcaggcgacggcggcgcgctaccagtgacggggggatacggcggcatcgtccccctcggcccctcctccatcccggtgcggcggcgccagcctacaggggatggtgagactatggacgaattcgaagaacggttgtttgggggcaaggacacagacaaaggatcactctacgagaagctcgatagggctgagaacactggtaggagatacaatatgggctctgggatgggtggtttgactgggttaagtgacaagagcagatctgggttgtccaagggtggtttcacttggttaagtgacagtagcagctctggtttccctgggtttcctgcatctggcgacaggagcaattcaggatggatggatggttatgattcttttaatgatggcttaaatgatacgattgctaatgcggcacgcaacatccaaatggaggaggacgaggacgtcgacggtgactgggaagatgactttgagttcaggcctgatgtgcggtttaggcaaggttcaacgtattctgttcgggaccttgaccttagaaaacctgcagccgcaaagaaccctcctagacgacagtttgaaacaactacagcggaggtactgaagaaggctgattttaggaatgttagattcctctccaactttcttacggaagctggaattatcatcaagagaagccagacccgtataagtgcaaaagctcagcgtaagattgcaagagagatcaaaaccgcacgtgcgtttgggttaatgccttttacaacaatgggtagaagaccattcatttttggcagaagtgcggaggagcattattgggatgatggatatttcggctatgtgaagcagaaggatggtgagcctgttgagaatgaggatgctgagccaaatgtggaggctgtgtaaacattctgaagcatccttttgcaagcgctccgttcagtttcttctggtgccttcatgacacaagtcacacaatgcttgttttgcgtcttcagatcatagcgtagctcagcttgaataaaactgtaacatcacgcaagttttgtgaaactcgtgccttgctcaattgtgccactttagcagacatccccagctcacctcatcctggctggagatcatatgcagatatgaaatggaacgtgggatcagagttttagttgacgctcaaaattttgagatagcagcactgatttcagtttctgttggataatgattgtttggctgttcaacgagaaaaatattgtatgcacgtacaaaacgttagattttttaacaacgaaaatattttcttcaaatt

SEQ ID NO: 7197 - DNA, 4720 bp, Zea Mays
gagatacagagaaacagccgaggccatctgccatgagaaaggggtttttggccctcatgaagacatcagttcaaaaagcttcacagggaaggaattcatggcactttctgataaaaagaagctcttaagacaacagtgcggccttctcttctccagggcagaaccaaaacataagcaggagatagttagactgctcaaagaagatggtgaagtggttgcaatgactggcgatggggtgaatgatgcaccagctcttaaactggccgatattggagttgcaatgggcattacagggactgagatgataacttcagtactatagtcgcagcagttggtgaagggaggtctatttacaacaacatgaaggcttttattagatatatgatctcctcaaacatcggagaagtcgcgtccatattcttgacatcggctttgggtattccagaaggtctcatcccagtgcaacttctatgggtcaatcttgttacggatggccctccagcgacagctttagggttcaacccacctgataaagacatcatgaagaaacctcctcggagaagtgatgactcgttgatcacgccttggatcctgtttcgctatatggttattggcctttatgttggggttgccacagtgggaatcttcatcatctggtacacgcatggcagtttcctgggaattgacctggctagtgatggccatacccttgtgtcgtactcccagctctcaaactgggggcagtgctcctcatgggagggcttcaaggtgtcgccattcactgcaggagcgaggacattcagctttgatgcaaatccatgcgattacttccagggtggcaagattaaagcaacgaccctctctttgtctgtcttggtggcaattgagatgttcaactcactgaatgccctgtcagaggatggcagcctcctgagcatgccgccatgggttaatccatggcttcttctggccatgtccgtttcttttgggctgcatttcttgatcctctacgtgcctttcctggctcaagtgtttgggattgtgcccctcagtttgaacgaatggctcttggtgatagcagtggccttaccagtggtgctgatcgatgaggttctcaaatttgtggggcggtgcctgacagctcgtgcccgaaaacaatcagggaagaggaaggcagagtagatgctagtgatcatcggtattagaatctgtagcgccacgggaatcgatattggatgtgacaccccattgtttttgagttgctaaggtctttcgatcctttctgagtctttttagactgggaatatgacagtccaggacaggcaaggatattctataggactcataatcagatcgcattgaacacactgcattcttttcgttgtaacaaatgctggtgctgtgaacatgctggagatacagcaatggctatctgacgctttttagctatgatggtgcgctatatatgctactactgttctgttgcgaatcttctgacatgttgctcactgctcagtaatatatttgttagagtcgtatgttcagttatgtttgcttgtgagattcctcttgtgcagatgaaatccgcagcatggctattgatcatatactgctgtacacggaggatgcaacattattttagcttcacctgccctcctcgctgttgaccatctttgaaaaaactctcctcatggacataccatcgaggtcccccaagttcgctgccacggtggcctctgtcccgtcgctgacggtagactggttgcgatggaatttggacgtactcctgtgaactagctgcgtgttgtctgtgccagagctgtccggcgacgcctcctgcaactgcagcgcgaactcgaggcaccagagcacgtcccctattgcgggccgctccacgccgtactccgcgaggcacttctccgcggtgtcgacgaacttcttgagcgactccggccgtatcgacccagcgatccgctggtcgacgatgctgtcgagctcgccgtttttgagccgctgcgtggcccactctgccaggttgaccatctcccggggcagcgtcgggtcgatgactggacgggcgcagagcacctccagcaggacgacgccgaaggagtagacgtcggacttgttcgtcagcatctgccgccggaagtactccgggtcgaggtacccgaagctgcccttgacggcggtgctgacgtgcgtcttgtccagctccggcccggtcttggacagcccaaagtcggcgaccttggccatgaagctgtcgtcgaggaggatgttggcggacttgacgtcacggtggatgatcgccttggccgagccggtgtggaggtagtgcaggcccctggcggcgccgatgcacacgtcgagcctctgcttccacgagaggggaggcagctcggagtcgtagaggtggctccggagcgtgcccctggccatgtactcgtacaccaggatcatctcgccgcgctcgtcgcagtagccgatgagcgacaccaggtggcggtgccgcagccgggagagcagctcgatctccgtgcggaactcgttcagcccctgctgcgaccgccggttgccgcgcttcacggccacctgcgtctcgtccctcagcgtgcccttgtacaccttcccgaacccgcccacgccgatcaccatgccctcgtcgaacccgcacgtcgcctcctgcagcgccgcgagggggatccggtacccggcaccggcgctctgcccgagcgtgaccgtgttgttcctggcgcctgcgctgctgctcttgccgaagctgcgcgagtgcgaccgggatcccagcgcgctctccgagaacgcgacccaggtgctcgacggcttcttctctggcttcttccttcgtcgtcgcaacatgaggacaatgagcgcgacagccatcaccacggtgatgacccccgcgatggccgaaccagcgatgattgcggtgacggtcttcttctttgaaccgctctgcgacgagtccgcgccgccgccggtgctcccgaccattctcatgatctcgaggccgttgaggacgccgtctgggtacgcgttgcccagcgtggacgtcccgatgctcacggtgatgttgcccttggcgtccttggcgctgagcacgaagtccttgtataacggcacggccgggacgctgaaagtgtctctggagatctcgtagtccggcagcacattccacccgcctacgtagacgttgaagaccaacccgttcgccgccttgctgacgatgtcgcagaagtgtagccggagcaggtacgccgaccccggcgcggcctggagcttccacgtcatgttaaactgcacgcttatggtgctggcggacaccaggttggtgttgatctccgtcgctgtagcgtagaccatgcctggcgccgtctcgggcgtcgccaagcctggcgtccaccggagcttcgacggcgccacatccctgtgcaccgtgaccgaactgtcgaccaggaaggcttcgtcgggaagccacgtccttcccagcgtgtcgttcctgggcgtgatcttgggagagcccatgttgaccctgttaaccgtctcgagcgcctgcgtggacagccccgcgtagcggcccatggggctcaccgtctgcgccgtgtccgcgaacaggtcgtcggggtgcgacacgacctcgatggcgttgacgaacgccaccttccccgccgccgccggcgcgaacgcgaccgccagcgtgccgccggcgacgttgacggagaactcccggaccgcgggcgtgccgttggcgggcgcgtacccgtcgatgagcagcaggccctgcgcggacacgctgaactcggcgtccgcggcgaggtcgccggacccgtaccggaaggggaagaagtggaggcgcacgaagtggcgcccgggactcttgatcgcgaacgtgtacgaggacggcgccgcgaagacgcgcgcggaccggtacagcgccgcgtcgtcggagccgctggccgccgacgcgctggcctcggagccccggggcgccggcagcacggccgccgcggggaggccgtcgtccccgaggaacgtcctgccgtcgacggtggcgttcgccgccgtgccgcagagcacgaggtagtcgtccgccggggtgaacgcggcggccaccagcgcgggcagcagcagcagcacgacggcgacccgcaggagcgtgtcgaggacggcgcgagccatggacgtggcggaagggagtggctctagaagcagctcatggacctgtccctggaagtggaacagagacgtcgagggttgcagttgcaggcagcatgaatcaaggccccatgggagtcatggtggatggttggttacttagcacaggacaggagctgctgctgtttggcggcgtgctgagagtgaatctgcgaactggcaggacaggggcagcagctagtaggtaccctaagagctgcctacccacaggaacgcggaaccggtgctcggtgattggagatttggttagccatggaggtaatattggggagggaggtggtggagcttttggttagtggggaaagcatatcactgtcattttccgaggatctgagctagaggatggctttagatattttaccaggaccaggagcctttttttttaattctgccattttttcgtggtttacaggtccctcggccgcttgtgcgcttgctcacgtcgacctcagcgaatttcaattcagcagctacaaaatggcag

SEQ ID NO: 7198 - DNA, 1059 bp, Zea Mays
atcttgcttgtgcgctgcaatcgccatcgcctccttgcccattctccgcgccgccgcctcctcctccgctcccctccttcttctagggtttctactccatgtcggagcacgcaaccgtcaagcgtcatgggcggtggtcgcatggcctccccgcgcgcgacctcgtccccggggacatcgttgagctccgggtcggggacaaggttcccgcggacatgcgcgtgctccagctcatcagctcgaccctccgcgtcgagcagggatctctcaccggcgagaccgcttctgttaacaagaccagccacaagatcgagttggaggacactgacatccagggaaaggagtgcatggtttttgccggcaccactgttgtcaatggcagtgctgtctgtgttgtgacgggcactggcatggcgactgaaattggcaagatccacgcccagatccaggaggcatctcaggaggaggacgacacgccacttaagaagaagctcaatgagtttggtgaggcgctaactgccataattggggtgatctgtgccttggtctggctcatcaacttgaagtatttcctttcctgggagtatgttgacgggtggcctaggaatttcaaattctcatttgagaagtgcacatattactttgagattgcagtggcactggccgttgcagcaattccagagggcttgcctgctgtgatcaccacatgcttggcactcggcacaaggaagatggcacagaagaatgcccttgtgaggaagctgccgagtgtggaaacattgggttgtacaactgtgatttgctctgataagaccggaactttgaccacaaaccagatgtcagcagtgaagcttgtggcaattgggaggtggcctgatactcttaggagctttaaggttgatggaaccacttatgatccaactgatgggaagatacatgattggccaagcttgagcatggatgaaaatctccagatgatcgcaaagattgctgcagtttgcaatgatgcaagcattgcccacgctgagcatcagtatgttgctactgggatgcccacac

SEQ ID NO: 7199 - DNA, 3173 bp, Zea Mays
cccacaccagaaggagccaaccccccctcaggccccaacccttttcccacttcccgccggagcgctctcctcttcgccgctccatcaccgcctcccaatcccatgggcgacccgcaccccctctcctccgcccacctcaccgctgctgcctcctcggctcgagaacaccgtggccccaccaacgagcgcctcgccgcgtccgatccttccacgtccttcgctaagcgtcctagggttgcggcggagccgtccgattccggcggctgcgttccatgcgtcgaggcggacgtacgagctcttgtgtcggtgtccggaggaatttacccgctggcgcgggcaggagcgctccgtggactcaccgcggtccttgagaaggtcgacaccagcagctgtgtcagcgcagcgatcacggactgttgctacaaatgcgcggtggagctcatgagggacgacgacaatggcgtcaggtggacgcgtgtgctcgaaatatttcagcgagattggattttgatgccaatggctatggtgacctgatggacatgattttcctacagctaagctccatggctagggacatgtgcacgcaggtgagaatggaagcattcgctgcacttggtaaaatgcaacgagtttctgagggtgttctgctacaatcgctagaaaagaaggtcatgaaaactgacaggatgggtgtttctatcatcaacggccaaaaattacctcctaaactaaaaattccctgtgctgctgggattttttcccatggagttgaagatgaattttacgaggtgagaagaactgcctgcaaatcattaggagcgctggcaaagttttctactcagtacacagagaaggccttggacttgttgatggacatgatgaatgatgatacagaagcagttaggctgcaggctctggaagcactatttagtatggcaacatatggatgtttgagtgtgcaggagaagcacatgcatatgtttcttgggttgctggttgatgccaatgtcttaattcgagatgcagcacgcaagatctttgggttagtcaacatgccaaaacttcaaatattcaaatctgcagttgatggtcttgttacaagtttggagaagtatccagaggaagaggatatatatggtattatgttttccattggtaagaaccatgggagcttttcagctaacatagctaaacatttggccaaagagattactatggcatctgacggagagcttatcttggacaaaccaagggtcaaagcattgttaatagtgtctatttcagcacctttttctgatgataagcacaagcagctgggtataccttcgattatcttctcgtatgcaattcccctactggagaagatctcatgcgcactaggagaggttgatcaggattcactcttatcttacttgtatcataaaggtggaatgccattttgggaaaacaggtcagtatctgcagagtttggagaatctgaaagctgcaatgttgaaacagtgaaaattggtgcccatatagaaaacactgcaaaggaagccaaatgtctagatgaagttctggtaatgaaatccatactagaaatagttgaaggagtctggactatgagaatgtcgtgcaatgtttgtgaagttcgaactattttcagaacatgcaaagaagagctgagattattggcagaaaattcttctggatcaattggtgcattattgagctttctgagtgagtatcttgatgcaatattattcattgttgaaatatggcagttgattcagttggacaagccttatacttgtggcctaacgtcacttgatattttactggagaggttggatatgtctgtaaggaggatgaaatattgttatattggattaaatagagtattggaggtccaagttttggagctttctttgatagctcatttatgtagactctcaaagattgcagtgtgttccaaggtagttctgggtaaggtgctctgggtaattaatcgcttagaggatctgtgtgctgatgggtcctgtgaactgtctgacttcagtggagaaattaagaaggcctgtgataccaaccgtattggagataatctgattggcaacatcaacaatttgtttcaactcttccatctgaaaccaacaacagactttggaatgcttaaagtgataagtgcaatgttgcgggtctgtgataacgattctgaaaatccattacaatacatttgtggattaccggtgggtgtcagctttaaaatatctctgtggaacatatctggtcaccatcgactgtggctccgcatgaccattggtgaatctgtgcaacataccttcctagaattttctcgttttgaaggcaatgatgagggatcagcacccaccagggtggacatggaggaccgagtgattgtgtggttcaactctctgatgaactgaatgtttattttgttagtgctagccaatggtgatgattaaaataagcgaccatatgctttccatgctcatcgtcttaaaggcttttgcttgagtggacattcttgatccaggtctcttctggggaaaagggttcagttgtgctgaaatttttgtagttatggcaaaagcaatgcagatgagctgcatgctccatgaccgtatgcatagtgtggagtgcaagtgggttttaacctggtcgaagcactttgagttcgttaggagctacaacttcagacggaaagtgaaggcgtgaagctcaccaagtgacgatggagaaagtgcagcgtgggggtgaagctgacgatggagaaggtgcggcggaccacgctgcgcgggtttttttttgtcaccaatttgtgtggccttggccggcgttcactgatgttcaggtccaggttattaagatatgggatcatggtcaagtggacttttgtgtggtatattacggttgatcattggtttacaactaaataattgtagtcaaatttcttgtgctgaaacaaattcccatcggcctagtcgaccattctcgtccaacctttgtgctgtttggttcaaaaaatgtaacgtaaatggtaatgctaacggtttacgatcgattactaatggtaacaaatttgaataggttggtattaatttttagtgtggtatcggattacgattgaactaaaacaaacatgatttaacgttatcagttacccatta

SEQ ID NO: 7200 - DNA, 4126 bp, Zea Mays
cccacaccagaaggagccaaccccccctcaggccccaacccttttcccacttcccgccggagcgctctcctcttcgccgctccatcaccgcctcccaatcccatgggcgacccgcaccccctctcctccgcccacctcaccgctgctgcctcctcggctcgagaacaccgtggccccaccaacgagcgcctcgccgcgtccgatccttccacgtccttcgctaagcgtcctagggttgcggcggagccgtccgattccggcggctgcgttccatgcgtcgaggcggacgtacgagctcttgtgtcggtgtccggaggaatttacccgctggcgcgggcaggagcgctccgtggactcaccgcggtccttgagaaggtcgacaccagcagctgtgtcagcgcagcgatcacggactgttgctacaaatgcgcggtggagctcatgagggacgacgacaatggcgtcaggtggacgcgtgtgctcgaaatatttcagcgagattggattttgatgccaatggctatggtgacctgatggacatgattttcctacagctaagctccatggctagggacatgtgcacgcaggtgagaatggaagcattcgctgcacttggtaaaatgcaacgagtttctgagggtgttctgctacaatcgctagaaaagaaggtcatgaaaactgacaggatgggtgtttctatcatcaacggccaaaaattacctcctaaactaaaaattccctgtgctgctgggattttttcccatggagttgaagatgaattttacgaggtgagaagaactgcctgcaaatcattaggagcgctggcaaagttttctactcagtacacagagaaggccttggacttgttgatggacatgatgaatgatgatacagaagcagttaggctgcaggctctggaagcactatttagtatggcaacatatggatgtttgagtgtgcaggagaagcacatgcatatggtatattaactatgaacatagtttggcaagtaatctgcatatatatatatatatatataattggccactccttaggtaccacatgccgcatgttagtcctatggcactctttttaattcatagctagtcattttttcatactctgtttataagatatgccttgtaatgatatcacaggttcttggatagaatgaagatttttttctcaagcatgcaggagagctgcgtatcaggatatattttttatatcctcagtttatcatgcaaccatgctattcactgaaatattttgttgcaattgtaggaaaatattttgtagccactagccagagatcctcaagccaataccactgtaccagcgtattaaagaaagagtattggcacagatattattcagagaaatctttgctgatagtgatatgtacagttgaacatgtaattttcaagggaacaatataaaacaatatttgaccatgaacatatatgcaataatgcaaggataatggacttagccagaatatgaaacattcgtgcaaatataattttcggtcaaaacagttcggttttgtagttcctaaagtggcgggtccatatttttcgattcttgtgcattttactgtcacaaagcaaccttagctctagcttttaagtagatgaaaagcatgcataatcaaaagacgaagcaggtttgaatcttgtttttgttgaaagttctctctggattctgaatgacttataattgggtttgtacctgtttaaaaagatctttcaaataatctagacatatctttgctattgatattgctaaatgctagtaaaaatctctgaccttatgtatgtataactgtttttgtagtttcttgggttgctggttgatgccaatgtcttaattcgagatgcagcacgcaagatctttgggttagtcaacatgccaaaacttcaaatattcaaatctgcagttgatggtcttgttacaagtttggagaagtatccagaggaagaggatatatatggtattatgttttccattggtaagaaccatgggagcttttcagctaacatagctaaacatttggccaaagagattactatggcatctgacggagagcttatcttggacaaaccaagggtcaaagcattgttaatagtgtctatttcagcacctttttctgatgataagcacaagcagctgggtataccttcgattatcttctcgtatgcaattcccctactggagaagatctcatgcgcactaggagaggttgatcaggattcactcttatcttacttgtatcataaaggtggaatgccattttgggaaaacaggtcagtatctgcagagtttggagaatctgaaagctgcaatgttgaaacagtgaaaattggtgcccatatagaaaacactgcaaaggaagccaaatgtctagatgaagttctggtaatgaaatccatactagaaatagttgaaggagtctggactatgagaatgtcgtgcaatgtttgtgaagttcgaactattttcagaacatgcaaagaagagctgagattattggcagaaaattcttctggatcaattggtgcattattgagctttctgagtgagtatcttgatgcaatattattcattgttgaaatatggcagttgattcagttggacaagccttatacttgtggcctaacgtcacttgatattttactggagaggttggatatgtctgtaaggaggatgaaatattgttatattggattaaatagagtattggaggtccaagttttggagctttctttgatagctcatttatgtagactctcaaagattgcagtgtgttccaaggtagttctgggtaaggtgctctgggtaattaatcgcttagaggatctgtgtgctgatgggtcctgtgaactgtctgacttcagtggagaaattaagaaggcctgtgataccaaccgtattggagataatctgattggcaacatcaacaatttgtttcaactcttccatctgaaaccaacaacagactttggaatgcttaaagtgataagtgcaatgttgcgggtctgtgataacgattctgaaaatccattacaatacatttgtggattaccggtgggtgtcagctttaaaatatctctgtggaacatatctggtcaccatcgactgtggctccgcatgaccattggtgaatctgtgcaacataccttcctagaattttctcgttttgaaggcaatgatgaggtgatgagtggctctatggttgttcctttgtatgctactccaaagacatgttcatttgtgcttcgggtatgtctggtaatggaatgtccatctgcagggatcagcacccaccagggtggacatggaggaccgagtgattgtgtggttcaactctctgatgaactgaatgtttattttgttagtgctagccaatggtgatgattaaaataagcgaccatatgctttccatgctcatcgtcttaaaggcttttgcttgagtggacattcttgatccaggtctcttctggggaaaagggttcagttgtgctgaaatttttgtagttatggcaaaagcaatgcagatgagctgcatgctccatgaccgtatgcatagtgtggagtgcaagtgggttttaacctggtcgaagcactttgagttcgttaggagctacaacttcagacggaaagtgaaggcgtgaagctcaccaagtgacgatggagaaagtgcagcgtgggggtgaagctgacgatggagaaggtgcggcggaccacgctgcgcgggtttttttttgtcaccaatttgtgtggccttggccggcgttcactgatgttcaggtccaggttattaagatatgggatcatggtcaagtggacttttgtgtggtatattacggttgatcattggtttacaactaaataattgtagtcaaatttcttgtgctgaaacaaattcccatcggcctagtcgaccattctcgtccaacctttgtgctgtttggttcaaaaaatgtaacgtaaatggtaatgctaacggtttacgatcgattactaatggtaacaaatttgaataggttggtattaatttttagtgtggtatcggattacgattgaactaaaacaaacatgatttaacgttatcagttacccatta

SEQ ID NO: 7201 - DNA, 3140 bp, Zea Mays
cccacaccagaaggagccaaccccccctcaggccccaacccttttcccacttcccgccggagcgctctcctcttcgccgctccatcaccgcctcccaatcccatgggcgacccgcaccccctctcctccgcccacctcaccgctgctgcctcctcggctcgagaacaccgtggccccaccaacgagcgcctcgccgcgtccgatccttccacgtccttcgctaagcgtcctagggttgcggcggagccgtccgattccggcggctgcgttccatgcgtcgaggcggacgtacgagctcttgtgtcggtgtccggaggaatttacccgctggcgcgggcaggagcgctccgtggactcaccgcggtccttgagaaggtcgacaccagcagctgtgtcagcgcagcgatcacggactgttgctacaaatgcgcggtggagctcatgagggacgacgacaatggcgtcaggtggacgcgtgtgctcgaaatatttcagcgagattggattttgatgccaatggctatggtgacctgatggacatgattttcctacaggtgagaatggaagcattcgctgcacttggtaaaatgcaacgagtttctgagggtgttctgctacaatcgctagaaaagaaggtcatgaaaactgacaggatgggtgtttctatcatcaacggccaaaaattacctcctaaactaaaaattccctgtgctgctgggattttttcccatggagttgaagatgaattttacgaggtgagaagaactgcctgcaaatcattaggagcgctggcaaagttttctactcagtacacagagaaggccttggacttgttgatggacatgatgaatgatgatacagaagcagttaggctgcaggctctggaagcactatttagtatggcaacatatggatgtttgagtgtgcaggagaagcacatgcatatgtttcttgggttgctggttgatgccaatgtcttaattcgagatgcagcacgcaagatctttgggttagtcaacatgccaaaacttcaaatattcaaatctgcagttgatggtcttgttacaagtttggagaagtatccagaggaagaggatatatatggtattatgttttccattggtaagaaccatgggagcttttcagctaacatagctaaacatttggccaaagagattactatggcatctgacggagagcttatcttggacaaaccaagggtcaaagcattgttaatagtgtctatttcagcacctttttctgatgataagcacaagcagctgggtataccttcgattatcttctcgtatgcaattcccctactggagaagatctcatgcgcactaggagaggttgatcaggattcactcttatcttacttgtatcataaaggtggaatgccattttgggaaaacaggtcagtatctgcagagtttggagaatctgaaagctgcaatgttgaaacagtgaaaattggtgcccatatagaaaacactgcaaaggaagccaaatgtctagatgaagttctggtaatgaaatccatactagaaatagttgaaggagtctggactatgagaatgtcgtgcaatgtttgtgaagttcgaactattttcagaacatgcaaagaagagctgagattattggcagaaaattcttctggatcaattggtgcattattgagctttctgagtgagtatcttgatgcaatattattcattgttgaaatatggcagttgattcagttggacaagccttatacttgtggcctaacgtcacttgatattttactggagaggttggatatgtctgtaaggaggatgaaatattgttatattggattaaatagagtattggaggtccaagttttggagctttctttgatagctcatttatgtagactctcaaagattgcagtgtgttccaaggtagttctgggtaaggtgctctgggtaattaatcgcttagaggatctgtgtgctgatgggtcctgtgaactgtctgacttcagtggagaaattaagaaggcctgtgataccaaccgtattggagataatctgattggcaacatcaacaatttgtttcaactcttccatctgaaaccaacaacagactttggaatgcttaaagtgataagtgcaatgttgcgggtctgtgataacgattctgaaaatccattacaatacatttgtggattaccggtgggtgtcagctttaaaatatctctgtggaacatatctggtcaccatcgactgtggctccgcatgaccattggtgaatctgtgcaacataccttcctagaattttctcgttttgaaggcaatgatgagggatcagcacccaccagggtggacatggaggaccgagtgattgtgtggttcaactctctgatgaactgaatgtttattttgttagtgctagccaatggtgatgattaaaataagcgaccatatgctttccatgctcatcgtcttaaaggcttttgcttgagtggacattcttgatccaggtctcttctggggaaaagggttcagttgtgctgaaatttttgtagttatggcaaaagcaatgcagatgagctgcatgctccatgaccgtatgcatagtgtggagtgcaagtgggttttaacctggtcgaagcactttgagttcgttaggagctacaacttcagacggaaagtgaaggcgtgaagctcaccaagtgacgatggagaaagtgcagcgtgggggtgaagctgacgatggagaaggtgcggcggaccacgctgcgcgggtttttttttgtcaccaatttgtgtggccttggccggcgttcactgatgttcaggtccaggttattaagatatgggatcatggtcaagtggacttttgtgtggtatattacggttgatcattggtttacaactaaataattgtagtcaaatttcttgtgctgaaacaaattcccatcggcctagtcgaccattctcgtccaacctttgtgctgtttggttcaaaaaatgtaacgtaaatggtaatgctaacggtttacgatcgattactaatggtaacaaatttgaataggttggtattaatttttagtgtggtatcggattacgattgaactaaaacaaacatgatttaacgttatcagttacccatta

SEQ ID NO: 7202 - DNA, 3477 bp, Zea Mays
cccacaccagaaggagccaaccccccctcaggccccaacccttttcccacttcccgccggagcgctctcctcttcgccgctccatcaccgcctcccaatcccatgggcgacccgcaccccctctcctccgcccacctcaccgctgctgcctcctcggctcgagaacaccgtggccccaccaacgagcgcctcgccgcgtccgatccttccacgtccttcgctaagcgtcctagggttgcggcggagccgtccgattccggcggctgcgttccatgcgtcgaggcggacgtacgagctcttgtgtcggtgtccggaggaatttacccgctggcgcgggcaggagcgctccgtggactcaccgcggtccttgagaaggtcgacaccagcagctgtgtcagcgcagcgatcacggactgttgctacaaatgcgcggtggagctcatgagggacgacgacaatggcgtcaggttagccgttgtgcgattggtggacgcgtgtgctcgaaatatttcagcgagattggattttgatgccaatggctatggtgacctgatggacatgattttcctacagctaagctccatggctagggacatgtgcacgcaggtgagaatggaagcattcgctgcacttggtaaaatgcaacgagtttctgagggtgttctgctacaatcgctagaaaagaaggtcatgaaaactgacaggatgggtgtttctatcatcaacggccaaaaattacctcctaaactaaaaattccctgtgctgctgggattttttcccatggagttgaagatgaattttacgaggtgagaagaactgcctgcaaatcattaggagcgctggcaaagttttctactcagtacacagagaaggccttggacttgttgatggacatgatgaatgatgatacagaagcagttaggctgcaggctctggaagcactatttagtatggcaacatatggatgtttgagtgtgcaggagaagcacatgcatatggttcttggatagaatgaagatttttttctcaagcatgcaggagagctgcgtatcaggatatattttttatatcctcagtttatcatgcaaccatgctattcactgaaatattttgttgcaattgtaggaaaatattttgtagccactagccagagatcctcaagccaataccactgtaccagcgtattaaagaaagagtattggcacagatattattcagagaaatctttgctgatagtgatatgtacagttgaacatgtaattttcaagggaacaatataaaacaatatttgaccatgaacatatatgcaataatgcaaggataatggacttagccagaatatgaaacattcgtgcaaatataattttcggtcaaaacagttcggttttgtagttcctaaagtggcgggtccatatttttcgattcttgtgcattttactgtcacaaagcaaccttagctctagcttttaagtagatgaaaagcatgcataatcaaaagacgaagcagtttcttgggttgctggttgatgccaatgtcttaattcgagatgcagcacgcaagatctttgggttagtcaacatgccaaaacttcaaatattcaaatctgcagttgatggtcttgttacaagtttggagaagtatccagaggaagaggatatatatggtattatgttttccattggtaagaaccatgggagcttttcagctaacatagctaaacatttggccaaagagattactatggcatctgacggagagcttatcttggacaaaccaagggtcaaagcattgttaatagtgtctatttcagcacctttttctgatgataagcacaagcagctgggtataccttcgattatcttctcgtatgcaattcccctactggagaagatctcatgcgcactaggagaggttgatcaggattcactcttatcttacttgtatcataaaggtggaatgccattttgggaaaacaggtcagtatctgcagagtttggagaatctgaaagctgcaatgttgaaacagtgaaaattggtgcccatatagaaaacactgcaaaggaagccaaatgtctagatgaagttctggtaatgaaatccatactagaaatagttgaaggagtctggactatgagaatgtcgtgcaatgtttgtgaagttcgaactattttcagaacatgcaaagaagagctgagattattggcagaaaattcttctggatcaattggtgcattattgagctttctgagtgagtatcttgatgcaatattattcattgttgaaatatggcagttgattcagttggacaagccttatacttgtggcctaacgtcacttgatattttactggagaggttggatatgtctgtaaggaggatgaaatattgttatattggattaaatagagtattggaggtccaagttttggagctttctttgatagctcatttatgtagactctcaaagattgcagtgtgttccaaggtagttctgggtaaggtgctctgggtaattaatcgcttagaggatctgtgtgctgatgggtcctgtgaactgtctgacttcagtggagaaattaagaaggcctgtgataccaaccgtattggagataatctgattggcaacatcaacaatttgtttcaactcttccatctgaaaccaacaacagactttggaatgcttaaagtgataagtgcaatgttgcgggtctgtgataacgattctgaaaatccattacaatacatttgtggattaccggtgggtgtcagctttaaaatatctctgtggaacatatctggtcaccatcgactgtggctccgcatgaccattggtgaatctgtgcaacataccttcctagaattttctcgttttgaaggcaatgatgagggatcagcacccaccagggtggacatggaggaccgagtgattgtgtggttcaactctctgatgaactgaatgtttattttgttagtgctagccaatggtgatgattaaaataagcgaccatatgctttccatgctcatcgtcttaaaggcttttgcttgagtggacattcttgatccaggtctcttctggggaaaagggttcagttgtgctgaaatttttgtagttatggcaaaagcaatgcagatgagctgcatgctccatgaccgtatgcatagtgtggagtgcaagtgggttttaacctggtcgaagcactttgagttcgttaggagctacaacttcagacggaaagtgaaggcgtgaagctcaccaagtgacgatggagaaagtgcagcgtgggggtgaagctgacgatggagaaggtgcggcggaccacgctgcgcgggtttttttttgtcaccaatttgtgtggccttggccggcggtgagtgagaaacagccgggtcagaaattcgcaatcctgcagtacggttcatattatattaataatacttccgttttcgaaaatttatcttgtagttcatttcttca

SEQ ID NO: 7203 - DNA, 2935 bp, Zea Mays
cccacaccagaaggagccaaccccccctcaggccccaacccttttcccacttcccgccggagcgctctcctcttcgccgctccatcaccgcctcccaatcccatgggcgacccgcaccccctctcctccgcccacctcaccgctgctgcctcctcggctcgagaacaccgtggccccaccaacgagcgcctcgccgcgtccgatccttccacgtccttcgctaagcgtcctagggttgcggcggagccgtccgattccggcggctgcgttccatgcgtcgaggcggacgtacgagctcttgtgtcggtgtccggaggaatttacccgctggcgcgggcaggagcgctccgtggactcaccgcggtccttgagaaggtcgacaccagcagctgtgtcagcgcagcgatcacggactgttgctacaaatgcgcggtggagctcatgagggacgacgacaatggcgtcaggttagccgttgtgcgattggtggacgcgtgtgctcgaaatatttcagcgagattggattttgatgccaatggctatggtgacctgatggacatgattttcctacaggtgagaatggaagcattcgctgcacttggtaaaatgcaacgagtttctgagggtgttctgctacaatcgctagaaaagaaggtcatgaaaactgacaggatgggtgtttctatcatcaacggccaaaaattacctcctaaactaaaaattccctgtgctgctgggattttttcccatggagttgaagatgaattttacgaggtgagaagaactgcctgcaaatcattaggagcgctggcaaagttttctactcagtacacagagaaggccttggacttgttgatggacatgatgaatgatgatacagaagcagttaggctgcaggctctggaagcactatttagtatggcaacatatggatgtttgagtgtgcaggagaagcacatgcatatgtttcttgggttgctggttgatgccaatgtcttaattcgagatgcagcacgcaagatctttgggttagtcaacatgccaaaacttcaaatattcaaatctgcagttgatggtcttgttacaagtttggagaagtatccagaggaagaggatatatatggtattatgttttccattggtaagaaccatgggagcttttcagctaacatagctaaacatttggccaaagagattactatggcatctgacggagagcttatcttggacaaaccaagggtcaaagcattgttaatagtgtctatttcagcacctttttctgatgataagcacaagcagctgggtataccttcgattatcttctcgtatgcaattcccctactggagaagatctcatgcgcactaggagaggttgatcaggattcactcttatcttacttgtatcataaaggtggaatgccattttgggaaaacaggtcagtatctgcagagtttggagaatctgaaagctgcaatgttgaaacagtgaaaattggtgcccatatagaaaacactgcaaaggaagccaaatgtctagatgaagttctggtaatgaaatccatactagaaatagttgaaggagtctggactatgagaatgtcgtgcaatgtttgtgaagttcgaactattttcagaacatgcaaagaagagctgagattattggcagaaaattcttctggatcaattggtgcattattgagctttctgagtgagtatcttgatgcaatattattcattgttgaaatatggcagttgattcagttggacaagccttatacttgtggcctaacgtcacttgatattttactggagaggttggatatgtctgtaaggaggatgaaatattgttatattggattaaatagagtattggaggtccaagttttggagctttctttgatagctcatttatgtagactctcaaagattgcagtgtgttccaaggtagttctgggtaaggtgctctgggtaattaatcgcttagaggatctgtgtgctgatgggtcctgtgaactgtctgacttcagtggagaaattaagaaggcctgtgataccaaccgtattggagataatctgattggcaacatcaacaatttgtttcaactcttccatctgaaaccaacaacagactttggaatgcttaaagtgataagtgcaatgttgcgggtctgtgataacgattctgaaaatccattacaatacatttgtggattaccggtgggtgtcagctttaaaatatctctgtggaacatatctggtcaccatcgactgtggctccgcatgaccattggtgaatctgtgcaacataccttcctagaattttctcgttttgaaggcaatgatgagggatcagcacccaccagggtggacatggaggaccgagtgattgtgtggttcaactctctgatgaactgaatgtttattttgttagtgctagccaatggtgatgattaaaataagcgaccatatgctttccatgctcatcgtcttaaaggcttttgcttgagtggacattcttgatccaggtctcttctggggaaaagggttcagttgtgctgaaatttttgtagttatggcaaaagcaatgcagatgagctgcatgctccatgaccgtatgcatagtgtggagtgcaagtgggttttaacctggtcgaagcactttgagttcgttaggagctacaacttcagacggaaagtgaaggcgtgaagctcaccaagtgacgatggagaaagtgcagcgtgggggtgaagctgacgatggagaaggtgcggcggaccacgctgcgcgggtttttttttgtcaccaatttgtgtggccttggccggcggtgagtgagaaacagccgggtcagaaattcgcaatcctgcagtacggttcatattatattaataatacttccgttttcgaaaatttatcttgtagttcatttcttca

SEQ ID NO: 7204 - DNA, 2897 bp, Zea Mays
cccacaccagaaggagccaaccccccctcaggccccaacccttttcccacttcccgccggagcgctctcctcttcgccgctccatcaccgcctcccaatcccatgggcgacccgcaccccctctcctccgcccacctcaccgctgctgcctcctcggctcgagaacaccgtggccccaccaacgagcgcctcgccgcgtccgatccttccacgtccttcgctaagcgtcctagggttgcggcggagccgtccgattccggcggctgcgttccatgcgtcgaggcggacgtacgagctcttgtgtcggtgtccggaggaatttacccgctggcgcgggcaggagcgctccgtggactcaccgcggtccttgagaaggtcgacaccagcagctgtgtcagcgcagcgatcacggactgttgctacaaatgcgcggtggagctcatgagggacgacgacaatggcgtcaggttagccgttgtgcgattggtggacgcgtgtgctcgaaatatttcagcgagattggattttgatgccaatggctatggtgacctgatggacatgattttcctacagctaagctccatggctagggacatgtgcacgcaggtgagaatggaagcattcgctgcacttggtaaaatgcaacgagtttctgagggtgttctgctacaatcgctagaaaagaaggtcatgaaaactgacaggatgggtgtttctatcatcaacggccaaaaattacctcctaaactaaaaattccctgtgctgctgggattttttcccatggagttgaagatgaattttacgaggtgagaagaactgcctgcaaatcattaggagcgctggcaaagttttctactcagtacacagagaaggccttggacttgttgatggacatgatgaatgatgatacagaagcagttaggctgcaggctctggaagcactatttagtatggcaacatatggatgtttgagtgtgcaggagaagcacatgcatatgtttcttgggttgctggttgatgccaatgtcttaattcgagatgcagcacgcaagatctttgggttagtcaacatgccaaaacttcaaatattcaaatctgcagttgatggtcttgttacaagtttggagaagtatccagaggaagaggatatatatggtattatgttttccattggtaagaaccatgggagcttttcagctaacatagctaaacatttggccaaagagattactatggcatctgacggagagcttatcttggacaaaccaagggtcaaagcattgttaatagtgtctatttcagcacctttttctgatgataagcacaagcagctgggtataccttcgattatcttctcgtatgcaattcccctactggagaagatctcatgcgcactaggagaggttgatcaggattcactcttatcttacttgtatcataaaggtggaatgccattttgggaaaacagaaaacactgcaaaggaagccaaatgtctagatgaagttctggtaatgaaatccatactagaaatagttgaaggagtctggactatgagaatgtcgtgcaatgtttgtgaagttcgaactattttcagaacatgcaaagaagagctgagattattggcagaaaattcttctggatcaattggtgcattattgagctttctgagtgagtatcttgatgcaatattattcattgttgaaatatggcagttgattcagttggacaagccttatacttgtggcctaacgtcacttgatattttactggagaggttggatatgtctgtaaggaggatgaaatattgttatattggattaaatagagtattggaggtccaagttttggagctttctttgatagctcatttatgtagactctcaaagattgcagtgtgttccaaggtagttctgggtaaggtgctctgggtaattaatcgcttagaggatctgtgtgctgatgggtcctgtgaactgtctgacttcagtggagaaattaagaaggcctgtgataccaaccgtattggagataatctgattggcaacatcaacaatttgtttcaactcttccatctgaaaccaacaacagactttggaatgcttaaagtgataagtgcaatgttgcgggtctgtgataacgattctgaaaatccattacaatacatttgtggattaccggtgggtgtcagctttaaaatatctctgtggaacatatctggtcaccatcgactgtggctccgcatgaccattggtgaatctgtgcaacataccttcctagaattttctcgttttgaaggcaatgatgagggatcagcacccaccagggtggacatggaggaccgagtgattgtgtggttcaactctctgatgaactgaatgtttattttgttagtgctagccaatggtgatgattaaaataagcgaccatatgctttccatgctcatcgtcttaaaggcttttgcttgagtggacattcttgatccaggtctcttctggggaaaagggttcagttgtgctgaaatttttgtagttatggcaaaagcaatgcagatgagctgcatgctccatgaccgtatgcatagtgtggagtgcaagtgggttttaacctggtcgaagcactttgagttcgttaggagctacaacttcagacggaaagtgaaggcgtgaagctcaccaagtgacgatggagaaagtgcagcgtgggggtgaagctgacgatggagaaggtgcggcggaccacgctgcgcgggtttttttttgtcaccaatttgtgtggccttggccggcggtgagtgagaaacagccgggtcagaaattcgcaatcctgcagtacggttcatattatattaataatacttccgttttcgaaaatttatcttgtagttcatttcttca

SEQ ID NO: 7205 - DNA, 3403 bp, Zea Mays
cccacaccagaaggagccaaccccccctcaggccccaacccttttcccacttcccgccggagcgctctcctcttcgccgctccatcaccgcctcccaatcccatgggcgacccgcaccccctctcctccgcccacctcaccgctgctgcctcctcggctcgagaacaccgtggccccaccaacgagcgcctcgccgcgtccgatccttccacgtccttcgctaagcgtcctagggttgcggcggagccgtccgattccggcggctgcgttccatgcgtcgaggcggacgtacgagctcttgtgtcggtgtccggaggaatttacccgctggcgcgggcaggagcgctccgtggactcaccgcggtccttgagaaggtcgacaccagcagctgtgtcagcgcagcgatcacggactgttgctacaaatgcgcggtggagctcatgagggacgacgacaatggcgtcaggttagccgttgtgcgattggtggacgcgtgtgctcgaaatatttcagcgagattggattttgatgccaatggctatggtgacctgatggacatgattttcctacagctaagctccatggctagggacatgtgcacgcaggtgagaatggaagcattcgctgcacttggtaaaatgcaacgagtttctgagggtgttctgctacaatcgctagaaaagaaggtcatgaaaactgacaggatgggtgtttctatcatcaacggccaaaaattacctcctaaactaaaaattccctgtgctgctgggattttttcccatggagttgaagatgaattttacgaggtgagaagaactgcctgcaaatcattaggagcgctggcaaagttttctactcagtacacagagaaggccttggacttgttgatggacatgatgaatgatgatacagaagcagttaggctgcaggctctggaagcactatttagtatggcaacatatggatgtttgagtgtgcaggagaagcacatgcatatggtatattaactatgaacatagtttggcaagtaatctgcatatatatatatatatatataattggccactccttaggtaccacatgccgcatgttagtcctatggcactctttttaattcatagctagtcattttttcatactctgtttataagatatgccttgtaatgatatcacaggttcttggatagaatgaagatttttttctcaagcatgcaggagagctgcgtatcaggatatattttttatatcctcagtttatcatgcaaccatgctattcactgaaatattttgttgcaattgtaggaaaatattttgtagccactagccagagatcctcaagccaataccactgtaccagcgtattaaagaaagagtattggcacagatattattcagagaaatctttgctgatagtgatatgtacagttgaacattttcttgggttgctggttgatgccaatgtcttaattcgagatgcagcacgcaagatctttgggttagtcaacatgccaaaacttcaaatattcaaatctgcagttgatggtcttgttacaagtttggagaagtatccagaggaagaggatatatatggtattatgttttccattggtaagaaccatgggagcttttcagctaacatagctaaacatttggccaaagagattactatggcatctgacggagagcttatcttggacaaaccaagggtcaaagcattgttaatagtgtctatttcagcacctttttctgatgataagcacaagcagctgggtataccttcgattatcttctcgtatgcaattcccctactggagaagatctcatgcgcactaggagaggttgatcaggattcactcttatcttacttgtatcataaaggtggaatgccattttgggaaaacaggtcagtatctgcagagtttggagaatctgaaagctgcaatgttgaaacagtgaaaattggtgcccatatagaaaacactgcaaaggaagccaaatgtctagatgaagttctggtaatgaaatccatactagaaatagttgaaggagtctggactatgagaatgtcgtgcaatgtttgtgaagttcgaactattttcagaacatgcaaagaagagctgagattattggcagaaaattcttctggatcaattggtgcattattgagctttctgagtgagtatcttgatgcaatattattcattgttgaaatatggcagttgattcagttggacaagccttatacttgtggcctaacgtcacttgatattttactggagaggttggatatgtctgtaaggaggatgaaatattgttatattggattaaatagagtattggaggtccaagttttggagctttctttgatagctcatttatgtagactctcaaagattgcagtgtgttccaaggtagttctgggtaaggtgctctgggtaattaatcgcttagaggatctgtgtgctgatgggtcctgtgaactgtctgacttcagtggagaaattaagaaggcctgtgataccaaccgtattggagataatctgattggcaacatcaacaatttgtttcaactcttccatctgaaaccaacaacagactttggaatgcttaaagtgataagtgcaatgttgcgggtctgtgataacgattctgaaaatccattacaatacatttgtggattaccggtgggtgtcagctttaaaatatctctgtggaacatatctggtcaccatcgactgtggctccgcatgaccattggtgaatctgtgcaacataccttcctagaattttctcgttttgaaggcaatgatgagggatcagcacccaccagggtggacatggaggaccgagtgattgtgtggttcaactctctgatgaactgaatgtttattttgttagtgctagccaatggtgatgattaaaataagcgaccatatgctttccatgctcatcgtcttaaaggcttttgcttgagtggacattcttgatccaggtctcttctggggaaaagggttcagttgtgctgaaatttttgtagttatggcaaaagcaatgcagatgagctgcatgctccatgaccgtatgcatagtgtggagtgcaagtgggttttaacctggtcgaagcactttgagttcgttaggagctacaacttcagacggaaagtgaaggcgtgaagctcaccaagtgacgatggagaaagtgcagcgtgggggtgaagctgacgatggagaaggtgcggcggaccacgctgcgcgggtttttttttgtcaccaatttgtgtggccttggccggcggtgagtgagaaacagccgggtcagaaattcgcaatcctgcagtacggttcatattatattaataatacttccgttttcgaaaatttatcttgtagttcatttcttca

SEQ ID NO: 7206 - DNA, 3708 bp, Zea Mays
cccacaccagaaggagccaaccccccctcaggccccaacccttttcccacttcccgccggagcgctctcctcttcgccgctccatcaccgcctcccaatcccatgggcgacccgcaccccctctcctccgcccacctcaccgctgctgcctcctcggctcgagaacaccgtggccccaccaacgagcgcctcgccgcgtccgatccttccacgtccttcgctaagcgtcctagggttgcggcggagccgtccgattccggcggctgcgttccatgcgtcgaggcggacgtacgagctcttgtgtcggtgtccggaggaatttacccgctggcgcgggcaggagcgctccgtggactcaccgcggtccttgagaaggtcgacaccagcagctgtgtcagcgcagcgatcacggactgttgctacaaatgcgcggtggagctcatgagggacgacgacaatggcgtcaggtggacgcgtgtgctcgaaatatttcagcgagattggattttgatgccaatggctatggtgacctgatggacatgattttcctacagggacatgtgcacgcaggtgagaatggaagcattcgctgcacttggtaaaatgcaacgagtttctgagggtgttctgctacaatcgctagaaaagaaggtcatgaaaactgacaggatgggtgtttctatcatcaacggccaaaaattacctcctaaactaaaaattccctgtgctgctgggattttttcccatggagttgaagatgaattttacgaggtgagaagaactgcctgcaaatcattaggagcgctggcaaagttttctactcagtacacagagaaggccttggacttgttgatggacatgatgaatgatgatacagaagcagttaggctgcaggctctggaagcactatttagtatggcaacatatggatgtttgagtgtgcaggagaagcacatgcatatggttcttggatagaatgaagatttttttctcaagcatgcaggagagctgcgtatcaggatatattttttatatcctcagtttatcatgcaaccatgctattcactgaaatattttgttgcaattgtaggaaaatattttgtagccactagccagagatcctcaagccaataccactgtaccagcgtattaaagaaagagtattggcacagatattattcagagaaatctttgctgatagtgatatgtacagttgaacatgtaattttcaagggaacaatataaaacaatatttgaccatgaacatatatgcaataatgcaaggataatggacttagccagaatatgaaacattcgtgcaaatataattttcggtcaaaacagttcggttttgtagttcctaaagtggcgggtccatatttttcgattcttgtgcattttactgtcacaaagcaaccttagctctagcttttaagtagatgaaaagcatgcataatcaaaagacgaagcaggtttgaatcttgtttttgttgaaagttctctctggattctgaatgacttataattgggtttgtacctgtttaaaaagatctttcaaataatctagacatatctttgctattgatattgctaaatgctagtaaaaatctctgaccttatgtatgtataactgtttttgtagtttcttgggttgctggttgatgccaatgtcttaattcgagatgcagcacgcaagatctttgggttagtcaacatgccaaaacttcaaatattcaaatctgcagttgatggtcttgttacaagtttggagaagtatccagaggaagaggatatatatggtattatgttttccattggtaagaaccatgggagcttttcagctaacatagctaaacatttggccaaagagattactatggcatctgacggagagcttatcttggacaaaccaagggtcaaagcattgttaatagtgtctatttcagcacctttttctgatgataagcacaagcagctgggtataccttcgattatcttctcgtatgcaattcccctactggagaagatctcatgcgcactaggagaggttgatcaggattcactcttatcttacttgtatcataaaggtggaatgccattttgggaaaacaggtcagtatctgcagagtttggagaatctgaaagctgcaatgttgaaacagtgaaaattggtgcccatatagaaaacactgcaaaggaagccaaatgtctagatgaagttctggtaatgaaatccatactagaaatagttgaaggagtctggactatgagaatgtcgtgcaatgtttgtgaagttcgaactattttcagaacatgcaaagaagagctgagattattggcagaaaattcttctggatcaattggtgcattattgagctttctgagtgagtatcttgatgcaatattattcattgttgaaatatggcagttgattcagttggacaagccttatacttgtggcctaacgtcacttgatattttactggagaggttggatatgtctgtaaggaggatgaaatattgttatattggattaaatagagtattggaggtccaagttttggagctttctttgatagctcatttatgtagactctcaaagattgcagtgtgttccaaggtagttctgggtaaggtgctctgggtaattaatcgcttagaggatctgtgtgctgatgggtcctgtgaactgtctgacttcagtggagaaattaagaaggcctgtgataccaaccgtattggagataatctgattggcaacatcaacaatttgtttcaactcttccatctgaaaccaacaacagactttggaatgcttaaagtgataagtgcaatgttgcgggtctgtgataacgattctgaaaatccattacaatacatttgtggattaccggtgggtgtcagctttaaaatatctctgtggaacatatctggtcaccatcgactgtggctccgcatgaccattggtgaatctgtgcaacataccttcctagaattttctcgttttgaaggcaatgatgaggtgatgagtggctctatggttgttcctttgtatgctactccaaagacatgttcatttgtgcttcgggtatgtctggtaatggaatgtccatctgcagggatcagcacccaccagggtggacatggaggaccgagtgattgtgtggttcaactctctgatgaactgaatgtttattttgttagtgctagccaatggtgatgattaaaataagcgaccatatgctttccatgctcatcgtcttaaaggcttttgcttgagtggacattcttgatccaggtctcttctggggaaaagggttcagttgtgctgaaatttttgtagttatggcaaaagcaatgcagatgagctgcatgctccatgaccgtatgcatagtgtggagtgcaagtgggttttaacctggtcgaagcactttgagttcgttaggagctacaacttcagacggaaagtgaaggcgtgaagctcaccaagtgacgatggagaaagtgcagcgtgggggtgaagctgacgatggagaaggtgcggcggaccacgctgcgcgggtttttttttgtcaccaatttgtgtggccttggccggcggtgagtgagaaacagccgggtcagaaattcgcaatcctgcagtacggttcatattatattaataatacttccgttttcgaaaatttatcttgtagttcatttcttca

SEQ ID NO: 7207 - DNA, 3207 bp, Zea Mays
cccacaccagaaggagccaaccccccctcaggccccaacccttttcccacttcccgccggagcgctctcctcttcgccgctccatcaccgcctcccaatcccatgggcgacccgcaccccctctcctccgcccacctcaccgctgctgcctcctcggctcgagaacaccgtggccccaccaacgagcgcctcgccgcgtccgatccttccacgtccttcgctaagcgtcctagggttgcggcggagccgtccgattccggcggctgcgttccatgcgtcgaggcggacgtacgagctcttgtgtcggtgtccggaggaatttacccgctggcgcgggcaggagcgctccgtggactcaccgcggtccttgagaaggtcgacaccagcagctgtgtcagcgcagcgatcacggactgttgctacaaatgcgcggtggagctcatgagggacgacgacaatggcgtcaggtggacgcgtgtgctcgaaatatttcagcgagattggattttgatgccaatggctatggtgacctgatggacatgattttcctacagctaagctccatggctagggacatgtgcacgcaggtgagaatggaagcattcgctgcacttggtaaaatgcaacgagtttctgagggtgttctgctacaatcgctagaaaagaaggtcatgaaaactgacaggatgggtgtttctatcatcaacggccaaaaattacctcctaaactaaaaattccctgtgctgctgggattttttcccatggagttgaagatgaattttacgaggtgagaagaactgcctgcaaatcattaggagcgctggcaaagttttctactcagtacacagagaaggccttggacttgttgatggacatgatgaatgatgatacagaagcagttaggctgcaggctctggaagcactatttagtatggcaacatatggatgtttgagtgtgcaggagaagcacatgcatatgtttcttgggttgctggttgatgccaatgtcttaattcgagatgcagcacgcaagatctttgggttagtcaacatgccaaaacttcaaatattcaaatctgcagttgatggtcttgttacaagtttggagaagtatccagaggaagaggatatatatggtattatgttttccattggtaagaaccatgggagcttttcagctaacatagctaaacatttggccaaagagattactatggcatctgacggagagcttatcttggacaaaccaagggtcaaagcattgttaatagtgtctatttcagcacctttttctgatgataagcacaagcagctgggtataccttcgattatcttctcgtatgcaattcccctactggagaagatctcatgcgcactaggagaggttgatcaggattcactcttatcttacttgtatcataaaggtggaatgccattttgggaaaacaggtcagtatctgcagagtttggagaatctgaaagctgcaatgttgaaacagtgaaaattggtgcccatatagaaaacactgcaaaggaagccaaatgtctagatgaagttctggtaatgaaatccatactagaaatagttgaaggagtctggactatgagaatgtcgtgcaatgtttgtgaagttcgaactattttcaggtactaacaactccttttccttttgcacacaaccaaactattctatattacttgagtacatatccagtattactgtttaaccccaaattttacgtgatggtcgatgatagcgtgctattatccatccatattttttgtggaatttttgtatgcacttggtgtgcaatcttgcgttggtaacactccaacccaaggtaacattggatttattctctatatagttaaatatcttttgaattgagtttttcttgattgtagaacatgcaaagaagagctgagattattggcagaaaattcttctggatcaattggtgcattattgagctttctgagtgagtatcttgatgcaatattattcattgttgaaatatggcagttgattcagttggacaagccttatacttgtggcctaacgtcacttgatattttactggagaggttggatatgtctgtaaggaggatgaaatattgttatattggattaaatagagtattggaggtccaagttttggagctttctttgatagctcatttatgtagactctcaaagattgcagtgtgttccaaggtagttctgggtaaggtgctctgggtaattaatcgcttagaggatctgtgtgctgatgggtcctgtgaactgtctgacttcagtggagaaattaagaaggcctgtgataccaaccgtattggagataatctgattggcaacatcaacaatttgtttcaactcttccatctgaaaccaacaacagactttggaatgcttaaagtgataagtgcaatgttgcgggtctgtgataacgattctgaaaatccattacaatacatttgtggattaccggtgggtgtcagctttaaaatatctctgtggaacatatctggtcaccatcgactgtggctccgcatgaccattggtgaatctgtgcaacataccttcctagaattttctcgttttgaaggcaatgatgagggatcagcacccaccagggtggacatggaggaccgagtgattgtgtggttcaactctctgatgaactgaatgtttattttgttagtgctagccaatggtgatgattaaaataagcgaccatatgctttccatgctcatcgtcttaaaggcttttgcttgagtggacattcttgatccaggtctcttctggggaaaagggttcagttgtgctgaaatttttgtagttatggcaaaagcaatgcagatgagctgcatgctccatgaccgtatgcatagtgtggagtgcaagtgggttttaacctggtcgaagcactttgagttcgttaggagctacaacttcagacggaaagtgaaggcgtgaagctcaccaagtgacgatggagaaagtgcagcgtgggggtgaagctgacgatggagaaggtgcggcggaccacgctgcgcgggtttttttttgtcaccaatttgtgtggccttggccggcggtgagtgagaaacagccgggtcagaaattcgcaatcctgcagtacggttcatattatattaataatacttccgttttcgaaaatttatcttgtagttcatttcttca

SEQ ID NO: 7208 - DNA, 3131 bp, Zea Mays
atggtatgtcacaaggaagtgctgaaatggactgttcagatgatgatgttaatactgtttcacgaattccaactacaaataagcctcatgatgagtcattggggaatgtcccaatcagcaaggatggtatcaatactaataataacttaagcatagagctaaagaaagaacacgacagtgatatgcatcaagattgttcatctatgacaaataaggttactattgatgctattgatggtgacaagtgtattaaaacaaaagttggtgttttcagccatgcaggtcagcaggggttccgaaatgaggtttctgctagcgaaaactctaaagacaaacgctctttgaattctgagaagaatactccagtaaataatactgaccatagcatgcaagatgctaagactgctgcaggctccagtaccacagatctccagaagtcatcagctttgccaaaatctgcttctcctaaaatgcaacctactaagcaacctcctaagactttagatagccgtcttgggaagactagaagcccagatataaagtcagagatgtctcaaaatggtatgcaagctgggagctgtagtgagaaccatgcaaaacttgctgctttgaagacagagcatcagaatgaaagtgaagaggtcggtagacactctgatttgcacccaagagactctgtcctgggtgaagactcagaacttgatggtgcttcaagcagtcaacagcatagtgaatatagcaagaagacagcttctgaaaagtcagaacgtgacaaatccaaacctgactcttgtaacatatctgttcagaatgaaaaagatggacaacttggggcaaatttgagagaactggggtatgcttatgtgaacaggaatgaaagatgggagaggttcatggagtctgagagagaaaagagcaatggagaatgccatggtggcagacatgcatctgacgttatgaacaaacgaatgacaaaccaccgtggtggttggcggggtgctggatcccgtggccatctgaggaacttccgaggtccaagaatgcgcaatgagtttgctgatgaatctattggtggcaacaggcactcatttgaagatgaacctgggcacacccgaggtccacataggaggcggcattcaccaccacatggctgcctcatgagagatacggacattgacgaattctacggaagagagattccagagtataggctgccggcccgtggacaaatagaagatctcccagatagcatgatggacgacaggttttttatgccgtattcccatagacaccgtggtcaaggtgatcatgggttcatccacagagacagagacaggagtcattcgcctgctgcacagagaagggttggccatgtgcatttccatcgtggacgatcacctgaagcgatgcgcagatcaccaccgccggtaatgcgaactgacagaacatacatgcctcaccgccatcacaacggaagccatgacgagaggggtgccatgcaaagaaatgacaggaggtgcgccatggaaggtgatgcctcaggcttcgagccaccgctacatccctcccacctagctgagttccatacagtagaggaacttgtgggcagaaggaagtatagggagcggagaccatatcttcattcaacggtgagtgacgaagacgagatgctcccctaccgcacggaggatgacatggagtttgctgaaggaggtactgacctactgcactcacagcttgaccggctaatgaagacgacgtcgttggcctttgggtggactggactggctgatgcatctgccacagatctcggtctcagacgaacccaacacctttttgccagcgtctcccattccatatattgctttgtttttgctgcattattttctcaggacatggtgctgcagcgtctaaagcatactgctccctccctctctctatagtaaccctgggtcctgctccgtttacaagccgagctgctagtacatgtggatgatgaagggtgggtggagacactgaacattttgaggccaaggtcaaagtgaaataagaacccccccggcatgtgctatttttgccctgggtgctagtgcggcccttgtattaaagaccgacttgtctctataatttggtttcgagttgatgtgagtacagctgctgtgggaccgacattccatggaaaaggtgagccgcgcgtgaaggcgacaaacgccacttgggtgaaatttcacatgatctctcgagtgccctccgtggaactggatggagctgcgaagctgctgctgcgtactcgagggattcgttgtccgtgggggctcgacagctccagcgatttggcatcttcattgttctctttctgtggtccagctccagccatacaggcgttgttgtgccgctgtcgtacgcgacccgaacgcgagcgcgatgagagtcgattggtctgtctgccgtcgctttgaccggcgttgcgcttgatggtcaagtcgtcgcctgcgcatagcaaatccacacgtctgcttggtgcttgctttctcgagattaatctcgctatttctcaacaacagcatcacaaagcatttttgcccaatgtgacttctttcctcgaattcctggaaatttcccagttctcgcaaccacgtatatgtattcatgcgaaggcgcatcaagatgtaaagttttacaagaaatgatgcatcctggtccctaccggaacaaaaaatcgcggcaacaccatttcactttgccggcgggccgggccacctgctgatcagctccttctcatacttaatggtgtacgcctgcaggagcagcgtggccggctggtggtacttcgccagggcctgcccggagcctagctgcactagccgtcttttttgctttttaatcttttttcgaaacatttttgtagtttaaattcaaaaaatagacctttatctcggcggcgtcatcatcattaacgcggatgttacatgtctcggcgccaatataaataacgtcgagatctcactcgctcagatgcgctaatttggcatgtacgtggcaggggttggcacatcattattggcgcgaaaccctttatccatcgccggcccctcggcctctttgcagcgtgtgtgtgcagtgtgcgcgac

SEQ ID NO: 7209 - DNA, 1467 bp, Zea Mays
gttcggccccggcgagcggagcggtgggagagaggacacagattatcagctgattgtcacggaagatgtcgctagccaagaaagaagaggtttgcagtcaccgacttgtaccgcgcttggacgagcctgcggttggtgtgcctattaagaagaggccatttttcttgtctgaccgatcggttgcatctgccataccgctctcgacaaagcccccatctccaacgaatacaatgcctgttgctgctacagggtcaggctgccgcgaggaacccttcttcaacatcgctaactcagacagaaaagtcatcaccaaaggatgagaaactgggccagagtcgttcggaacactacaataacgttcctgttgcaaatgaaatcaatgcttctgggaatagtattgttgggagattgcctaacttggatctgaatatacctccggacccagctgattcacttgaaggtttgcctaaaatgcatgaaagtgggagtgggttctatcatcatagaacaattcaacatcagaaagctcaggtgaccccagccgcagccatttctacgataaacagtgggataggtcgaaatatgtgcagtactctgaacatgtctaattcatatgggctttctcataagtctggaccagctgatgttaccttagatttacaacttaaaccaccaactagacctgagctagggataaactggaaaggacttgctcctgctccagaactgagtctctctctatttggtaagcctatggacgagcctgagtttcctagcacccccaatgccttatttcattctggaactgctggaagttccaaaaaggtcagtggggaggctgctgctacacttgggtcagataaggcaccagttgagaagattgtaacacctgttccctgcaatgtaaatcctctgaatactacatcagcaactgtttctggaattgatcagctgccatctaataatttggtgaagaaagaacctgaagaaatatcccagcagcatattattgacggcgctaaaaagccaaatccattagaacgacaaagtgttggacaagttatcggttgtgctgaatctgaaaagacggacagtgcaccccaaggtgctcgtaaaattgggtttgatttgaattctgacatctttgcaaatagtagtatccataatgagtctgatgtagcagcagttgatgccccaataccagctaaaactttacctgatacttgccatgatacgagcatgcctgctgttcctgaagtagacaaatttgtgaagcatgaagaatccacaagtgccaccctcagtcctgttgtggaaacaggaaatggtcatactacactgttggtggaagcaaaatcacagcgttcgcaaggtaatgttgctagccctgctgttgggttatctgaatcctccagccagcccaccgtttctactgtttgcaagccaacagccggccatattcgtgct

SEQ ID NO: 7210 - DNA, 1743 bp, Zea Mays
ctttttgacgtccctgtgtgagacgatgctgtttgttcggccccggcgagcggagcggtgggagagaggacacagattatcagctgattgtcacggaagatgtcgctagccaagaaagaagaggtttgcagtcaccgacttgtaccgcgcttggacgagcctgcggttggtgtgcctattaagaagaggccatttttcttgtctgaccgatcggttgcatctgccataccgctctcgacaaagcccccatctccaacgaatacaatgcctgttgctgctacagggtcaggctgccgcgaggaacccttcttcaacatcgctaactcagacagaaaagtcatcaccaaaggtaagggaatccctgacactcagatccaagaccatgtcaacacgtcgcttactgcgctatccatgaccaacggcaacggggtgctatttaatgcatcaagtgagatcccttctattgcagacagtgctacaaggacgtctgcacccgatgatgaattgcaacttcaaaattttttggctctggatttacagttaccatctcgtcaaagtggcaaaaataataactatagctctcttaggaaggatgagaaactgggccagagtcgttcggaacactacaataacgttcctgttgcaaatgaaatcaatgcttctgggaatagtattgttgggagattgcctaacttggatctgaatatacctccggacccagctgattcacttgaaggtttgcctaaaatgcatgaaagtgggagtgggttctatcatcatagaacaattcaacatcagaaagctcaggtgaccccagccgcagccatttctacgataaacagtgggataggtcgaaatatgtgcagtactctgaacatgtctaattcatatgggctttctcataagtctggaccagctgatgttaccttagatttacaacttaaaccaccaactagacctgagctagggataaactggaaaggacttgctcctgctccagaactgagtctctctctatttggtaagcctatggacgagcctgagtttcctagcacccccaatgccttatttcattctggaactgctggaagttccaaaaaggtcagtggggaggctgctgctacacttgggtcagataaggcaccagttgagaagattgtaacacctgttccctgcaatgtaaatcctctgaatactacatcagcaactgtttctggaattgatcagctgccatctaataatttggtgaagaaagaacctgaagaaatatcccagcagcatattattgacggcgctaaaaagccaaatccattagaacgacaaagtgttggacaagttatcggttgtgctgaatctgaaaagacggacagtgcaccccaaggtgctcgtaaaattgggtttgatttgaattctgacatctttgcaaatagtagtatccataatgagtctgatgtagcagcagttgatgccccaataccagctaaaactttacctgatacttgccatgatacgagcatgcctgctgttcctgaagtagacaaatttgtgaagcatgaagaatccacaagtgccaccctcagtcctgttgtggaaacaggaaatggtcatactacactgttggtggaagcaaaatcacagcgttcgcaaggtaatgttgctagccctgctgttgggttatctgaatcctccagccagcccaccgtttctactgtttgcaagccaacagccggccatattcgtgct

SEQ ID NO: 7211 - DNA, 2597 bp, Zea Mays
agtttttcgtttgggaggagagggagggaaggaaggaatcagattggcgcagatgaggctggagggagaagggaggccagatcagttcaccagtcgacgaagcaagcggcaggaggaggcggactagggagtggttggcgcgtcgccgtcgcgagccagtgagctgcctaggagcgctcctttttagtcgctgcgacgcccgcgcctgcgtaggcgccgtgtgctcctgccggccgcactgagcgtggcgagctctgggccagactcgagcgatcttatcaggtagttcattgtatttcgccattcgtttttccattctttttgacgtccctgtgtgagacgatgctgtttgttcggccccggcgagcggagcggtgggagaggtatacgagatttgtgttgattcccccctcccccacagttttctcgatccatctcgctgaaacttggccgcgggtagatatcgtgtcgtcttgttcagatcgctggtttcccctcgacctcgacgtatattgggatgcttctattccacgcaaccgtgcgatcttgttgctcttggctctgtggccgtggattccatttctgcgtttggggaaagttcttttggctgctcactttgcgctgcacggcagcagtgtgaaggacttggttcttcagctactctagcgctttgatttgcttggggttactaacgattaagtgaatgaatcaagctgcggcatctgggaaagaattgatggcatctgggaaaaaattgatggcactaatcgaatctttctgttcgtgttcatcattaacccagtagattcgtttgtatctaccttctgccagtctactaggactacttagatagtttgattatttctgtataaaactcgtactatcttttatttaacacggaaataaacaatttgcttcttttctattaagaatagtttttcttctaccctattatcttcctgtttatcgctggctgatacgcgatgcactgtgcctttaattctgcttaatctggggaaactgacaacgatttgtaccagaggacacagattatcagctgattgtcacggaagatgtcgctagccaagaaagaagaggtttgcagtcaccgacttgtaccgcgcttggacgagcctgcggttggtgtgcctattaagaagaggccatttttcttgtctgaccgatcggttgcatctgccataccgctctcgacaaagcccccatctccaacgaatacaatgcctgttgctgctacagggtcaggctgccgcgaggaacccttcttcaacatcgctaactcagacagaaaagtcatcaccaaagacagtgctacaaggacgtctgcacccgatgatgaattgcaacttcaaaattttttggctctggatttacagttaccatctcgtcaaagtggcaaaaataataactatagctctcttaggaaggatgagaaactgggccagagtcgttcggaacactacaataacgttcctgttgcaaatgaaatcaatgcttctgggaatagtattgttgggagattgcctaacttggatctgaatatacctccggacccagctgattcacttgaaggtttgcctaaaatgcatgaaagtgggagtgggttctatcatcatagaacaattcaacatcagaaagctcaggtgaccccagccgcagccatttctacgataaacagtgggataggtcgaaatatgtgcagtactctgaacatgtctaattcatatgggctttctcataagtctggaccagctgatgttaccttagatttacaacttaaaccaccaactagacctgagctagggataaactggaaaggacttgctcctgctccagaactgagtctctctctatttggtaagcctatggacgagcctgagtttcctagcacccccaatgccttatttcattctggaactgctggaagttccaaaaaggtcagtggggaggctgctgctacacttgggtcagataaggcaccagttgagaagattgtaacacctgttccctgcaatgtaaatcctctgaatactacatcagcaactgtttctggaattgatcagctgccatctaataatttggtgaagaaagaacctgaagaaatatcccagcagcatattattgacggcgctaaaaagccaaatccattagaacgacaaagtgttggacaagttatcggttgtgctgaatctgaaaagacggacagtgcaccccaaggtgctcgtaaaattgggtttgatttgaattctgacatctttgcaaatagtagtatccataatgagtctgatgtagcagcagttgatgccccaataccagctaaaactttacctgatacttgccatgatacgagcatgcctgctgttcctgaagtagacaaatttgtgaagcatgaagaatccacaagtgccaccctcagtcctgttgtggaaacaggaaatggtcatactacactgttggtggaagcaaaatcacagcgttcgcaaggtaatgttgctagccctgctgttgggttatctgaatcctccagccagcccaccgtttctactgtttgcaagccaacagccggccatattcgtgct

SEQ ID NO: 7212 - DNA, 1846 bp, Zea Mays
caaaatccggcgccgcagtttttcgtttgggaggagagggagggaaggaaggaatcagattggcgcagatgaggctggagggagaagggaggccagatcagttcaccagtcgacgaagcaagcggcaggaggaggcggactagggagtggttggcgcgtcgccgtcgcgagccagtgagctgcctaggagcgctcctttttagtcgctgcgacgcccgcgcctgcgtaggcgccgtgtgctcctgccggccgcactgagcgtggcgagctctgggccagactcgagcgatcttatcagattatcagctgattgtcacggaagatgtcgctagccaagaaagaagaggtttgcagtcaccgacttgtaccgcgcttggacgagcctgcggttggtgtgcctattaagaagaggccatttttcttgtctgaccgatcggttgcatctgccataccgctctcgacaaagcccccatctccaacgaatacaatgcctgttgctgctacagggtcaggctgccgcgaggaacccttcttcaacatcgctaactcagacagaaaagtcatcaccaaagacagtgctacaaggacgtctgcacccgatgatgaattgcaacttcaaaattttttggctctggatttacagttaccatctcgtcaaagtggcaaaaataataactatagctctcttaggaaggatgagaaactgggccagagtcgttcggaacactacaataacgttcctgttgcaaatgaaatcaatgcttctgggaatagtattgttgggagattgcctaacttggatctgaatatacctccggacccagctgattcacttgaaggtttgcctaaaatgcatgaaagtgggagtgggttctatcatcatagaacaattcaacatcagaaagctcaggtgaccccagccgcagccatttctacgataaacagtgggataggtcgaaatatgtgcagtactctgaacatgtctaattcatatgggctttctcataagtctggaccagctgatgttaccttagatttacaacttaaaccaccaactagacctgagctagggataaactggaaaggacttgctcctgctccagaactgagtctctctctatttggtaagcctatggacgagcctgagtttcctagcacccccaatgccttatttcattctggaactgctggaagttccaaaaaggtcagtggggaggctgctgctacacttgggtcagataaggcaccagttgagaagattgtaacacctgttccctgcaatgtaaatcctctgaatactacatcagcaactgtttctggaattgatcagctgccatctaataatttggtgaagaaagaacctgaagaaatatcccagcagcatattattgacggcgctaaaaagccaaatccattagaacgacaaagtgttggacaagttatcggttgtgctgaatctgaaaagacggacagtgcaccccaaggtgctcgtaaaattgggtttgatttgaattctgacatctttgcaaatagtagtatccataatgagtctgatgtagcagcagttgatgccccaataccagctaaaactttacctgatacttgccatgatacgagcatgcctgctgttcctgaagtagacaaatttgtgaagcatgaagaatccacaagtgccaccctcagtcctgttgtggaaacaggaaatggtcatactacactgttggtggaagcaaaatcacagcgttcgcaaggtaatgttgctagccctgctgttgggttatctgaatcctccagccagcccaccgtttctactgtttgcaagccaacagccggccatattcgtgct

SEQ ID NO: 7213 - DNA, 1242 bp, Zea Mays
gcgtattcaacatttcgattagcgaatcgctttctccacgaactcacgaatgcgttggccgctgggagaaggagcagttccgctctctcgtttgggtggacgacgaggaagaggaggccaacgcccacagcaacaggcgaccagcccgcgaagacgtggcaccaggataggtgctcctgtcctgagcttcaaatccgcaccccgcggccaagctgttacttgcgctgcggccttagcatgaggtggccgctggcgatctcgactcgccgccgccccctcctccttttcatccttctcgtcgtcctctacacgattcctgggacattttcatcgagatttgccagatgtgagggaggtgcacacgctatatacctttaagggtgaagaatcatggcagagcttccagaaaagaaatgcaagcgatgtggtttgtatgaggaggacacaattacacctgatgatgtctttgatgaatgggagatgtgttcgagtgatttcaagggtgggaaatacacccggtttaaggaaggccagttcaatgcaacattcctatgtccaaactgcactgcctcaactggacatggaaaccgtgaacctagtgaagatttggaaactaagaagacatctgttgtggtcatcataatagttagtgttcttgcatcagtccttctcaccattgccttgttcgggggctacaagtactggcagaagaagaagcgggagcaagaccaggcgcgattcctcaaactctttgaagagggagatgaccttgaagatgaactgggccttaccaatgaactctaaaacagtgctacagtcttacttcctatgttttcagatgtagtttccacgtatgatgtataggatgtttggttttcactgattttattgtgtatagcatccagtagtttatagagaaatgattccaacaaaactatgattcggttgaatatctgcacggaccgttcggtcgtgcagggctttgcctacgagacttgtggcaggcttagtgcgattccggactgttcggcgtaaggtgccggacgggccgttggaggacggttcggccgtgtccagagccgatgtaccatacagtgaggatggtgatatcattttccccggatatgagtttatcgacataccataatatggttgggactgagaagtcctatttgttgccgatgtttttaacgcaattattttagtgcccaatttatgtgacaaaaaaatcaggtgtatgac

SEQ ID NO: 7214 - DNA, 1219 bp, Zea Mays
ataatttttcctgttcgtatcaccgctggaggcagttgtagtatcaccggctgacaggtttgatatggaagcccttcctcctaccttgacatctgcttctgagcagccacctctctatgatggcacaaccagattgtatatgtcctacgtttgcccgtatgcgcaacgggcatggatcacgaggaattacaagggtttgcaggagaagatcaagctagtccctatgaacatggcagataagcctggatggtataaggaggtttaccccaacaatcaggtgccttcgttggagcacaacaagagggtcataggagagagcttggatctgataaagtacatcgatagcaacttcgacggacccaaacttaccatcaccgacgatcctgaaaggcaaaggttcgcagaagagctgctggggtattcagacgctttcaaccgggcgtttctcgacgcgcttagatctgagggggccatgaccactgaagctgttgctgctctggacaaaatcgacagcgccctgttaaaattcgatgatggccctttcttccttggccaacttaatctggtggacattgcatacgcaccattcatcgaaggttttcagatattttttgctggcatgaagaattgtgacatcacccaagggagagttcacatacagaaattcatcgagattgacgcgtgcacgcagaccaagcaggaccctcaagtgctgcttgctctcacaaagaagaagtttgggatttaaggatgcatgaagcacctgatctgagctccacaaatggatcttcgtacgaataaaatgaaggagagtccgttttgaattgggaataatcaggacgagttgaacagcttgacagttgaatgctgtcagtgttctcgagcatgataaactgtaaagacttcgctattttatttaggtttaataatgactattaaacctggcgagtaaagcttcagctccaattgtccatgtcagtgcttgttgacgctttttcggagcgtcaaatactcaagaagaaccggcggcggtgctctctggtcaggcgcggacggtccgcggcacagggccggacggtccgcgacctggcgcgaggcggcggtgctctctggtcaggcgcggacggtccgcggcctggggccagacggtccgcgacctgatgcaggagcttgggtcctctgcctgacggccggacggtccgcgcgtgcacaggggcgg

SEQ ID NO: 7215 - DNA, 1309 bp, Zea Mays
ctcgagctgaactaattttccttcggcttccctgtcatctctgactggccttgcttgctgctgccatcttgcatgctcttgtttattaacagcgccataattttacttgcgaaaggcataatttttcctgttcgtatcaccgctggaggcagttgtagtatcaccggctgacaggtttgatatggaagcccttcctcctaccttgacatctgcttctgagcagccacctctctatgatggcacaaccagattgtatatgtcctacgtttgcccgtatgcgcaacgggcatggatcacgaggaattacaagggtttgcaggagaagatcaagctagtccctatgaacatggcagataagcctggatggtataaggaggtttaccccaacaatcaggtgccttcgttggagcacaacaagagggtcataggagagagcttggatctgataaagtacatcgatagcaacttcgacggacccaaacttaccatcaccgacgatcctgaaaggcaaaggttcgcagaagagctgctggggtattcagacgctttcaaccgggcgtttctcgacgcgcttagatctgagggggccatgaccactgaagctgttgctgctctggacaaaatcgacagcgccctgttaaaattcgatgatggccctttcttccttggccaacttaatctgatattttttgctggcatgaagaattgtgacatcacccaagggagagttcacatacagaaattcatcgaggaaatgaacaagattgacgcgtgcacgcagaccaagcaggaccctcaagtgctgcttgctctcacaaagaagaagtttgggatttaaggatgcatgaagcacctgatctgagctccacaaatggatcttcgtacgaataaaatgaaggagagtccgttttgaattgggaataatcaggacgagttgaacagcttgacagttgaatgctgtcagtgttctcgagcatgataaactgtaaagacttcgctattttatttaggtttaataatgactattaaacctggcgagtaaagcttcagctccaattgtccatgtcagtgcttgttgacgctttttcggagcgtcaaatactcaagaagaaccggcggcggtgctctctggtcaggcgcggacggtccgcggcacagggccggacggtccgcgacctggcgcgaggcggcggtgctctctggtcaggcgcggacggtccgcggcctggggccagacggtccgcgacctgatgcaggagcttgggtcctctgcctgacggccggacggtccgcgcgtgcacaggggcgg

SEQ ID NO: 7216 - DNA, 1710 bp, Zea Mays
ccgccggcccagcgagagcgagccagcgaggtgcccaggaccaggacggctggggaccctgtcatccaatcagtccgtcacacgaacacgacacgattcacacatttcaatcactcgcttcccatgaattcgctcgctttccctagctgcccgtcagcattgacgcccgcctccaccaccgcccccgcgtcctctccctttccctcgccgcgtataaagattcgctgcccgcgacaagaagatgcagctcattaccacctccgcctccgcgatcgaagctcctcacaaaccgttatcgtcgccatggcagccgccgcgcctgcaaggtgagaactgagaactgagcagaaccaagcgctgaatttctgcgaaggagattcttttctgagctttttaatggaacaattcttcctccttctcgtccagctccgtgaaggaagtgctgccatctcccctgacctccgcctccgagccccctcccctcttcgatggcaccaccaggtaggttttcgacccattaattataaatcttcaattgtgcagaccaggaactagaagttaacccttttttgagtctcgtgaaggctgtacgttgcctatcattgcccgtacgcgcagcgcgcttggattgccaggaactacaaggacaagattaagatagtcgccatcgatcttgctgacaggccaacatggtacaaggagaaggtttatccagaaaacaaggtgccttctctggagcacaacaaccaggtgaaaggtgagagtttggatctggtcaagtacattgacagcaactttgaaggcccatcgttgctcccagaggatccttcaaaaaagcagttcgctgaggagctgcttgcatatactgatgcatttaacaaagcattatacttttgtatagtctccaaggaagatgtgtctgaggaagctgtcgctgctttggataaaatagaagacgccctcgggaaattcaacgagggtccattctcccttggtcagttcagtctggtggacattgcgtatgtaccattcatcgagaggtttcagatattctattccaacataaagaactatgatattacaaagggcagacccaaccttcagaagttcattgaggctgaatggcccaatgcaaacagttttcttgataatgctttatcgaggagaaattttaactcgtggattggtatattttaggaagtggacaagattgatgcatacacacagactaaacaggacccacagtttttacttgagcagacaaagaagcggcttgggattgcttaaagcttgcggccgaggatgactctcgacagaaataccagcatagtagatcgacacttgtttagtcatttgtgtgcttgaataatgaatactacatatatggttttcaataagacatggtcctctatactgggttgtacttctgaaaacaaactagttgtcctgatattatagctttcgtggtgtgtttacgtcactgtatatgaaagggtggggagagagaatgatatgccatgtattctgtcaaatgtttttttataatgtcaagagctctgacttttaattaagaagaaaaaggattatatataagggccaaccaaacacatgatgctgccaaacaatatattcgaatggctaacccacctatgcaatacggcaaagcattatcatgaatcatggttgctactaaaaaaaggaaaaaaaaaa

SEQ ID NO: 7217 - DNA, 1252 bp, Zea Mays
ccgccggcccagcgagagcgagccagcgaggtgcccaggaccaggacggctggggaccctgtcatccaatcagtccgtcacacgaacacgacacgattcacacatttcaatcactcgcttcccatgaattcgctcgctttccctagctgcccgtcagcattgacgcccgcctccaccaccgcccccgcgtcctctccctttccctcgccgcgtataaagattcgctgcccgcgacaagaagatgcagctcattaccacctccgcctccgcgatcgaagctcctcacaaaccgttatcgtcgccatggcagccgccgcgcctgcaagctccgtgaaggaagtgctgccatctcccctgacctccgcctccgagccccctcccctcttcgatggcaccaccaggctgtacgttgcctatcattgcccgtacgcgcagcgcgcttggattgccaggaactacaaggacaagattaagatagtcgccatcgatcttgctgacaggccaacatggtacaaggagaaggtttatccagaaaacaaggtgccttctctggagcacaacaaccaggtgaaaggtgagagtttggatctggtcaagtacattgacagcaactttgaaggcccatcgttgctcccagaggatccttcaaaaaagcagttcgctgaggagctgcttgcatatactgatgcatttaacaaagcattatacttttgtatagtctccaaggaagttcattgaggaagtggacaagattgatgcatacacacagactaaacaggacccacagtttttacttgagcagacaaagaagcggcttgggattgcttaaagcttgcggccgaggatgactctcgacagaaataccagcatagtagatcgacacttgtttagtcatttgtgtgcttgaataatgaatactacatatatggttttcaataagacatggtcctctatactgggttgtacttctgaaaacaaactagttgtcctgatattatagctttcgtggtgtgtttacgtcactgtatatgaaagggtggggagagagaatgatatgccatgtattctgtcaaatgtttttttataatgtcaagagctctgacttttaattaagaagaaaaaggattatatataagggccaaccaaacacatgatgctgccaaacaatatattcgaatggctaacccacctatgcaatacggcaaagcattatcatgaatcatggttgctactaaaaaaaggaaaaaaaaaa

SEQ ID NO: 7218 - DNA, 1482 bp, Zea Mays
agcaggatgatcggactgccacgtggcttccctttctgccgtccgcgcctcccgcccggattgcatgttgcaaggcccaaggagattgccccacatgatcagttattttaggttagggcttgtgctttgcacttggcatcatccaagtatatttccgagctcaacacagtcgcagataagtacccagagcccgagcaccatcctgtatcgtatcacacgcacgcccatctgcgccaagcttgggtaaaagaaggatcggagaatggctgcgcagacgacggtgcaatgcaggttgccaaatgtccccgaggtgatcggtggcggtggcatgcggacggtggagtgcctgaggggaaggcttctcgcggagcgggtggcatccaaggctgcaaaggaggatgccgaccaactgaccaaaaggctggacgagctagagaagaagctcgccggcgaggtcagggtgaggaacagggcggagaggaggctcaggagggccatcaagaagctggagtccctcaagatcctggacgtcgagctctcggaaggctccattgggtcgctgtcctccaacggccgttcggatcaccaggcgccggaggccgaggagaggaacggccctggctcgttgaccactcgtgggtctgtgctggcatccggtccttccggagaccccgacgccgacgccgacagggaatcgtcagagggatcatgcacccaggtgaattcgtcctcccgggacgggagctggtgctccgttgcgtcagagcaatcccggcctggttcttgcatggatcttgccggaaacaccaccaactgcggctcagaggggagttgcggtgaccatgattcagagagggaacaccttgatgcatccagtggctgtggctcagcaaaatcggaagaagcgttctacgaaagcgacgacaggctagcgctatcgcggggtctcgttgaaccaccaccagcagctgcaggcgaaggtccaagaacgcaggataacgacacgcatgcaggagaggtccgtgccatggatcacgaggaagaagaggagaccaacaagcttgcgatcgttctagccgacccccagccacagtcgcaaggcgacgtgtagtccgttctcctggcgctgcggcgggtgaaggagcagctgcgctacaccatgaaccaggaactcgccgcgccaaccaggagctctacgcccaccgagcgagcgtgccacactaggaaaccgtgtggctcacttctactacggtgtccaacattcggttccgtgaattattcgtagtgctgtttaggggagtggagtatctgtacagaatggaataaggtcgctcatgtggatgtggagtcactattttattaaaaagattgaatctctaggtgctttgcttgcttctgtttactgactagtttatcgcgcgcaatgtgatacggttatctgttatgcaatgctccgtgattatgggtttaaacaccctgtcg

SEQ ID NO: 7219 - DNA, 3983 bp, Zea Mays
gtggaaggaggactagtctaatccactgccctgccgttaaacaagtacttgaagagcgaatgaagctcccggcgtggctcaccgccgtgccgccggaccctcgggcgtacggccacctcatccagctctgcgcggacaccggacacctcgctgctggccgccagctccacgctcgcctcgtcgcttcctccgttaccccgtccaacttcctcgcttccaagctcatttccctatactcccgcggagcccaccttgacgacgcacgcagggtgttcgacgccatcccgcggcccagcgtcttcgcctggaacgccatcctcatcgcactctcgcttcactcggccgatccctccgacgcggcccgcctcttcgccgcctccggcatctctcctgacgagatcacgctctccgcgctcctcaagtcgctcgccgactccggaccgaggttgtccgcactcgtcgcggaggtccacgccgtcgcggtccagcgcggctttggggacgacctgttcgtgtccaatggtctcatcaccgcgtacgcgaacgccggagattcacgctccgctcgcgcggtatttgacgaaatgccgcggcgagacgtggtgtcctggaactcgctgatatcgtcttacgctcgcgcagggtggtaccggcagtgcctagagctgtttcaggagttagcgagcgttcatggtgctggtggtgttagacccaacaacgtcaccgtggctagcgtattgcatgcttgtgcacaactcaaggctgtcgactttggggtaagagtgcaccgccttgctgccgagaatgggcttgattcggacattgcggtgtggaactcagcagttggattttatgccaaatgtggaaggctcaagtatgcaagagagttgtttgatgggatggctaagaaagatgcagtcagttacagtaccatgattgctggttacatgaaccatgggcatgtcgacatgggactggagcttttccagcgagcagatgttcaaggtatcagcatttggaacgcagtgattgctggattgattcaacatggtcgccagtccgatgtgcttggactactgaatgagatgattggttctggaatgctaccgaattcagccacactttcaatcctcattccttcagttcatttgttctccaccctactgggagtgaaacaagcacatgggtatgcgatcagaaacaactatgatcagagtatcggtgttgtgactgcattgattgatgcttactcaaaggctggatttcttgatgggtctcggagggtctttaaactgactgatgatagaagtgaaattgtatggacatcaatcatatctgccgttgcggctcatggagaagctgcagaggcattgcatctgttcaatgagatggtcaatgctggcatcagactggatactatagccttcactgctgtgcttacagcttgtgctcatactggcaaggttgctgatgctcgtaaaatttttaactccatgcaggctatgtttggtatcaatccagtgatggagcaatatgcctgcatggtttctgcattcagccgtgcagggatgctaaatgatgcacttgagcttgtcaacagtatgccatttgaaccaaatgcaatggtctggggtccattgcttaatggagcagcagaattttgtaatgtggagcttggtagatttgtattcgatcaactatttaaaattgagcctaagaacaccggtaattacattgtgatggctaatttgtactcaaatgctggcaaatgggaagaagctgatatcataaggaggaggatgtggggagttgggctcgagaaggttcctgggtgtagttggaattgagggttttcaatggtctgcatgctttgttgctgcatatacatcaagcaagcaagccgcgaaaactatgttgttgttggttgtagaaaatagtttgtcctcaaccactgctaggcgaagacaagttatattgatggactttaaaagatctaatagttgagatgtgattatcgtgcttaagagcacatctgacttttagagctgtttggaccacataagaattcaaaccaatgagagcaacattccagtcgtattgatttgattgattaactaatctaggcccaatacaaataaaaattcaaaccaatgagagccacatttcgtgatcttcttatctttgcaaggtgataggtacagaaacaacaggagattccgcaaatgtaaaaactttagaagcagtatcaatccaatttggattttcacgatcggaaggcatcagctatatccaaatcctggatggaacaccaaacaagctatgtgcagaatgttattcggtgcatcaacagaagttgctctagtgccagatgcgacaaagtttctaattcacaatgctaatctgctgttttcaatatctacattatagaaacaccatttgtgtaacgatgtagaatacgatgcgtttttctacagtctatcatgtgcttttctgaagatttgttctctctcatcaaatgcacacactgttctggtattagaatcagaactgcatggagctagcacaacaagatgtgtcttttagtgcccttgtgtgtctggatcatggttcacatgcttagatcattctacttcactacttcccaactcatgaactccaaagtggaaaagcaggttcacatgctcatcgcaggctgcgcagtcgcgcagatgtggtaatatgataatgtaaggtggcgtctttgatgagacaatgtgaatcattctggtggtccagctcgctctgtagtcttggagttcaagtggagctaaggtgatcggtggcggtggcatgcggacggtggagtgcctgaggggaaggcttctcgcggagcgggtggcatccaaggctgcaaaggaggatgccgaccaactgaccaaaaggctggacgagctagagaagaagctcgccggcgaggtcagggtgaggaacagggcggagaggaggctcaggagggccatcaagaagctggagtccctcaagatcctggacgtcgagctctcggaaggctccattgggtcgctgtcctccaacggccgttcggatcaccaggcgccggaggccgaggagaggaacggccctggctcgttgaccactcgtgggtctgtgctggcatccggtccttccggagaccccgacgccgacgccgacagggaatcgtcagagggatcatgcacccaggtgaattcgtcctcccgggacgggagctggtgctccgttgcgtcagagcaatcccggcctggttcttgcatggatcttgccggaaacaccaccaactgcggctcagaggggagttgcggtgaccatgattcagagagggaacaccttgatgcatccagtggctgtggctcagcaaaatcggaagaagcgttctacgaaagcgacgacaggctagcgctatcgcggggtctcgttgaaccaccaccagcagctgcaggcgaaggtccaagaacgcaggataacgacacgcatgcaggagaggtccgtgccatggatcacgaggaagaagaggagaccaacaagcttgcgatcgttctagccgacccccagccacagtcgcaaggcgacgtgtagtccgttctcctggcgctgcggcgggtgaaggagcagctgcgctacaccatgaaccaggaactcgccgcgccaaccaggagctctacgcccaccgagcgagcgtgccacactaggaaaccgtgtggctcacttctactacggtgtccaacattcggttccgtgaattattcgtagtgctgtttaggggagtggagtatctgtacagaatggaataaggtcgctcatgtggatgtggagtcactattttattaaaaagattgaatctctaggtgctttgcttgcttctgtttactgactagtttatcgcgcgcaatgtgatacggttatctgttatgcaatgctccgtgattatgggtttaaacaccctgtcg

SEQ ID NO: 7220 - DNA, 2905 bp, Zea Mays
gtggaaggaggactagtctaatccactgccctgccgttaaacaagtacttgaagagcgaatgaagctcccggcgtggctcaccgccgtgccgccggaccctcgggcgtacggccacctcatccagctctgcgcggacaccggacacctcgctgctggccgccagctccacgctcgcctcgtcgcttcctccgttaccccgtccaacttcctcgcttccaagctcatttccctatactcccgcggagcccaccttgacgacgcacgcagggtgttcgacgccatcccgcggcccagcgtcttcgcctggaacgccatcctcatcgcactctcgcttcactcggccgatccctccgacgcggcccgcctcttcgccgcctccggcatctctcctgacgagatcacgctctccgcgctcctcaagtcgctcgccgactccggaccgaggttgtccgcactcgtcgcggaggtccacgccgtcgcggtccagcgcggctttggggacgacctgttcgtgtccaatggtctcatcaccgcgtacgcgaacgccggagattcacgctccgctcgcgcggtatttgacgaaatgccgcggcgagacgtggtgtcctggaactcgctgatatcgtcttacgctcgcgcagggtggtaccggcagtgcctagagctgtttcaggagttagcgagcgttcatggtgctggtggtgttagacccaacaacgtcaccgtggctagcgtattgcatgcttgtgcacaactcaaggctgtcgactttggggtaagagtgcaccgccttgctgccgagaatgggcttgattcggacattgcggtgtggaactcagcagttggattttatgccaaatgtggaaggctcaagtatgcaagagagttgtttgatgggatggctaagaaagatgcagtcagttacagtaccatgattgctggttacatgaaccatgggcatgtcgacatgggactggagcttttccagcgagcagatgttcaaggtatcagcatttggaacgcagtgattgctggattgattcaacatggtcgccagtccgatgtgcttggactactgaatgagatgattggttctggaatgctaccgaattcagccacactttcaatcctcattccttcagttcatttgttctccaccctactgggagtgaaacaagcacatgggtatgcgatcagaaacaactatgatcagagtatcggtgttgtgactgcattgattgatgcttactcaaaggctggatttcttgatgggtctcggagggtctttaaactgactgatgatagaagtgaaattgtatggacatcaatcatatctgccgttgcggctcatggagaagctgcagaggcattgcatctgttcaatgagatggtcaatgctggcatcagactggatactatagccttcactgctgtgcttacagcttgtgctcatactggcaaggttgctgatgctcgtaaaatttttaactccatgcaggctatgtttggtatcaatccagtgatggagcaatatgcctgcatggtttctgcattcagccgtgcagggatgctaaatgatgcacttgagcttgtcaacagtatgccatttgaaccaaatgcaatggtctggggtccattgcttaatggagcagcagaattttgtaatgtggagcttggtagatttgtattcgatcaactatttaaaattgagcctaagaacaccggtaattacattgtgatggctaatttgtactcaaatgctggcaaatgggaagaagctgatatcataaggaggaggatgtggggagttgggctcgagaaggttcctgggtgtagttggaattgagggttttcaatggtctgcatgctttgttgctgcatatacatcaagcaagcaagccgcgaaaactatgttgttgttggttgtagaaaatagtttgtcctcaaccactgctaggcgaagacaagttatattgatggactttaaaagatctaatagttgagatgtgattatcgtgcttaagagcacatctgacttttagagctgtttggaccacataagaattcaaaccaatgagagcaacattccagtcgtattgatttgattgattaactaatctaggcccaatacaaataaaaattcaaaccaatgagagccacatttcgtgatcttcttatctttgcaaggtgataggtacagaaacaacaggagattccgcaaatgtaaaaactttagaagcagtatcaatccaatttggattttcacgatcggaaggcatcagctatatccaaatcctggatggaacaccaaacaagctatgtgcagaatgttattcggtgcatcaacagaagttgctctagtgccagatgcgacaaagtttctaattcacaatgctaatctgctgttttcaatatctacattatagaaacaccatttgtgtaacgatgtagaatacgatgcgtttttctacagtctatcatgtgcttttctgaagatttgttctctctcatcaaatgcacacactgttctggtattagaatcagaactgcatggagctagcacaacaagatgtgtcttttagtgcccttgtgtgtctggatcatggttcacatgcttagatcattctacttcactacttcccaactcatgaactccaaagtggaaaagcaggttcacatgctcatcgcaggctgcgcagtcgcgcagatgtggtaatatgataatgtaaggtggcgtctttgatgagacaatgtgaatcattctggtggtccagctcgctctgtagtcttggagttcaagtggagctaagtcacttcagtgcagttgaaatcgcgggaagcagcacaggcagctcgtgaggcagcgcgacaaggactctcgatgcgatttttgtcctggtatca

SEQ ID NO: 7221 - DNA, 848 bp, Zea Mays
gtccattctcctttttaatgaataaaattttattctactgccttttgattacaatgtcagctgtgagagagtgggctgcatctcagaatagcaaagttcttgaggctgttgcagttaacaatttagggaagtggaagacagcgacgcagatgacagcattgactctgcttctcgcaagcagagacccaagtctacctgcgcaaggcgctctagttgcccccggtgttgctctactttacgtctccacgggactcgccgtatggtccctagtggtgtacatgagaaagatatggcggatactgctcaaatagtattagcacaatatatatatagtgtaatagaagaaacaagcaaggcgagcatccgttcgtgatcgtacaacttttggaaggctgttgggtggcctgagccctagagctggttgggatcctcattcatctgtaacttgtgcgtcagtttttggtggatttgccgctaaatttgctgaggcatgccaggatcctattagatttttagaaacaagacatggtgtgaccctccgtgcgtaatgagaattcttagaaacaagaagacatggtgtggccctgcgtgcgtaatgagatactagtctgcgatgcagaagattgtaaccttatacaaatacaatctggaggtttctgcgtgtggagttctaccgttgtactctacacataatatcataatataccaagagcgtacaattattctttcagggtgtgtttgggagcaacaagactgaagacgttaaaatctccttatattcaaagcctctttaattcactttaatccacttgctcccaaacaaaccctagttgacaatatcccgtctc

SEQ ID NO: 7222 - DNA, 1114 bp, Zea Mays
gcaagccaggaatttacagcattcggagtcgcaacattagttctaagcaactttctacatggagggtccatgggcagctatggccacaacaggcatcttccttgctgccgcagtcactgattggctagatggttatattgctagaaagatgcagctaggaacaccttttggtgcatttcttgatcctgtggccgacaagcttatggtagcggcaacattagttttgctatgcaccaaacctttggaatcatcactgctcaatgatgggccatggcttctaacagtcccttccattgccatcattggaagagagattacaatgtcagctgtgagagagtgggctgcatctcagaatagcaaagttcttgaggctgttgcagttaacaatttagggaagtggaagacagcgacgcagatgacagcattgactctgcttctcgcaagcagagacccaagtctacctgcgcaaggcgctctagttgcccccggtgttgctctactttacgtctccacgggactcgccgtatggtccctagtggtgtacatgagaaagatatggcggatactgctcaaatagtattagcacaatatatatatagtgtaatagaagaaacaagcaaggcgagcatccgttcgtgatcgtacaacttttggaaggctgttgggtggcctgagccctagagctggttgggatcctcattcatctgtaacttgtgcgtcagtttttggtggatttgccgctaaatttgctgaggcatgccaggatcctattagatttttagaaacaagacatggtgtgaccctccgtgcgtaatgagaattcttagaaacaagaagacatggtgtggccctgcgtgcgtaatgagatactagtctgcgatgcagaagattgtaaccttatacaaatacaatctggaggtttctgcgtgtggagttctaccgttgtactctacacataatatcataatataccaagagcgtacaattattctttcagggtgtgtttgggagcaacaagactgaagacgttaaaatctccttatattcaaagcctctttaattcactttaatccacttgctcccaaacaaaccctagttgacaatatcccgtctc

SEQ ID NO: 7223 - DNA, 1414 bp, Zea Mays
acgcgcctgcccacgtacgcctcctcccctcccacacccaaccccagcgcacccacaagaggaataggaggaatcaatccgccccatgcccacatccgtcgccacccacgcatccctcctcctcaaagccgcagccgccaagccttgcttctcagcccgcgcggcggcccggatccccgccccttctcaccgtcctcgcccgcccgctggccgtcgcctgccgaccacggtggccgctctcgccgccgcagcccgccggttccggtggccttcggcggccgcgtcggcacgggggctgtgcgccgcgccgcatttcggcggagaggggatgggatctgatgcgggggcggggggcaggaagaggcgggtgccagcggtgaacgggctcgccaaggacgcgcctgcggtgaacgggatgcgcaaggaggagcccgtggccgcgcctcccaggttgctcacgctgcccactgtgctcaccattggccgcgtcgctgctgtgcctcttctgatcagcactttctacatggagggtccatgggcagctatggccacaacaggcatcttccttgctgccgcagtcactgattggctagatggttatattgctagaaagattacaatgtcagctgtgagagagtgggctgcatctcagaatagcaaagttcttgaggctgttgcagttaacaatttagggaagtggaagacagcgacgcagatgacagcattgactctgcttctcgcaagcagagacccaagtctacctgcgcaaggcgctctagttgcccccggtgttgctctactttacgtctccacgggactcgccgtatggtccctagtggtgtacatgagaaagatatggcggatactgctcaaatagtattagcacaatatatatatagtgtaatagaagaaacaagcaaggcgagcatccgttcgtgatcgtacaacttttggaaggctgttgggtggcctgagccctagagctggttgggatcctcattcatctgtaacttgtgcgtcagtttttggtggatttgccgctaaatttgctgaggcatgccaggatcctattagatttttagaaacaagacatggtgtgaccctccgtgcgtaatgagaattcttagaaacaagaagacatggtgtggccctgcgtgcgtaatgagatactagtctgcgatgcagaagattgtaaccttatacaaatacaatctggaggtttctgcgtgtggagttctaccgttgtactctacacataatatcataatataccaagagcgtacaattattctttcagggtgtgtttgggagcaacaagactgaagacgttaaaatctccttatattcaaagcctctttaattcactttaatccacttgctcccaaacaaaccctagttgacaatatcccgtctc

SEQ ID NO: 7224 - DNA, 1626 bp, Zea Mays
ctctctctcccgtacacgatgagacgagaccttcccgtgccgccctgtacgcgcctgcccacgtacgcctcctcccctcccacacccaaccccagcgcacccacaagaggaataggaggaatcaatccgccccatgcccacatccgtcgccacccacgcatccctcctcctcaaagccgcagccgccaagccttgcttctcagcccgcgcggcggcccggatccccgccccttctcaccgtcctcgcccgcccgctggccgtcgcctgccgaccacggtggccgctctcgccgccgcagcccgccggttccggtggccttcggcggccgcgtcggcacgggggctgtgcgccgcgccgcatttcggcggagaggggatgggatctgatgcgggggcggggggcaggaagaggcgggtgccagcggtgaacgggctcgccaaggacgcgcctgcggtgaacgggatgcgcaaggaggagcccgtggccgcgcctcccaggttgctcacgctgcccactgtgctcaccattggccgcgtcgctgctgtgcctcttctgatcagcctttctacatggagggtccatgggcagctatggccacaacaggcatcttccttgctgccgcagtcactgattggctagatggttatattgctagaaagatgcagctaggaacaccttttggtgcatttcttgatcctgtggccgacaagcttatggtagcggcaacattagttttgctatgcaccaaacctttggaatcatcactgctcaatgatgggccatggcttctaacagtcccttccattgccatcattggaagagagattacaatgtcagctgtgagagagtgggctgcatctcagaatagcaaagttcttgaggctgttgcagttaacaatttagggaagtggaagacagcgacgcagatgacagcattgactctgcttctcgcaagcagagacccaagtctacctgcgcaaggcgctctagttgcccccggtgttgctctactttacgtctccacgggactcgccgtatggtccctagtggtgtacatgagaaagatatggcggatactgctcaaatagtattagcacaatatatatatagtgtaatagaagaaacaagcaaggcgagcatccgttcgtgatcgtacaacttttggaaggctgttgggtggcctgagccctagagctggttgggatcctcattcatctgtaacttgtgcgtcagtttttggtggatttgccgctaaatttgctgaggcatgccaggatcctattagatttttagaaacaagacatggtgtgaccctccgtgcgtaatgagaattcttagaaacaagaagacatggtgtggccctgcgtgcgtaatgagatactagtctgcgatgcagaagattgtaaccttatacaaatacaatctggaggtttctgcgtgtggagttctaccgttgtactctacacataatatcataatataccaagagcgtacaattattctttcagggtgtgtttgggagcaacaagactgaagacgttaaaatctccttatattcaaagcctctttaattcactttaatccacttgctcccaaacaaaccctagttgacaatatcccgtctc

SEQ ID NO: 7225 - DNA, 1716 bp, Zea Mays
cttcccccagcctccacgctcgcgctggacgacgaactcaggaggcggcgcggtcatgggatcctgcttctcgttggagggaggccgcagtgaaagcatagtgcccgcgcagaggtcgcagatcccggaggatgagcaggtcgagcctaccgttacgagcgagctggccatcccagtcccagaggtggcagaatcagtggtcatgttggaggcccttcgtactggcttcatcacagaccaacgtccagagaggcacattcgtgtcaggagtttcacctatgatgaggtgtgtgcggcgacacatggcttcgaagtagatcgtttcctgggacagggtgggttcggccaagtgtacaggggttttcttgaaagcaccaatcaggtgcctggacaggaggtggctataaagaggcttgatcttcaaggacaacaagggcacagggaattcgttactgaagttctgatcttgagcaatgtgcaccacccgaatcttgtaaagctcgttggacattgcactagtcatgatcagaggattttagtttatgagtatatgcctttgggttcgctaaacagtcacatccatgatcttccccctggccagcagcctcttgactggagtacaagaattaagatactgcttggtgctgctaaaggtcttgagcatttgcatcacaatctcaaccctcctgtcatcaatcgtgatgtgaaatgtgcaaacattttgctcggagcggggtaccacccgaagctgtctgacttcggcttggcaaagctaggtccaactggtgacaacacccatgtttcaacaagagttatgggtacacctggttattgcgcgccagagtacttgatgactggtaaattgacagtaaagacagatatttacagctttggtgtagttatgttggaggttctcaccggaagaatggctagagacgaaagacttcctgaatccgagcgaaaccttgtcgcatgggctctcaactttctccgcagacgggaactggacaatctgctagatccggcactgcggggtcagtgcccccaggcttgtttggagcatgccttttttgttgtttcacgctgtatcagtgaatcacccaatacgagaccatccatgcgagatgttgtcgcctctctcactgtgatctcagaattcagaaacagaaacacaaggcggttggagcgtggcgggcgcagcacaccaacaagaactcctgatcggaaccaccggggcgacgatcagggagaaggaagctgaggaatcagtgcatagcaaaacaatggtgatcttctgttgctgtagttttttatgatggtcggttactgcctgtctgggagcaaggaagttgtaatgcctgttcaaatgatatggttcaattgcagggaagtacatggtcatgcagaagatttttttccctgttagagctagtttgggaacttcattttccaaagtgattcttattttctcaagtaaaaataaactattttttcttaagaaaatagaaatctcttgtaaaaatggttcccaaactaggcactaaagtttgtagataacaggtgtaaactcttgttgtgtttgttggggctcagtcttctcagacgttctgtttgcatgttgtattattgacgaggctatgtttaaaccaatggagatggtttgtttcccttgattacttttgctgttgatgctgctcctaaaaggggttgatttac

SEQ ID NO: 7226 - DNA, 1746 bp, Zea Mays
ggtcattcccttccctctaccagccgttttattttatttttccttcccccagcctccacgctcgcgctggacgacgaactcaggaggcggcgcggtcatgggatcctgcttctcgttggagggaggccgcagtgaaagcatagtgcccgcgcagaggtcgcagatcccggaggatgagcaggtcgagcctaccgttacgagcgagctggccatcccagtcccagaggtggcagaatcagtggtcatgttggaggcccttcgtactggcttcatcacagaccaacgtccagagaggcacattcgtgtcaggagtttcacctatgatgaggtgtgtgcggcgacacatggcttcgaagtagatcgtttcctgggacagggtgggttcggccaagtgtacaggggttttcttgaaagcaccaatcaggaggtggctataaagaggcttgatcttcaaggacaacaagggcacagggaattcgttactgaagttctgatcttgagcaatgtgcaccacccgaatcttgtaaagctcgttggacattgcactagtcatgatcagaggattttagtttatgagtatatgcctttgggttcgctaaacagtcacatccatgatcttccccctggccagcagcctcttgactggagtacaagaattaagatactgcttggtgctgctaaaggtcttgagcatttgcatcacaatctcaaccctcctgtcatcaatcgtgatgtgaaatgtgcaaacattttgctcggagcggggtaccacccgaagctgtctgacttcggcttggcaaagctaggtccaactggtgacaacacccatgtttcaacaagagttatgggtacacctggttattgcgcgccagagtacttgatgactggtaaattgacagtaaagacagatatttacagctttggtgtagttatgttggaggttctcaccggaagaatggctagagacgaaagacttcctgaatccgagcgaaaccttgtcgcatgggctctcaactttctccgcagacgggaactggacaatctgctagatccggcactgcggggtcagtgcccccaggcttgtttggagcatgccttttttgttgtttcacgctgtatcagtgaatcacccaatacgagaccatccatgcgagatgttgtcgcctctctcactgtgatctcagaattcagaaacagaaacacaaggcggttggagcgtggcgggcgcagcacaccaacaagaactcctgatcggaaccaccggggcgacgatcagggagaaggaagctgaggaatcagtgcatagcaaaacaatggtgatcttctgttgctgtagttttttatgatggtcggttactgcctgtctgggagcaaggaagttgtaatgcctgttcaaatgatatggttcaattgcagggaagtacatggtcatgcagaagatttttttccctgttagagctagtttgggaacttcattttccaaagtgattcttattttctcaagtaaaaataaactattttttcttaagaaaatagaaatctcttgtaaaaatggttcccaaactaggcactaaagtttgtagataacaggtgtaaactcttgttgtgtttgttggggctcagtcttctcagacgttctgtttgcatgttgtattattgacgaggctatgtttaaaccaatggagatggtttgtttcccttgattacttttgctgttgatgctgctcctaaaaggggttgatttac

SEQ ID NO: 7227 - DNA, 1304 bp, Zea Mays
cttttctccttcgtccgttcttccctcccagcggagaagcgcccaacccaacccgccgttcctcctccaaagcgccctcctgccccgcaaaatggagacctctttcctgcccaccacactccccaacacaaggcctctccccgcgctccgaacctacgccccagccgcctcgatccgttcccaacagcgccctcgtcgctccaccatacgcgcagccatcacccggggccggaaggaggagacggtgaccaccgtccgggagcaactggaggggtgctacctcctggcgggtatcaagtacgagggcctgacggtgaagcagctgcagggaatccgcgacgcgctccccgacacctgcaggctgctggtggcgaagaacacgctggtggggaaagccatcgagggtaccccttgggaggcgctcaagccgtgcatgaaggaaggaggagcgtgtcgaggagaccaacgacttcgtcggcgccgtctttgagggcaagttttacgggcccggcgacttcaaggcgctcgagactatgcccagccgcgcagaggtgtacgccacgctgctcggcgcgctgcagggacccgctacgtccctcgtcgccacgctgcaggcgccagccagagatgttgttgcggtgctctccgcctacgtgcgcaagctcgaggaggaggctggagccgcctagtggtgttgcgaaatggttgtcatttccctctcactccctatctgctgtttgtacaattctgtgtacctttactggcacccaatcacatttgaatgggtcaaatcacagctttccattttacaatgcctgcccttacctggaagactacagagtgcattcttggttcttagcatttatttctaccatacatagtgctataggatcggatgaggttgtataggaggcggtgactagtatggcaaatgattccataattaggtttgtcttagagcaattcttcctgactgtcaatgttccagggagggtttcatggtgaattgtacatgcccctgaaacaactgtgattacttagactccagagtacttgtgtttgcttatatactggtttaggattgaagtttcttttttttagttagtatgctggagtgttgcgagatataaattggcactgttgtttaagattagagaaaattctgacagtaaaaggtaaagtctacttatgcactgacagaactcaagcatttgagtaagttgtaacaatataaatagagttggatagctagagcgactctcttattcactgtgcacgatatctttattgtgtgaacattcact

SEQ ID NO: 7228 - DNA, 2114 bp, Zea Mays
ccccatcttgtgacccagtcgcctcgcctctcctctccgtttgctttgcattcaccccttgccgcacacatcaggaaggcgggcaggcgacgacaatgacgatgatggcgccgcatccgcagccactgccgctgccacagccgccggcgccgttcggggacaccacgctcaccaaggtgttcgtgggcgggctggcgtgggagacccacaaggacgccctccgcgagcacttcgagcgctacggcgacatcctcgaggccgtcatcatctccgacaagctcaccggccgctccaagggctacggcttcgtgacgttcaaggaggcggacgcggccaagaaggcgtgcgaggacgccacccccgtcatcaacggccgccgcgccaactgcaacctcgccgccctcggcgccaagccgcgccccccgccacacatcctccgcccttcgccgccggccaccccggcgccgcacgcgcccgcgctcccctcgcaacaccagcccacgccagccatcgccgtggggtccaggggcgtgtcgccggtgccgtggtactaccacccctccacgacgccgccgccaccggccgcgcaccactacgcccacggcgcgcaccagcagtaccacggcgtgctcccgttctaccccgccgccgccgccacctacgggtacgtacacgcacgccgctcccagctccgaattccaatcccccgcccgcgacaaggtacgtttcgctagcccaattgaaaaagaaaccggcacggcacggcgttcgcgcacctcgagcgccgccaaactatctgcactgcacgtcgcgcgaggctacgaggatttcgtgtcctctgctcgttggcttcgggttggctggctccttgcgagcttgcggcgggcggggagggggaccagtcaccagtccagtgggcgcgcgcacacatgcgtggcagagcggctgctttggtttggaattggagcagccgagcacgcgaggcgggactggcgggaggcactggcgcaggcacagccgcgcacaggctggacctggaccggaccgcgctgcctcgtcgtgctcgcacgtgcccacgtgccggcctgcacggcggcacaaaaaaaaagagagaggaggtggacatttcaatgctacgtactggacatggccatgtgttaagactcggcacattaattaccctagttataaacaattactactataaaagtagtagacgactgatctgtccctgttctctgccattttttatcgggttctactgtgcgcggcgcgccactgttacgtgcccctcccccaccccactcgtactgatcgatcgatctgtgctgttccgttcagaaggtaggccaggcggcagctggcggcacgggcgggtcctacctgcaggggcacttcgcgtacccggcggcggcggcagcgcagggcggcatggtggcggcggcgcccaacggcatggtgccggtgtacccgttctaccactaccaccagtaccacgcctcgcaggggggagtcgccgccgcgcacttcttccccccggtctccgccgccgccgtccccgccgtcgtctccaagcacaccgtcatggccgctcccaaagtggagcaggtgacaggctgcagctgaaggcacgaggcgatcgatgatggcgacgacgagcggcggaacgaaaggagcaggccaaacaggctgagctgcacatgaagggtgtcgtccgtctgtcgggagggcccgaagcgacgcaaggcccgggcccccattaggccattgctacatcccccctctgacttcgtgcgtggctgcacggccaccgtgccgggcaagaacagtctgtaacaaatgattcgattcgtctctctctcgtttaccaaccgtatttttttccaatggtaaacccgttaccagtgtctgtagggggcagcggaccccaataataatcgtcataatatttcgccgttcatctctgtgctgctttgcgtgcatgtatgtgcgtcagcagaacactaatggttcgccggcccatcccgtcggttctgtgggctcgcagtcccacgcccgcactccgaccttcttctccacgggctgagaaagtcgagcgttgctctttcaattcc

SEQ ID NO: 7229 - DNA, 1178 bp, Zea Mays
ccccatcttgtgacccagtcgcctcgcctctcctctccgtttgctttgcattcaccccttgccgcacacatcaggaaggcgggcaggcgacgacaatgacgatgatggcgccgcatccgcagccactgccgctgccacagccgccggcgccgttcggggacaccacgctcaccaaggtgttcgtgggcgggctggcgtgggagacccacaaggacgccctccgcgagcacttcgagcgctacggcgacatcctcgaggccgtcatcatctccgacaagctcaccggccgctccaagggctacggcttcgtgacgttcaaggaggcggacgcggccaagaaggcgtgcgaggacgccacccccgtcatcaacggccgccgcgccaactgcaacctcgccgccctcggcgccaagccgcgccccccgccacacatcctccgcccttcgccgccggccaccccggcgccgcacgcgcccgcgctcccctcgcaacaccagcccacgccagccatcgccgtggggtccaggggcgtgtcgccggtgccgtggtactaccacccctccacgacgccgccgccaccggccgcgcaccactacgcccacggcgcgcaccagcagtaccacggcgtgctcccgttctaccccgccgccgccgccacctacggtggagcaggtgacaggctgcagctgaaggcacgaggcgatcgatgatggcgacgacgagcggcggaacgaaaggagcaggccaaacaggctgagctgcacatgaagggtgtcgtccgtctgtcgggagggcccgaagcgacgcaaggcccgggcccccattaggccattgctacatcccccctctgacttcgtgcgtggctgcacggccaccgtgccgggcaagaacagtctgtaacaaatgattcgattcgtctctctctcgtttaccaaccgtatttttttccaatggtaaacccgttaccagtgtctgtagggggcagcggaccccaataataatcgtcataatatttcgccgttcatctctgtgctgctttgcgtgcatgtatgtgcgtcagcagaacactaatggttcgccggcccatcccgtcggttctgtgggctcgcagtcccacgcccgcactccgaccttcttctccacgggctgagaaagtcgagcgttgctctttcaattcc

SEQ ID NO: 7230 - DNA, 1189 bp, Zea Mays
cattgcctttcttcatcaagcaacaaacaaaaaaacaacaggagaacaggcaaaggcctccctccctcaactcaggaaaccatccaacttgtcgatcggccttgcttgccttggtactcctgcttccgccatggttcagatcaaagagttccggatcgtcatgcccatgtccatggaagagtacgagatagggctgagctacaccatcatgaagatggagcagcagaacaccaacagcaaggagggcgtggaggtgctgcagcaggccccgttccacgaggatgccaagcttggcaagggccacttcacttccaaagtttatcatctgcaaagggctttgcacctgccagcgccctcgcggtgcacgaggactcgtggtgtgcgtttccaaagagcagaacagtgcccgctcttcagcaagtgctcactcaccattgacactgtcaccaggcccgacaacggttgctctgaaaatttagccgcgagagaagtcgagatcatcgacatcgcttccgtgtcgcgggactactggagcaaggcgatcggcgctccgagcgtcgacctgactgccttcaagtcacagcggacagaacgaggccctcttctcaagggatggatggactcgtgccatccggtgatgaccacgtacaagctggtgaccatggacgctcccatatggggcctcggcgaacgcctggaagactgcatcattgcgggggagagggcgttgttcttggcatgccaccggctgtgcttcgcgtggatcgacgagtggtacggcatgaccgtggagcagatccgcgagatggagcggcagacggacatgctgctcaagaagacgctgaagaaggccgggagcaataagcacgagggcaacacgaagacgctcaaagacgagctagtggccgtggggagctagtggccgtggggcatcaaacatgtcacagattaggcatgtgcaagtgtaatgtgtccacaattaactgaagaaaatatgcatcgctgtatgtatctatataggagtacaatgaaggcagccatctgtggtttgtctttaaccccctaaaactagcaagctagctcgtgcaaatagtattatttcactgcttcctgcattctatttctatcttttattaggtgagtgcccgtgcgttgcaacggaaccgtataataacacaataacttatgt

SEQ ID NO: 7231 - DNA, 1249 bp, Zea Mays
gtccattgcctttcttcatcaagcaacaaacaaaaaaacaacaggagaacaggcaaaggcctccctccctcaactcaggaaaccatccaacttgtcgatcggccttgcttgccttggtactcctgcttccgccatggttcagatcaaagagttccggatcgtcatgcccatgtccatggaagagtacgagatagggctgagctacaccatcatgaagatggagcagcagaacaccaacagcaaggagggcgtggaggtgctgcagcaggccccgttccacgaggatgccaagcttggcaagggccacttcacttccaaagtttatcatctgcaaagattatgtgcagcaagattccgtcatggatgaagggctttgcacctgccagcgccctcgcggtgcacgaggactcgtggtgtgcgtttccaaagagcagaacagtgcccgctcttcagcaagtgctcactcaccattgacactgtcaccaggcccgacaacggttgctctgaaaatgcgcacggtttgagcggcgagcagttagccgcgagagaagtcgagatcatcgacatcgcttccgtgtcgcgggactactggagcaaggcgatcggcgctccgagcgtcgacctgactgccttcaagtcacagcggacagaacgaggccctcttctcaagggatggatggactcgtgccatccggtgatgaccacgtacaagctggtgaccatggacgctcccatatggggcctcggcgaacgcctggaagactgcatcattgcgggggagagggcgttgttcttggcatgccaccggctgtgcttcgcgtggatcgacgagtggtacggcatgaccgtggagcagatccgcgagatggagcggcagacggacatgctgctcaagaagacgctgaagaaggccgggagcaataagcacgagggcaacacgaagacgctcaaagacgagctagtggccgtggggagctagtggccgtggggcatcaaacatgtcacagattaggcatgtgcaagtgtaatgtgtccacaattaactgaagaaaatatgcatcgctgtatgtatctatataggagtacaatgaaggcagccatctgtggtttgtctttaaccccctaaaactagcaagctagctcgtgcaaatagtattatttcactgcttcctgcattctatttctatcttttattaggtgagtgcccgtgcgttgcaacggaaccgtataataacacaataacttatgt

SEQ ID NO: 7232 - DNA, 1234 bp, Zea Mays
gtccattgcctttcttcatcaagcaacaaacaaaaaaacaacaggagaacaggcaaaggcctccctccctcaactcaggaaaccatccaacttgtcgatcggccttgcttgccttggtactcctgcttccgccatggttcagatcaaagagttccggatcgtcatgcccatgtccatggaagagtacgagatagggctgagctacaccatcatgaagatggagcagcagaacaccaacagcaaggagggcgtggaggtgctgcagcaggccccgttccacgaggatgccaagcttggcaagggccacttcacttccaaagtttatcatctgcaaagattccgtcatggatgaagggctttgcacctgccagcgccctcgcggtgcacgaggactcgtggtgtgcgtttccaaagagcagaacagtgcccgctcttcagcaagtgctcactcaccattgacactgtcaccaggcccgacaacggttgctctgaaaatgcgcacggtttgagcggcgagcagttagccgcgagagaagtcgagatcatcgacatcgcttccgtgtcgcgggactactggagcaaggcgatcggcgctccgagcgtcgacctgactgccttcaagtcacagcggacagaacgaggccctcttctcaagggatggatggactcgtgccatccggtgatgaccacgtacaagctggtgaccatggacgctcccatatggggcctcggcgaacgcctggaagactgcatcattgcgggggagagggcgttgttcttggcatgccaccggctgtgcttcgcgtggatcgacgagtggtacggcatgaccgtggagcagatccgcgagatggagcggcagacggacatgctgctcaagaagacgctgaagaaggccgggagcaataagcacgagggcaacacgaagacgctcaaagacgagctagtggccgtggggagctagtggccgtggggcatcaaacatgtcacagattaggcatgtgcaagtgtaatgtgtccacaattaactgaagaaaatatgcatcgctgtatgtatctatataggagtacaatgaaggcagccatctgtggtttgtctttaaccccctaaaactagcaagctagctcgtgcaaatagtattatttcactgcttcctgcattctatttctatcttttattaggtgagtgcccgtgcgttgcaacggaaccgtataataacacaataacttatgt

SEQ ID NO: 7233 - DNA, 1324 bp, Zea Mays
atataggattccacatctacaggaggggagttgcgtaagaaagcttggagactagaaatcgttctttcgtttcgctacgtccattgcctttcttcatcaagcaacaaacaaaaaaacaacaggagaacaggcaaaggcctccctccctcaactcaggaaaccatccaacttgtcgatcggccttgcttgccttggtactcctgcttccgccatggttcagatcaaagagttccggatcgtcatgcccatgtccatggaagagtacgagatagggctgagctacaccatcatgaagatggagcagcagaacaccaacagcaaggagggcgtggaggtgctgcagcaggccccgttccacgaggatgccaagcttggcaagggccacttcacttccaaagtttatcatctgcaaagcaagattccgtcatggatgaagggctttgcacctgccagcgccctcgcggtgcacgaggactcgtggtgtgcgtttccaaagagcagaacagtgatcaagtgcccgctcttcagcaagtgctcactcaccattgacactgtcaccaggcccgacaacggttgctctgaaaatgcgcacggtttgagcggcgagcagttagccgcgagagaagtcgagatcatcgacatcgcttccgtgtcgcgggactactggagcaaggcgatcggcgctccgagcgtcgacctgactgccttcaagtcacagcggacagaacgaggccctcttctcaagggatggatggactcgtgccatccggtgatgaccacgtacaagctggtgaccatggacgctcccatatggggcctcggcgaacgcctggaagactgcatcattgcgggggagagggcgttgttcttggcatgccaccggctgtgcttcgcgtggatcgacgagtggtacggcatgaccgtggagcagatccgcgagatggagcggcagacggacatgctgctcaagaagacgctgaagaaggccgggagcaataagcacgagggcaacacgaagacgctcaaagacgagctagtggccgtggggagctagtggccgtggggcatcaaacatgtcacagattaggcatgtgcaagtgtaatgtgtccacaattaactgaagaaaatatgcatcgctgtatgtatctatataggagtacaatgaaggcagccatctgtggtttgtctttaaccccctaaaactagcaagctagctcgtgcaaatagtattatttcactgcttcctgcattctatttctatcttttattaggtgagtgcccgtgcgttgcaacggaaccgtataataacacaataacttatgt

SEQ ID NO: 7234 - DNA, 1374 bp, Zea Mays
cgagtacgtgttgcgcgtgcaatttactccctccgtttcattttagttgtcgctgatagtgcaaaattaaattattcagcgacaactaaaaagaaacggagggagtatatgctaggctagctaggagaatatataggattccacatctacaggaggggagttgcgtaagaaagcttggagactagaaatcgttctttcgtttcgctacgtccattgcctttcttcatcaagcaacaaacaaaaaaacaacaggagaacaggcaaaggcctccctccctcaactcaggaaaccatccaacttgtcgatcggccttgcttgccttggtactcctgcttccgccatggttcagatcaaagagttccggatcgtcatgcccatgtccatggaagagtacgagatagggctgagctacaccatcatgaagatggagcagcagaacaccaacagcaaggagggcgtggaggtgctgcagcaggccccgttccacgaggatgccaagcttggcaagggccacttcacttccaaagtttatcatctgcaaagcaagattccgtcatggatgaagggctttgcacctgccagcgccctcgcggtgcacgaggactcgtggtgtgcgtttccaaagagcagaacaggcgcacggtttgagcggcgagcagttagccgcgagagaagtcgagatcatcgacatcgcttccgtgtcgcgggactactggagcaaggcgatcggcgctccgagcgtcgacctgactgccttcaagtcacagcggacagaacgaggccctcttctcaagggatggatggactcgtgccatccggtgatgaccacgtacaagctggtgaccatggacgctcccatatggggcctcggcgaacgcctggaagactgcatcattgcgggggagagggcgttgttcttggcatgccaccggctgtgcttcgcgtggatcgacgagtggtacggcatgaccgtggagcagatccgcgagatggagcggcagacggacatgctgctcaagaagacgctgaagaaggccgggagcaataagcacgagggcaacacgaagacgctcaaagacgagctagtggccgtggggagctagtggccgtggggcatcaaacatgtcacagattaggcatgtgcaagtgtaatgtgtccacaattaactgaagaaaatatgcatcgctgtatgtatctatataggagtacaatgaaggcagccatctgtggtttgtctttaaccccctaaaactagcaagctagctcgtgcaaatagtattatttcactgcttcctgcattctatttctatcttttattaggtgagtgcccgtgcgttgcaacggaaccgtataataacacaataacttatgt

SEQ ID NO: 7235 - DNA, 1525 bp, Zea Mays
aaactaaacttcggttcagcactcggaggataataaaaatccgttccgtttcaccggttcccaagtctgaacttgtgtgcgagtacgtgttgcgcgtgcaatttactccctccgtttcattttagttgtcgctgatagtgcaaaattaaattattcagcgacaactaaaaagaaacggagggagtatatgctaggctagctaggagaatatataggattccacatctacaggaggggagttgcgtaagaaagcttggagactagaaatcgttctttcgtttcgctacgtccattgcctttcttcatcaagcaacaaacaaaaaaacaacaggagaacaggcaaaggcctccctccctcaactcaggaaaccatccaacttgtcgatcggccttgcttgccttggtactcctgcttccgccatggttcagatcaaagagttccggatcgtcatgcccatgtccatggaagagtacgagatagggctgagctacaccatcatgaagatggagcagcagaacaccaacagcaaggagggcgtggaggtgctgcagcaggccccgttccacgaggatgccaagcttggcaagggccacttcacttccaaagtttatcatctgcaaagcaagattccgtcatggatgaagggctttgcacctgccagcgccctcgcggtgcacgaggactcgtggtgtgcgtttccaaagagcagaacagtgcccgctcttcagcaagtgctcactcaccattgacactgtcaccaggcccgacaacggttgctctgaaaatgcgcacggtttgagcggcgagcagttagccgcgagagaagtcgagatcatcgacatcgcttccgtgtcgcgggactactggagcaaggcgatcggcgctccgagcgtcgacctgactgccttcaagtcacagcggacagaacgaggccctcttctcaagggatggatggactcgtgccatccggtgatgaccacgtacaagctggtgaccatggacgctcccatatggggcctcggcgaacgcctggaagactgcatcattgcgggggagagggcgttgttcttggcatgccaccggctgtgcttcgcgtggatcgacgagtggtacggcatgaccgtggagcagatccgcgagatggagcggcagacggacatgctgctcaagaagacgctgaagaaggccgggagcaataagcacgagggcaacacgaagacgctcaaagacgagctagtggccgtggggagctagtggccgtggggcatcaaacatgtcacagattaggcatgtgcaagtgtaatgtgtccacaattaactgaagaaaatatgcatcgctgtatgtatctatataggagtacaatgaaggcagccatctgtggtttgtctttaaccccctaaaactagcaagctagctcgtgcaaatagtattatttcactgcttcctgcattctatttctatcttttattaggtgagtgcccgtgcgttgcaacggaaccgtataataacacaataacttatgt

SEQ ID NO: 7236 - DNA, 898 bp, Zea Mays
ccatcaactgccagatacgtcttcgtaaaggtagtagaggtagccggtgacgttcgtaaactgcccacctggctcacaggctcatagttcaacagctcgtacgttcgatgtagacagggggttcttttgcacgtccgtcctcctaaaactaaacttcggttcagcactcggaggataataaaaatccgttccgtttcaccggttcccaagtctgaacttgtgtgcgagtacgtgttgcgcgtgcaatttactccctccgtttcattttagttgtcgctgatagtgcaaaattaaattattcagcgacaactaaaaagaaacggagggagtatatgctaggctagctaggagaatatataggattccacatctacaggaggggagttgcgtaagaaagcttggagactagaaatcgttctttcgtttcgctacgtccattgcctttcttcatcaagcaacaaacaaaaaaacaacaggagaacaggcaaaggcctccctccctcaactcaggaaaccatccaacttgtcgatcggccttgcttgccttggtactcctgcttccgccatggttcagatcaaagagttccggatcgtcatgcccatgtccatggaagagtacgagatagggctgagctacaccatcatgaagatggagcagcagaacaccaacagcaaggagggcgtggaggtgctgcagcaggccccgttccacgaggatgccaagcttggcaagggccacttcacttccaaagtttatcatctgcaaagcaagattccgtcatggatgaagggctttgcacctgccagcgccctcgcggtgcacgaggactcgtggtgtgcgtttccaaagagcagaacagaatccactgtcaggaaagaaagaaaaaaaatgagaagg

SEQ ID NO: 7237 - DNA, 852 bp, Zea Mays
tgaagatgagagttttgctctggcaacaatacacgtcgtacgcgccgtgaagcaagcaatgatgatggctggctggtacctgattcccctgagctcgtcgaagaagcggaggtcgaacacgtcgccgaggcccgcgaagaggacgacgccggcgaggcggtggtgctcgatgtgtccgagcgccacgttgcgctggtggtgccgctccctgcccgcggcggcgtcggcggaggtgaagttgtccttgtaggtcaggtggcggtacatgagccccgtggcgcgcagcagccgcgccgtggccggcgcgtccggggcggcctccaccaccacccacagcagcggcggcgccaccagacgcagcgcgtgcgccgcccgcgtcagcgcggcggcgcgctcgccggtcgccgcgggcgtcgactccgtcgtcgtgacgaccaccaggagcgggcgcggggacgccgggtcgcgcggcaggccgccgccccccgcgtcgtgcgccagcaggctccggttcacggccccggcgccgcccgccggcagcgcccggaccacgtggctgctgcccacccggccccccgccgccgccgccgcggacgtccagtcggacacggacgacggcgcgaagccggtgaagaagcccatcacgaagcagagggaggaatgcagcagcgccttcttccacagctgcgacccctgcttcttgccacgggcaccggcggcgtgatccgtggacgaccccatcacagaagccagcaagcacaacgccgcctgcctagctccaccaccagctcccggaggctggcctcgtgccgcttaatctgcgtcgcgacgtgtcgaagctggctatgtaag

SEQ ID NO: 7238 - DNA, 653 bp, Zea Mays
ctctgagcagtcggaagggatgcccttcaccttgctaaaatcttccaggaccacttgctggacgaacttcatggagtcctgaaaggcagcggaagcaaagccagaaacatgtcagggcaagtgataatcttcgagttttcgagcaagaaaccatggtttcttttggcattattattacgtttacacagacacacattattattactggctaccgacacccgcgccgtttgctacaggaaaccagctcacagcaactaagcttgttgatcacatgggaacgctgatctttacgtacacatgaaggggctgtgttagtgacctgtaagctgtgaaccggtgacacggacagatgggccacgagacatggctttcccccctcaccgtcccttcctaccgcagctacctgtcctgtaccacatgcgcgagcagagcagctagcaatgatagctagctagctgacgggacggccgagacgccgctttcatggcggaaatgcctctttcaatctgacccaaaacaaacatgaggcgtttgcttgctttgctagctactccgccgcccgcggtaggcggggcacaccgcacacgttacattacattacatgtcgaaagtacgcagagatgcgtgaaggttggttgcggcgactgactgac

SEQ ID NO: 7239 - DNA, 464 bp, Zea Mays
cgctgtcgactttacttccccaccctcaactcttcttttcccctctccctcccctcgccgtcgctgtcgtcgccgtccgtgctagccatggatctaggcgctcccgcccgacggcgcctaccgatccgcctcttgctggtgtcgctcaccgtcctcgtggtcctcaccgcgcgctccagtgccgaagtcatcaccctcaccgaagagaccttctccgacaagataaaggagaaggacacggtgtggtttgtgcaattctgcgtcccctggtgtaaacactgcaagaaccttggaacactatgggaggacctgggaaaggttatggaaggtgcggatgaaattgagattgggcaagttgactgtggtgtcagcaaaccagtatgctcaaaggtcgatatacactcctacccaacattcaaggtgttttatgaaggcgaagaagtagtaaaatataaagttttggc

SEQ ID NO: 7240 - DNA, 1225 bp, Zea Mays
cgtgtgctcgctctagccttttccttctccctcgcgacgcggcttcgcctccctattctggcacgttcccggttcaacggaccacgacgcattcccgtcccccaactcagcagcaataacacgccgagggcgcaaatccccgcgatccccacgccaatcggagaagcgagccgtcgccgatcgattcaccaccggacccaatcacaagtaaacctgcgccgggaaaccaaatccttctaaattccttcgcgacgcggaccgcaagccgaaggcgcgacgatgtccggagcggcggactaccaggagatggtggcgtcggtgccgccctcgctgaaggccatcacgctgacgcacgttcgctacagccggggcgacccgctgggtctcttcctcgcgtgggtctccctcgtcccggttttcatcagcctcggcggtttcgtctcccacttcctcttccgtcgggagctccagggcctctgcttcgccgcagggctcctcgtctctcaggccctcaatgagctcatcaaacactccgtcgcgcagtcccgcccctcgtactgcgagctgctggaggcctgcgactcccacggttggccgtccagccactcgcagtacacgttcttcttcgccacatacctgtcgctcctctccctccgccggtcgcgcgcgcgccaggttttcgcgggagcagtagtgggcctcgtgtttggtgctatctggtactggattgtcaataccatgcttgttaattacttcccaatgattgaggagagtgcaatcgggaggtggttgtacatcaaggatacatctcatattccagatgtgctcaaatttgagtatgataacgcaagggcagcacggaagaaagttgctactgattgatcttgttatgcttctggattgcattttgctgttgttaaggcgccttataagaattgtgcatgatatttccttcagttatgctacacacgggcacatctgcacatgtagcagcagcaacattcagagaagaaatgctcaccggagcttgtttgatttagctcttcctgggcatacgccactttgtttttccccgtatcagtcactagccagacattattttattaaaggttgttcgactataacttgataattgcttacatttgaaaaatgacgtgaacaatacatgagttcatctctgcagtctagtgtctatacataactgtttcgtgggctctgtgagcaa

SEQ ID NO: 7241 - DNA, 1366 bp, Zea Mays
accaagggttttgacgacgaggatgggctgcgcagcaagcacgagattgatgacacgcaacgaggggagtggagaatgaacggaagggctgctgcgtcaatgcggacaatgcgcagcgatgaaggctatgcgatgtatgacgcgaagtgaagaatggtgttgctgcagggacgaacgacacgcagcttgctgcgcttttcgtcgagcaggttcaatgcgaggcttgagggtgtgttgctgctgctatttggtgcgacacaatgcccgggtgcgtggcacaagcttgcagcgacacgaccaccacgcagagacttgcgcgtgaactcacgaacacacgacgagcatggatggtgcaggggctgctcgccacagagcgaagtggaagtcatggcgttgtcggatgagactgaccccgaccatggcggcatgcggaggaggagctcggggcgctgcaacgctgctggagcagagggataccaatgccgtccacaaccagtgtggaggagttcgaggaggtacccatgatgaatctgcagggccacgcccggacatgccggcaagcacgcagcaagcagaatccgacgcggtgggcagggagaggaaagtggcgacctgggagatgagggctagcttggggaaggagcagagacctgcggccaccatggcaggtgctaccggggtctcagtgttgatggaggcaagggcgcggcgctgggaacgagggcttgccgcacgtccctagcattgctcgagcagagaggagggtggccgtcgaggtcagagcactaggcgcccagcgcaccaggggcagggggcaggatggttggcggccatggggaggcaagctcgaggaaatccacgacgaggggattgccggacttggggcaagaaattctgggcgagcagggatagggcgaattggatccagcctagagctggacagcgtgggggagaagttcctgcgtctaggaatggagggggaagggatttgcgtgcgctatggcagagctccgagcggggaggagaaaggagaggggtcggacgccatggaggtcgatgtggaggtcgaggcagggacctcaggctcggccatgggagagagggcaccaagctgacatgtcgaaccagagaaggagagcatcggcgcctaagcttcatccatggagagagcccactcgacttgagggtgtaggagagttggggaggggcgctcggtcctggggagatcacgagcagggggcgcgtccatgtgaggggtgcggtcaccagggctccatggacgagcaggagcagagggaggaagatggccggaggtggaagacgagcaggctgtgtgcgtgagaaactggcggccaggaaaaatgct

SEQ ID NO: 7242 - DNA, 638 bp, Zea Mays
ggatattgcaaatcaaagttctatcgtttctggaatggagttatctgcgtggaggactgacgacgctcgaccgggactatggactgattaacaatatccaccatgacatcggaactcatgtcatccatcaccttttccctcaaatcccacattaccatctcattgaggcgaccgaggcagcaaaaccggttcttggcaagtactacaaagaaccaaagaagtcgggtcctctcccgtggcacctgtttggggtgctagcacaaagcttgaagcaagaccactatgttagcgacaccggagacgtagtgtactaccaaactgactcgaaaacgaacacctctgcacaaaaatctgattgacacagactatagaacgtagcgtattcttcatttttctcaggcgggctgtgcctgaagacctggccagcctcctgagacctctgattggtgtgtgtgtgaccgggttcgtcaattcaagaatgtaaggtggcgaagtattatcatgtatttgagtgagggtataattctttccaatggtcgaagtcggatgctgcttccgatgtaacgaactgtgattctttgggcaagaggtgtactattacagtaaagagtgaaaaaaaagagttagctacatgaaag

SEQ ID NO: 7243 - DNA, 639 bp, Zea Mays
ccctgccctcctccaccagtagatacatgtttggaatggagttatctgcgtggaggactgacgacgctcgaccgggactatggactgattaacaatatccaccatgacatcggaactcatgtcatccatcaccttttccctcaaatcccacattaccatctcattgaggcgaccgaggcagcaaaaccggttcttggcaagtactacaaagaaccaaagaagtcgggtcctctcccgtggcacctgtttggggtgctagcacaaagcttgaagcaagaccactatgttagcgacaccggagacgtagtgtactaccaaactgactcgaaaacgaacacctctgcacaaaaatctgattgacacagactatagaacgtagcgtattcttcatttttctcaggcgggctgtgcctgaagacctggccagcctcctgagacctctgattggtgtgtgtgtgaccgggttcgtcaattcaagaatgtaaggtggcgaagtattatcatgtatttgagtgagggtataattctttccaatggtcgaagtcggatgctgcttccgatgtaacgaactgtgattctttgggcaagaggtgtactattacagtaaagagtgaaaaaaaagagttagctacatgaaag

SEQ ID NO: 7244 - DNA, 1459 bp, Zea Mays
ccgcggccacccgcctcacctccgccgtcgaggaggacaagaggagctccccccttggggagggcgacgagcacgtggcggccagcggcgccgcgggcggggagttcgacccgggggcgccgccgccgttcgggctggcggagatccgcgcggccatccccaagcactgctgggtcaaggacccctggcgctccatggcctacgtgctgcgcgacgtcgtcgtcgtcctggggctcgccgcggccgccgcgcgcctcgacagctggctcgtctggccgctctactgggccgcgcagggcaccatgttctgggcgctcttcgtcctcggccacgactgtggacacgggagcttctcgaacaaccccaagctgaacagcgtggtcggccacatactccattcctccattcttgtcccctaccacggatggaggattagccacaggacgcaccatcaaaaccacggccacgttgagaaggacgagtcctggcacccgctaccagagaggctgtacaaaagcctggactttatgactaggaaattgcggttcaccatgccgttccccttgctcgcattcccgttatacttgttcgcaaggagtccagggaagtcaggatcacacttcaacccaagcagtgatttgttccaacctaatgaaaagaaggacatcataacatcaacggcatcctggctggccatggttggtgttctggctggtctcacctttctgatgggtcctgttacgatgctaaagctctacggagtcccatactttgtatttgttgcttggctggatatggttacatacttgcaccatcatggccacgaagacaagcttccctggtaccgtggacaggaatggagttatctgcgtggaggactgacgacgctcgaccgggactatggactgattaacaatatccaccatgacatcggaactcatgtcatccatcaccttttccctcaaatcccacattaccatctcattgaggcaccgaggcagcaaaaccggttcttggcaagtactacaaagaaccaaagaagtcgggtcctctcccgtggcacctgtttggggtgctagcacaaagcttgaagcaagaccactatgttagcgacaccggagacgtagtgtactaccaaactgactcgaaaacgaacacctctgcacaaaaatctgattgacacagactatagaacgtagcgtattcttcatttttctcaggcgggctgtgcctgaagacctggccagcctcctgagacctctgattggtgtgtgtgtgaccgggttcgtcaattcaagaatgtaaggtggcgaagtattatcatgtatttgagtgagggtataattctttccaatggtcgaagtcggatgctgcttccgatgtaacgaactgtgattctttgggcaagaggtgtactattacagtaaagagtgaaaaaaaagagttagctacatgaaag

SEQ ID NO: 7245 - DNA, 622 bp, Zea Mays
tgtttggacataagccatccaacacatgtccttacccaccaggtgctgagcaacgcggcatacaagagcgtggagcaccgggtgacggtaagcgcggcagaggaccggctgtctatggctttcttctacaacccgcgaagcgacctgcccatcgcgccgatggcggagctggtggggcccgaccgcccggcgctgtacccggagatgaccttcgacgagtaccgtgtttttatccggcaacgtggtttggccggcaaggcgcagcttgagtccctgcaggtcaaagccaccgccggcggaggaggctgtagcgctgcagctgcctcctccaccagctagcatagctactgagctatatatatacatatatcatctgcagggccagccggtttcagttagctagctgtgcataatcaacgttggatcgaccagtgaataatatacaattatttgatgttaatttctacacaaatgttgtacgtgttgtacattcatcccatgtaactgagcagtaaatgtaagtgtgtggaactcccgttgctatttggtcttcgctcttgagttcaagagggaagtaggacaatgatccaaatcaatataatactactaaccatcgattatt

SEQ ID NO: 7246 - DNA, 2696 bp, Zea Mays
atgttgggcgaggacgggcggtctgagggcatcgcggaggaggcgtctacgtttggtgccgaggaagaggtggttgaatacggtggagggggcacagcgaggaggaatgacctgatgaggctggccggtgctggggcaggaggaatcgaggatggaaaggagtgccatcgaaggaaggagtgcgacgaaaccgcgatcgagcgatgatggaagggaggcacggagtgtgtcgcgacgatgcaaggccggcgacgggcccgactttcacgctggagtccttgcgtggttgacgggggctgaggcgggggcatggtgaaggggtgtggacgcccacactaaacccttatagagttgtaaatatatgagtggacattttgtcggaaagaagttgcagaactggagcatcatctggaattgtagtttttcatcaaactgttattaaaatattattgtctaataaacaaatccaggcaccttctaaattttatttattgtaagaacatttacacagttgtacttcataatatcgtcttgagtaatactaatatatgtgcaaaattatcacttaataagtgaaatggttagcattgacaataactaataactaatacaaaaagacagttgcatagtcagctcattatttcacttttaagaaaataagcaaaatactgcaactcatctacatctaacatagaactgcaaatgtgacaggtgtatgcttactgatgtgagaaagagcttacagtgttaaagagacatattgcgacttcatcataagttctaccaataatttgtgtcttcagagactctgtgatgcagttaacaatggtatggaaatgtgtctcctgcttttcattgccctgaaaagaaattttacgttgttatttagtagcaaaaatctataacaaacttaatgatgcaacttcacaggtcttaatttcccaatagagacataaacaattcatacccagataaaaagagacataaaaatggtacccagattgtcgaattaagtggctagagtacttgtgcctcacctaggtggtggcaggggtgaacattttgggcgaggcatcgataaggtagacaaccatctccttgttcacctccctctcctggttccccgagaaagcaatccagcaccacaaaaaatgtggtgtcgcgacatggtcaaataatcaaattagtttttttttcaaaacactgatccgatagaaggagaatagggagagagaacacagctaagagccagtacgaacctggtcactgtcttcgtcttcatcgctatcgtcgcagaagatcccctttcctaggaaggcgtcagcaaacaaaaaaaagactgtacaaagcctgagcagggtgagaaacaaaactttttgaatggacctgccttaaagtagctaaaatattggtgtttctttagttctaataaacttttgttacagtgccctactgtatttacagttcaaaaatgtttggttggttcaagaactaatgaaatctctcacttcacttcttcctgttgattgagaaaaataactcacgccagagcatacaggtcttatctgtggaatttcacaaacagcaaaaaaataaagatagaagaaaatcttggttgtcaatattatatcataagaaaaggtcttgagtgttgagcttcttctgcagtcgccaaatgtaaattgatctatattctaagtttcaagattagagaaatggaggaatgatactgcaggctagagtcatgataggtcaagtatctactttaaatgttcaaatcgcctctacaaaacccaacaagggtaatccaggccaggagtatttcagaggttggacatgttcaagggtgtggaatacaagttcaccaccatgaggtggttgaggaagagcatgataaccacaaacaatctgtagaggttcattattgtgtgcctaaaaacgataatgtatatgaacaataagaattcaagccatcttaaggtatttgagaggcacgaatatctaaaatgaccagcaccagttttgtcctccaaagtactactataaaatttgttgtacacttgtactgacagttatcatgggtaaaacaaaaaacacagggcaactcttagctaaatgctcatactttaatggtctaatacaacttattttagcagtgtattatcttgatttgtcctgcagagatatggtgctttgtatttgttggcagcttcttcaattactactggaatgtccatgctggaggtatgtggctgtttgtctatgtttaggttatctccatcagcttttctatcccacatatcatgtctcctaaaaatgctccaaaccgaccacatacattgaaactgcttcattaaaaaaacatgacaccaatatttttaaaaaagacaacacttcgtaattttactaaaagcaaatttgtcatgtttcccagtccatagtttcaacacgagaagtacttgactataattctgcttcagaacccatgagaaatagtacttttatgccatccataagctaacatgaccaaatttgtttaaatgtggagcctacaaaaaatcaaactttatgcatgattttaagctaggagaaaagagctattaccaatactcaaagcaccgcatgcagagcccacactcaagctccctctttgtgtccacttctgataaatgctcatccctgctcctaaatttttt

SEQ ID NO: 7247 - DNA, 580 bp, Zea Mays
caatcataatgataagatgatgggcaattgtcacaaagtaataaatccccaccatcatggcacacagagcatatcgaatcactttccagatcagaactactccccttcaagcgcacatgcagtggatctctgggcttgtttccacccatgaattcaactaaacactgtgatagggaccttccatcctttaaaaacatatgagccgaaggtaatggtgtactgctcccagcatgaacctcaaaattctccacagtgaataattcattacaacacatgcattttattccatctctgctgatggaaccttcctttataccaggtccatcacttcgcttatatgtaaccttatcccttggtaccacaatatttttctctaccaacaaagacaaaactgtcttcacgtgatgccgacagggaaagatctgtccatgtgaacaaagaactcgtgcactgttcaaagaaactgaagatggttttcttttcctacattttccatgatgtgcagacaaggtaaacatgttgctacatctgtctacaacaggcataccctgtattttacttgaatcctttaatccaccgc

SEQ ID NO: 7248 - DNA, 3742 bp, Zea Mays
aagccgcttcgagctcaagccggctcgcgagcctcgagcttattttcaagccctactcctaggtcgccactccttccatcatatacaccgtaattgatttgttcactatctatagagattgtataacaattctaaatatacaatcagagactagatcaatcatgtgtaaatatatttaagattctaatactctccttcaatcataacttggataggttaagattgtaccgaaattcttctgatctttttcggtatgggcatgaaacactggttagctgttaaataaatagcaccaatattatcacactataatttagtgcaaggggtgcataaatacttagctttttttaataaggattggatccccataatgttagtagttatatttgccaaagctttatattcagcctttgtacttgatcttggcactgtagcttgctttctagcacgccaggacaggacacaagattgtctcctagaaaaatagtaaaaaacccccaatgacttatcatcaaacctttgtacttgatcttggcactgtggcttgctttctagcgcgccagggcaggacataagattgtctcctagaaaaatagcaaaaactccccggtagacttatcatcaagactggcaacctagtcaacatcagaaaacatgctaattgtcatggaagaggactgtcttattctaagtccaacacttgtgtgaggttgaaatatcaaatggttagttttatcacataccagtgaatatcaataggtgcatgtagaaactcacccaccttattaactgataatgcaatatatcagaggcatattaccttgtgagatatatattccatcacgtgccatgtgtatagggatagcaatgagtcgggttcgggtcgggtggagtaaaaacccgcccgcgatcgcactcgtgaagtctatataaacccgcccgcgatcacacccgcgggtggaattccaaacctgcacccgaacccgtcgggtttcgggtgggtttcaggtcacccgcgtgttttacatagtgtacacttttaaataataattaagctataatcaattaagtacccccaataattgagttatatctatgtattttaagtcttctcacattgagcagcaacaaaatatttcatgaatcattagcctagttatttatccaaaataattaatattgtatcttaatcattttttgcgcaaaataaagaatgaacccaatttcgagtcatgtgcgggtcacccgcggttgaaatagaaactcacacccacgaaacttcgggtcaggtgcgggttgcacccgcgggtcaaaatcttcacacatacccgcaccaaccgggtcaggtacccgtcgggttttgggtttgcgggttaaattgtcatccctacttgtgtacttctattccaaaaaaatagtgtatgccacctcaaatcttttaatgcgaaatcaggataaagatcatcaatagggcagcggcagcttcttatgaagagccagtgactataatgtcatcaacatatatgcatcggctttagatggtataaatccaagatgttgtaatttctcgcttaaccttgagtaccatgctctgagtgctcattttaagccataaatagctttatctaacgtgcaaatacaatgagagacttgtgttcacactctagtggttgcttcatataaacgcctacctcaagaatgccatgaaggaacacattcttcacatctagttgtttgagacacctagatgtgaagagttctgatagtaatggccttgaccaccggacagaaagtgtcctcgtaatcgatttcatactttgtttaaatcctttagctacaagacgagctttgtatttatgtatgccaccatcaacctttatcttagttttatatacttatttgtaatcaataatatttttaccttttcccgatggtactagatgtcaggttctatttttctagacaattttatattcttcattcattgcatgcctccacttttcatctgccatggtctcatctaagtcttgggtttctccagttaaggtgaaatatccatattgtatttttaccatccgtcttaatcttaggctgacgaatacccttctgtaatcgtgtcacggatcttgttaattcttgtgttagagtgtgtgttcctatatcgtagattgtaccctctttatgtcgacattgtacccttgtgtagttgttgatgcactcattcttatttgatgtgtagctttcatcacacatgtaccaacagtcgaaggtgtcctgtgctgtcttcccgcatacctaacagggcgatctaccgttggtgctgttgaagtagtccctcccatcaggtggtccacatcttcctagcaaaggtccacgaccgcgtgggtcgccagaccattcacgtggtgcaccacgaccacacaaagtagcgccagttccgccacgaccaagacagacaacattggcagaaccctgtgctccaccttgcaagagatccatgcggccctcaaaactcagcaattgcgagaataattcgccaactgaaattggttcaatctaagtggccacgacagtcgcgacggggttaaaatcaatacccaatcccgctaggatatatgacaccaattcctcatgtttaattggcttgtcagcggaagccatatcatctgcaagagacctcatcttgctcatgtattcagtaattgtctggttaccttggatcagaacctctcgtgatagggaggtcatagggaagccgagcattgctgctatatagctacccattaagaattagtctaaattggcctgcttgacttctttatcactgaccttgacggtgatcttagtggcgggggcaatgttggtcccatcaatgaagccaacgagctatgcaccacgaagcgcatgcatgacttgtgccctccatagagggtaactggatttggagagcttctcggtgatgatgaagtcggcaagaggagcggcgacagagtttgtcgaggaagaggtcgacatggcaacttgtggtgtcggtaggatggatctagatacgttgttgtaggtggctccgataacatgtagtaaaccgccaagattagtaagcattctacctcctgtaggaggcgtaattgtatttatatgggatatgaataacccctattgtggcttgcaaggaaagatctaccgtaattgatttggtctctatctataaatcgtaatgattgattgagtctctatctacagcagccgtacaataattctaaatatacaatcagagaccaaatcaatcacgtgtagatatactccacattacaatagctgactcgtgaatgtaagtagtaaacaagatcgccaactagaagaatgtaatgtcttacagaatatctgcaggttatgtttcgatcaataataactggttatttgtctattgggatcaactgatcaagtctatgtagcatttgcaaattcgacaatgctgtttctttgagttcagtcaagcaagaatgaatggaattctcataagccaatcccatctaacctcgacagaagaaaccatacctgacaaatgattgctcatgaatgcccgttgttaaatcaacttgaggatctggcggacaagttggagcatcaatgaaacaaataccctctttatctttgttttcccgacttaccggtaccatctctggccccactgccaaaccaacttgagggtctggcatactagtcagcggatcaattgaag

SEQ ID NO: 7249 - DNA, 934 bp, Zea Mays
gtacttatggcttctttgtgcagaaagaagtacaacaaagtaaacgggttgcaaagtgccaaagagatatggaatacaaaagacgacgcgcatgagagcgacaaaggaacaccaggatagagctcatcgaaagtaaactcagaagattcaccatgaacaaaggagccaatgaacagtatggcgacagaactgataataatatgacacatcagggtaaaaccatcaccagaaattgctccaacataatcttattttcctcgtagctggacagtatgttatcagttggatagtccttaatttacaccgtgggaaatacacaatcacacgcttccgtaaccaggttaggttagtttcgacttgaacttggacaatgccaaggcgatggctgaaagcttattgcatgaaagttaagcatccttcatccgtagctctactagatctacctttggttattatttggtcgagattctaagccagacattccttgggcgagcgcccttttttacccgctcatagcattttcctgagaacttgtattccaatcctgaagctgtgttaggctgcaaaatgtagggagcgttatcataagcaacacaatcagctaccataaaaataatcaggaagttaaccagagcatatacatactgttatattcaaagtgcaattctcgttgcactgatctgcaccagcactagaaatggaacacaatcagtaccaagtaaatgcaaaatacgttcaaaattgtagtaaatgattattattgattaagttactagagaaatcactaattgttactcccttcattcaaaattgtaagtagttctaccttttctagatacatggcttttactatgcttctagttatatactatatctacatatgtatagtcaaagagttatgtatcgagaaaagtcaaaacgacttagaatttgg

SEQ ID NO: 7250 - DNA, 628 bp, Zea Mays
aattttataagttgatttattttggagggaggcagtatttatattttcagcaagtggctataaagtgttcattaatacttttgattgcaagaagttcaaggacactgttgaagagatagctgaacagcaaggaaagagcgaggagaaagaaaatgatgaagtctccactgccgcttctgatttggcacagaagttaacagtggcagagcccagcaaggaggaaaatgcagagaaagaggaggctcctgcatccgatgataagaaggatgctaaagagtgaaggttgaaggcaaacaagggtcaaatggatgccattccattcatttcgtttccaaggttcagcttccccgcaaattttcattgtgttttctccgagatgaatgtttgtgttcggtgaaatcagagtcgtcagtcatctacatagcttttcttggttgatagactgttattttaagtcgcatgtttatctgggatggctggggtcagcatgtttgtacaattatttggagttgcttttggaatggtcgcggtttgatgagttgcctacagcatgagatgtcttttcgctccacttttatggttcattcgttctcaataatatgggatgctatacttgtgttgatccatt

SEQ ID NO: 7251 - DNA, 1068 bp, Zea Mays
atacacggagtatcaatctagactagaggagacgggtgaacgtggtgagcctccgcccagaatgcaaccctactagtgctagctttcggccgcgaaaaaacgtccccacccccacgtctcaactttatagccgccccctccccaccgccgcggccgccacgcgcagcagcaacccggtagcaggagcgcagccagcaagctcaggcccccagccctactgccaccgcgccgaacgacatggccgagccggcgaagctctaccggttcgacaaggaggggaaccagtggaaagagcgcggcacaggcactgtgaagctgctcaagcacaaagacaccgccaaggtccgcctcgtcatgcgtcaggcgaagacgcttaagatctgcgccaaccatctcgtggtggcgacgactaagatgcaggagcacgcggggagcgacaagtcgtgcgtgtggcacgcgctggacttcgccgacggcgagctcaaagaggagatgtttgctatccgttttggatctgtcgagaattgcaagaagttcaaggacactgttgaagagatagctgaacagcaaggaaagagcgaggagaaagaaaatgatgaagtctccactgccgcttctgatttggcacagaagttaacagtggcagagcccagcaaggaggaaaatgcagagaaagaggaggctcctgcatccgatgataagaaggatgctaaagagtgaaggttgaaggcaaacaagggtcaaatggatgccattccattcatttcgtttccaaggttcagcttccccgcaaattttcattgtgttttctccgagatgaatgtttgtgttcggtgaaatcagagtcgtcagtcatctacatagcttttcttggttgatagactgttattttaagtcgcatgtttatctgggatggctggggtcagcatgtttgtacaattatttggagttgcttttggaatggtcgcggtttgatgagttgcctacagcatgagatgtcttttcgctccacttttatggttcattcgttctcaataatatgggatgctatacttgtgttgatccatt

SEQ ID NO: 7252 - DNA, 1149 bp, Zea Mays
atacacggagtatcaatctagactagaggagacgggtgaacgtggtgagcctccgcccagaatgcaaccctactagtgctagctttcggccgcgaaaaaacgtccccacccccacgtctcaactttatagccgccccctccccaccgccgcggccgccacgcgcagcagcaacccggtagcaggagcgcagccagcaagctcaggcccccagccctactgccaccgcgccgaacgacatggccgagccggcggagcaccgtccagctgaggaggaggaggtcgccgttaccactggagaggaggacgaggacgcgctcctggacatgaaggcgaagctctaccggttcgacaaggaggggaaccagtggaaagagcgcggcacaggcactgtgaagctgctcaagcacaaagacaccgccaaggtccgcctcgtcatgcgtcaggcgaagacgcttaagatctgcgccaaccatctcgtggtggcgacgactaagatgcaggagcacgcggggagcgacaagtcgtgcgtgtggcacgcgctggacttcgccgacggcgagctcaaagaggagatgtttgctatccgttttggatctgtcgagaattgcaagaagttcaaggacactgttgaagagatagctgaacagcaaggaaagagcgaggagaaagaaaatgatgaagtctccactgccgcttctgatttggcacagaagttaacagtggcagagcccagcaaggaggaaaatgcagagaaagaggaggctcctgcatccgatgataagaaggatgctaaagagtgaaggttgaaggcaaacaagggtcaaatggatgccattccattcatttcgtttccaaggttcagcttccccgcaaattttcattgtgttttctccgagatgaatgtttgtgttcggtgaaatcagagtcgtcagtcatctacatagcttttcttggttgatagactgttattttaagtcgcatgtttatctgggatggctggggtcagcatgtttgtacaattatttggagttgcttttggaatggtcgcggtttgatgagttgcctacagcatgagatgtcttttcgctccacttttatggttcattcgttctcaataatatgggatgctatacttgtgttgatccatt

SEQ ID NO: 7253 - DNA, 553 bp, Zea Mays
ttattttgattgcaagaagttcaaggacactgttgaagagatagctgaacagcaaggaaagagcgaggagaaagaaaatgatgaagtctccactgccgcttctgatttggcacagaagttaacagtggcagagcccagcaaggaggaaaatgcagagaaagaggaggctcctgcatccgatgataagaaggatgctaaagagtgaaggttgaaggcaaacaagggtcaaatggatgccattccattcatttcgtttccaaggttcagcttccccgcaaattttcattgtgttttctccgagatgaatgtttgtgttcggtgaaatcagagtcgtcagtcatctacatagcttttcttggttgatagactgttattttaagtcgcatgtttatctgggatggctggggtcagcatgtttgtacaattatttggagttgcttttggaatggtcgcggtttgatgagttgcctacagcatgagatgtcttttcgctccacttttatggttcattcgttctcaataatatgggatgctatacttgtgttgatccatt

SEQ ID NO: 7254 - DNA, 2394 bp, Zea Mays
accgaaccaaacaacacacgtcaaagcggaaaacctcagaaaaccacaataaatcatcctcgtccaccactgcccccgctctgctgcaactccactcggcccggccgccctttccacccaccttgatcctctgatccgttggtgcttgaccgatccatggacacccatatcggatccgtgaacggggcggcgtcgaaccagacggttggctgcccggcgtcggcgccggggtgcccgatggcgtccacgccggcgcagcccgcggcgaccctgtcggcgggggaggcgtcgctggggcgccacctcgcgcgtcgcctcgtgcaggtcggcgtcaacgatgtattcgcggttccgggggacttcaacctcacgctgctcgaccacctgatcgccgagcccggcctgcgcctcgtcggctgctgcaacgagctcaacgccgggtacgccgccgacgggtacgcgcgcgcgcgcggcgtcggggcctgcgccgtcacgttcacagtcggggggctcagcgtgctcaacgccatcgcgggcgcctacagcgagaacctgcccgtcatctgcatcgccggcgggcccaactccaacgactacgggaccaaccgcatcctccaccacaccatcggcctccccgacttctcgcaggagctccgctgcttccagaccgtcacctgccatcaggcggtggtgaacaatctggatgacgcgcacgagcagatcgacacggccattgccacggcactgagggagagcaagcccgtgtacctcagcatcagctgcaacctccctgggctgcctcatcctaccttcagccgcgacccagtgcccttcttcctcacccccaggagcaacaagatggggctagaggctgcagtggaggcaactgtcgaattcctgaacaaggcggtgaagccagtccttgtcgccggccccaaactgcgtgtggcaaaggcaggaaaggcatttgtcgatatggtagatgccagtggctatgcctatgccgtgatgccatcggccaagggtcttgtgccagagactcacccccacttcatcggcacctactggggcgccgtcagcaccgccttctgtgcggagattgttgagtccgcagatgcctacctctttgcaggccccattttcaatgactacagctctgttggctactcattcctcctcaagaaggaaaaggccatcatcgtccagcctgagcgtgtgatagtggggaatgggccggcattcggatgtgtgatgatgaaagagttcttgtctgaattggctaagagggttaataagaacaccactgcctatgagaattacaagaggatctttgtacctgagggccagccgctggaaagcgagccaaatgagccactgcgagtgaatgtgctcttcaagcacgtccagaagatgttgactggtgatagcgcggtgattgctgagactggtgactcctggttcaactgccagaagcttaagctgccagaaggctgtggtatggttcgattggatggtcagtgggtgcattgctcggatatgctcagggtgcgaaccacaagcgtgtgattgccttcattggtgatgggagcttccaggttacagcacaggatgtgtcaactatgctgcgatgtgagcagaacagcataatcttcctgatcaacaacggtgggtacacgattgaggtggaaatccatgacgggccatacaacgtcatcaagaactggaactacactggctttgtggacgccatccacaatggcttgggcaagtgctggacctccaaggtgaagagcgaggaggagctgacggctgccattgagacagcgctaggggagaagaaggactgcctgtgcttcatcgaggtgatcgcgcacaaggacgacaccagcaaagagctgctggaatggggctctagggtttctgccgccaactcccggccaccaaatcctcagtagaagtcccgcaggctccaagcctcggagtgccagtagtgatagtaagctgtagcacggtgggggctcaaccgaataacgtgaacgcattgccctttctgttacgtgttttattttattgtgtttctgtggtcgtatatctgttttgtgacgtgttccctgcttctcccatgtgaattccagaagaactatgagaaaattcaggttggttgtcactatttgtgctgcgttaccggtgtgattttacttgccaggtaaacatcgccggccagggagtgaatcatctagagattgggctataagtattgtagcgataattattctagtacggaagcaggagatggagcatgtactatccagatttttaataattgattgtgcacactgcgggggcacaacacatacaggtgcgcgccccggtgcgaatcgccatgtcactatc

SEQ ID NO: 7255 - DNA, 581 bp, Zea Mays
ataatcgtgttctggttcccagaaaaaaaaagacagggaagggagctccgtcgcttggggagagaagactgagatcgtgattttcctgcgtcaggctttggtggggacctggtgatgttcgccagagccttctgaaccgagacatagcatcttcacgccggtctagcggtcgggagggtggaattcattgccgtggttctctgccatcacaaatccgcccctcgacaagcaagctgtccgctcgggcgtctggatgattgatgcagcctggtgcatcgtggtggcatgtggagtctgctcagcgcccagtaaaccagggggcctggacgacgactccatggacgaactgtgcagctgcggcaatggagggccaccgctccctctcctcctcagtctgcgcccacccaccgctatgggatctggtcgcgcctcctctggtgcacagccgccctattgtcgccgccgcggggctctactggcggccatcgtcacccatcggccatgccgtagcgagctcgttgccgagcgaggctacgagtcatctgaagatcatcctggtacctggaatctcaagtcccagg

SEQ ID NO: 7256 - DNA, 1114 bp, Zea Mays
gagccgtccccgatcccgtctccatgggaagaagaacgtggaaacctgcggggaagtaaacggcggcgacaggcggctgcgcgtcgccgcggcgacatgacgtcagttaggcacccgatcgacaagttgtcgctgcagcgaatccacccacgaagggcagcggcgcgacccagaacatactgtgaaaggaagacatacttggcttatgactccagagtcgagcatccattcccatggtatcttaaggtccttatatcttccgcttgcactgtcccttactcgctcagtgttatgaataccttgttcaattctacaacaagggaaagcacaattaggtgaatgttgatttcttgatttagtatcgttccgtagaatttaaaagtagaaggtattcagcattttttattctgttaaatacatttcagtcatcttactcacttgtcctgcaatgcctgcatgcgcttgagagccataggtgtggccactctcctgtcatcatggaaggatgatgcttccgactctatgttcttcagatcgcggtagttgaatgctgcttctctcaaggcatctgctttcttctcgggccagttggggaattgttttagcactgctctttcatccacaagccatgtgcaggtaactaaatcgacgtacgggatggcctaagatgatagagctcctttaccagccagagcgaggggagacaccttttgctaataacgggcaagtaaaagttttaaataataggaagaaaaagaaacgaagggaaagctgacaaaacagagaataaaatggttaaatcctatgtgttttacttctggcatgtgcttagtattcgtttgcctttaatctataacagcttctactgattttacagtatttttacttctatcgattacagctacattactttaaatagttggctttaatccgaaccgaacaacttgatccgaggtttggcggatttcgttgttagtggtacaaaagatggagcccatttctttgcccaagccgatgacgcacttgttgaaagggcagatttagatcccggtcgtgtggacacatgtagagatggtaatgaactctaaattttgcgctataaaatttaataatt

SEQ ID NO: 7257 - DNA, 1848 bp, Zea Mays
cccagatgaggtagcgagccgtccccgatcccgtctccatgggaagaagaacgtggaaacctgcggggaagtaaacggcggcgacaggcggctgcgcgtcgccgcggcgacatgacgtcagttaggcacccgatcgacaagttgtcgctgcagcgaatccacccacgaagggcagcggcgcgacccaggtacttatggcataatttacatatgtcttgccgtcgttcttgtgtgggtgatctacggtgtgtttggttagccggttggccttaatccggcgtgagagtcaattcggaatgaggtggtctggatggactctttcctcagattaacatgtcactagtgctcgttcatgacggacagctagcgtctcaaaccaaacaacgtcataggctgggatggttcggcagactatcccgttctgcaaagtgcaaaccaaacggaccaggaaccgattctgcatttctatggcttttttgtgtcatgcttcgcgcatgtgttggtgatcgaccaagacctaacgatctcaactctcgagggagaatgttggtgaattaggtttgtgctcgactgctcatatgtacgattcgtttagaaatttttcagagcctcaacttgtatccaagagatcagcacctgatgccaaataaattaaactttagaagatgcagcaccatcatcaagtcttggtggagacccttggagccaacctcggcaaaacttgataatctatgtgtgtcatatttatctatgtgtgatctcgacttttatttgaacccacgtgaactcggatcactctgacttgcttgcattagtatttagttcctgaaatgcctttctgcatccttcgtcaaagccaccagcaagctgcaaatttgtttcggtgcagtcagttaattaattagtttctgcaagtgtcgttgcgaattaattcgtggttcggaacaagttacctgatgtatgcggaaggcaaagcggacaccttgcagaagcagctcctcctcattcgcaaatggatctgacttcagtgtcttcacaatgcggttcatgtactcttttgcaagcttcaaggaagccatctttagctgtttaatgtaggatgggcatgcaccatgtgtcatatgtctattattgtatttggactccacacttttgtgaaactaaatgcctctcctttattgcgagttgtgacagaacatactgtgaaaggaagacatacttggcttatgactccagagtcgagcatccattcccatggtatcttaagatcgcggtagttgaatgctgcttctctcaaggcatctgctttcttctcgggccagttggggaattgttttagcactgctctttcatccacaagccatgtgcaggtaactaaatcgacgtacgggatggcctaagatgatagagctcctttaccagccagagcgaggggagacaccttttgctaataacgggcaagtaaaagttttaaataataggaagaaaaagaaacgaagggaaagctgacaaaacagagaataaaatggttaaatcctatgtgttttacttctggcatgtgcttagtattcgtttgcctttaatctataacagcttctactgattttacagtatttttacttctatcgattacagctacattactttaaatagttggctttaatccgaaccgaacaacttgatccgaggtttggcggatttcgttgttagtggtacaaaagatggagcccatttctttgcccaagccgatgacgcacttgttgaaagggcagatttagatcccggtcgtgtggacacatgtagagatggtaatgaactctaaattttgcgctataaaatttaataatt

SEQ ID NO: 7258 - DNA, 891 bp, Zea Mays
gcccagatgaggtagcgagccgtccccgatcccgtctccatgggaagaagaacgtggaaacctgcggggaagtaaacggcggcgacaggcggctgcgcgtcgccgcggcgacatgacgtcagttaggcacccgatcgacaagttgtcgctgcagcgaatccacccacgaagggcagcggcgcgacccagaacatactgtgaaaggaagacatacttggcttatgactccagagtcgagcatccattcccatggtgtggccactctcctgtcatcatggaaggatgatgcttccgactctatgttcttcagatcgcggtagttgaatgctgcttctctcaaggcatctgctttcttctcgggccagttggggaattgttttagcactgctctttcatccacaagccatgtgcaggtaactaaatcgacgtacgggatggcctaagatgatagagctcctttaccagccagagcgaggggagacaccttttgctaataacgggcaagtaaaagttttaaataataggaagaaaaagaaacgaagggaaagctgacaaaacagagaataaaatggttaaatcctatgtgttttacttctggcatgtgcttagtattcgtttgcctttaatctataacagcttctactgattttacagtatttttacttctatcgattacagctacattactttaaatagttggctttaatccgaaccgaacaacttgatccgaggtttggcggatttcgttgttagtggtacaaaagatggagcccatttctttgcccaagccgatgacgcacttgttgaaagggcagatttagatcccggtcgtgtggacacatgtagagatggtaatgaactctaaattttgcgctataaaatttaataatt

SEQ ID NO: 7259 - DNA, 912 bp, Zea Mays
ctggctcgtgggcccagatgaggtagcgagccgtccccgatcccgtctccatgggaagaagaacgtggaaacctgcggggaagtaaacggcggcgacaggcggctgcgcgtcgccgcggcgacatgacgtcagttaggcacccgatcgacaagttgtcgctgcagcgaatccacccacgaagggcagcggcgcgacccagaacatactgtgaaaggaagacatacttggcttatgactccagagtcgagcatccattcccatggtatcttaaggtgtggccactctcctgtcatcatggaaggatgatgcttccgactctatgttcttcagatcgcggtagttgaatgctgcttctctcaaggcatctgctttcttctcgggccagttggggaattgttttagcactgctctttcatccacaagccatgtgcaggtaactaaatcgacgtacgggatggcctaagatgatagagctcctttaccagccagagcgaggggagacaccttttgctaataacgggcaagtaaaagttttaaataataggaagaaaaagaaacgaagggaaagctgacaaaacagagaataaaatggttaaatcctatgtgttttacttctggcatgtgcttagtattcgtttgcctttaatctataacagcttctactgattttacagtatttttacttctatcgattacagctacattactttaaatagttggctttaatccgaaccgaacaacttgatccgaggtttggcggatttcgttgttagtggtacaaaagatggagcccatttctttgcccaagccgatgacgcacttgttgaaagggcagatttagatcccggtcgtgtggacacatgtagagatggtaatgaactctaaattttgcgctataaaatttaataatt

SEQ ID NO: 7260 - DNA, 878 bp, Zea Mays
ggtgacgctgcgggagcgtctcgctggctcgtgggcccagatgaggtagcgagccgtccccgatcccgtctccatgggaagaagaacgtggaaacctgcggggaagtaaacggcggcgacaggcggctgcgcgtcgccgcggcgacatgacgtcagttaggcacccgatcgacaagttgtcgctgcagcgaatccacccacgaagggcagcggcgcgacccagaacatactgtgaaaggaagacatacttggcttatgactccagagtcgagcatccattcccatggtatcttaaggatcgcggtagttgaatgctgcttctctcaaggcatctgctttcttctcgggccagttggggaattgttttagcactgctctttcatccacaagccatgtgcaggtaactaaatcgacgtacgggatggcctaagatgatagagctcctttaccagccagagcgaggggagacaccttttgctaataacgggcaagtaaaagttttaaataataggaagaaaaagaaacgaagggaaagctgacaaaacagagaataaaatggttaaatcctatgtgttttacttctggcatgtgcttagtattcgtttgcctttaatctataacagcttctactgattttacagtatttttacttctatcgattacagctacattactttaaatagttggctttaatccgaaccgaacaacttgatccgaggtttggcggatttcgttgttagtggtacaaaagatggagcccatttctttgcccaagccgatgacgcacttgttgaaagggcagatttagatcccggtcgtgtggacacatgtagagatggtaatgaactctaaattttgcgctataaaatttaataatt

SEQ ID NO: 7261 - DNA, 857 bp, Zea Mays
gttgcagtatcgaggatatactggcagtgacacagtaagtggggccaggaacatatgttgggccaccaatcagtgactaatatggcgatgacgacagtaacgcaagcccgaaccgaagctgggaaagtgggaagttggtgcgcgacggtgacgctgcgggagcgtctcgctggctcgtgggcccagatgaggtagcgagccgtccccgatcccgtctccatgggaagaagaacgtggaaacctgcggggaagtaaacggcggcgacaggcggctgcgcgtcgccgcggcgacatgacgtcagttaggcacccgatcgacaagttgtcgctgcagcgaatccacccacgaagggcagcggcgcgacccagccatgtgcaggtaactaaatcgacgtacgggatggcctaagatgatagagctcctttaccagccagagcgaggggagacaccttttgctaataacgggcaagtaaaagttttaaataataggaagaaaaagaaacgaagggaaagctgacaaaacagagaataaaatggttaaatcctatgtgttttacttctggcatgtgcttagtattcgtttgcctttaatctataacagcttctactgattttacagtatttttacttctatcgattacagctacattactttaaatagttggctttaatccgaaccgaacaacttgatccgaggtttggcggatttcgttgttagtggtacaaaagatggagcccatttctttgcccaagccgatgacgcacttgttgaaagggcagatttagatcccggtcgtgtggacacatgtagagatggtaatgaactctaaattttgcgctataaaatttaataatt

SEQ ID NO: 7262 - DNA, 704 bp, Zea Mays
ccccgatcccgtctccatgggaagaagaacgtggaaacctgcggggaagtaaacggcggcgacaggcggctgcgcgtcgccgcggcgacatgacgtcagttaggcacccgatcgacaagttgtcgctgcagcgaatccacccacgaagggcagcggcgcgacccagaacatactgtgaaaggaagacatacttggcttatgactccagagtcgagcatccattcccatggtatcttaagatcgcggtagttgaatgctgcttctctcaaggcatctgctttcttctcgggccagttggggaattgttttagcactgctctttcatccacaagctaccaagatggacaaggcaggggtgtccgtggtctatctatgaatcaacagctaaaatggctaggcagacaggcaggccgatccgcggggacctcatgcagaaacaaaccaaatgctggctgctctccacgtaacacaggatggatggacagagaatacatgatatattctttttttatgcaacaaggggggacgaacagtctccacctggaggagttaaattgattggtgcacggatacatgatatattctgatgagcaggttttgaacgataagggagcatgctatacaagaaacaaatctcccttggatatcggaaattaatttattgttgacgatccttctccgatgtctgtagtccaataaagaac

SEQ ID NO: 7263 - DNA, 1013 bp, Zea Mays
cccagatgaggtagcgagccgtccccgatcccgtctccatgggaagaagaacgtggaaacctgcggggaagtaaacggcggcgacaggcggctgcgcgtcgccgcggcgacatgacgtcagttaggcacccgatcgacaagttgtcgctgcagcgaatccacccacgaagggcagcggcgcgacccagaacatactgtgaaaggaagacatacttggcttatgactccagagtcgagcatccattcccatggtatcttaaggtccttatatcttccgcttgcactgtcccttactcgctcagtgttatgaataccttgttcaattctacaacaagggaaagcacaattaggtgaatgttgatttcttgatttagtatcgttccgtagaatttaaaagtagaaggtattcagcattttttattctgttaaatacatttcagtcatcttactcacttgtcctgcaatgcctgcatgcgcttgagagccataggtgtggccactctcctgtcatcatggaaggatgatgcttccgactctatgttcttcagatcgcggtagttgaatgctgcttctctcaaggcatctgctttcttctcgggccagttggggaattgttttagcactgctctttcatccacaagctaccaagatggacaaggcaggggtgtccgtggtctatctatgaatcaacagctaaaatggctaggcagacaggcaggccgatccgcggggacctcatgcagaaacaaaccaaatgctggctgctctccacgtaacacaggatggatggacagagaatacatgatatattctttttttatgcaacaaggggggacgaacagtctccacctggaggagttaaattgattggtgcacggatacatgatatattctgatgagcaggttttgaacgataagggagcatgctatacaagaaacaaatctcccttggatatcggaaattaatttattgttgacgatccttctccgatgtctgtagtccaataaagaac

SEQ ID NO: 7264 - DNA, 2072 bp, Zea Mays
gccgcctcctttccctgtcttccgccccaccagaccagaccagaccaccaccctccggctgctacttttgcgcctccaccgcccatccccaaagccccaaccgactgcgcgtcccctctcctcccaaacgcattccatcctctctcctccagtgacagcctccggcgcctcctcgggctgccatccagcccgtgccactgccactgccactgcacttgctgtgccgacccgagctgcggtcgagtgagcaatggagcggcggcggcggcggccaccgaggctgccgctccttgtgttcgtcttagttgccaccacttgccccctcgggagctcaggaccaggagtctgctgcagattggagacagaaacgaagatggcctatttcatctgccacatacacgggctctcacgcacaagagcagatctcatagaaaagttccaacacccgcaccagcaccagagtccgctccagcaccctcaccatccatgtctccaccggacagctcaccgtctccgtcaccacatggttcacacccaatgccacgccaatcaacttcacatcgtcatccatccataacacctccacatttggtcaggcctgggcctaggcaagatggaaatgatcctttggtttatactccagctcattctcggcataaacatttttggacaacctatggtttagttgcagcagggattgcggttttccttttggtatcagcagctagtattctctgcttccgagctaagaaaatgggaaccgtaaggccatgggcgacaggtctaagtggacaattgcagaaagcttttgtaactggtgtaccttcgctgaaacgatcagagctggaaacggcatgcgaggatttcagcaacataattggttctacctctacctgcatgctgtacaagggaactttatctagtggagttgaaatcgcagtggcctcaagcttggtaacatctgcaaaggattggtcgaaagaaaatgaatcgcagtacaggaaaaagataacaaacttgtccaaagtaagtcacaagaattttatgaacttgcttggctactgtgaggaagagcatccctttaccagagtgatggtatttgaatatgctccaaatgggacactttttgagcatctccatgtcagggaagcagagaagcttgactggatggcacggctcaggatatccatgggcattgcttactgtcttgagcacatgcatcagctgcaaacaccagctgcgctgaggaactttgactcgactacagtataccttactgatgacttcgccgcaaagacatggaggacattgtgcgcaagtacggcatggtgttgttggagatattgaccggaagagttccttcctccgaggatgacggaccactggaaaattgggtgtctcgctattttgaaggcgggatgcgtcttgaggagctgattgaccctagcatcggcttcttccccgaggacactgcacgagccctttgtgaggttgtgaggtcctgcatcgatcgggatccaaagaagagaccgcagatgaaagaggtcgcagctcggatgagagagatcaccgcgctagggcctgatggggcaactccgaaggtgtcaccgctctggtgggctgagcttgagattatgacttctgagagctgagttcgacgcatgccagatgatattgtttctcctagtgtgactgagaattctttgagctactactggctgctgctaatcttgtttgtggaagtggtgattaggtagaatttgttatgtgtgcagaattgcatatagggattggtattgtacttgtacatgtcaagaaggtttaacacacaacatactgatacgcaggcattccagccaggtgagcaatagaaagcatgtgtggcttgtttttgctgcaatagctcttttgtcaagcaatcgccactggtattgccttgttctactgaggttgaaattgcaaatccttttggttctatccccagatttgggttggtattgtttagtaagaggtgaaagaacagttcgctttgtgcaaaccacgtcgacgcagctacatgacttgcagaggcg

SEQ ID NO: 7265 - DNA, 3583 bp, Zea Mays
aaaccgacccgcctggccacgagtccacgactgttgtatatgcatctcatcagcttggcctccaagtcgggaggaaggccgaaggggcgacccgcggccgccaccgcgaccgctgcgcgaaccctacccgccactccgatcgccaccgctggggttctcgatatatgcttacgacgaaacgaagagagcggagggagccaaggacggcggtgacgctgtcgtgaagaaggctcggggtgggggaatcggcggtggcggaagagatggtgccgaggtcggatgtgggcggcggtgggagcagcaatgcgagtggggtggtggagatcgacgaggacctgcacagcaggcagctcgctgtgtacggaagggagacaatgcggcagctctttgcctcgaacgtgctcatctccggccttaacgggctaggggccgagatcggttgaatgctggattgcaaaatacagctgggactgttgcatttcatggacatatgggcagaaactgggcacgcaaaaggcaaagaatcttgctctagctggtgttaaatctgttaccctacatgatactggaaatgtggaaatgtgggacctatcaggcaatttctttctatctgaggatgacatcgggaagaacagggctgttgcttgtgttgcaaagcttcaagaacttaacaatgctgttctcatatataccctaacagaagaattgaccactgagcaccttccaaagttccaagtggttgttttcactgacattagtttggacaaggcatttgagttcgatgattattgtcgtaatcagcagcctccaatttcctttatcaagacagaagtccgtggactttttggtagtgtgttttgtgactttgggcctgaattcagtgttcttgatgtcgacggtgaagatgatggtgatcttgttgttttctcagaggtccagggtatgacagaactgaatgatggcaagccaaggacagtaatgtgaaagaacggaagatcttgaagtttaagagtttgagagattcgattagagaacctgggaatttccctctaagtgattgttcaaagtttactcgccctcctctgcttcattttgcatttatagctttggataaatttaggaaagagtttggacgcttccctggtgttgcttgtggtctggatgcccaaaggtttgtggagttcactgcttctatcaatgaagccacaattgattacaagatagaagatgagcttgatgagaatttgttgcggctttttgctagtggttctaaagctgtcctgaacccaatggctactatgtttggtggaattgtcagtcaagaagctgtgaaggcatgttctgggaaatttcatccactgtaccggttcttctactttgattcatccgaatctctgccaactcaccaattggaccctaaagacctgaagccattgaatagtcgctatgatgctcagatttctgtttttggctctaagcttcagaaaaaactgcgggatgccaatgtctttgttgtgggatctggtgctcttggatgtgaatttttaaagaacctagctttaatgggagtgtcttgcagccgtaaagggaaaattactataacagatgatgatgtcatcgagaaaagtaacttgagtcgccaatttctgttccgtgattggaatattggacatcctaaatctacagtagctgccacagctgctagtgctatcaattcctgcctgcacattgatgctctccagaaccgtgcctgtctagagaccgagcatgtgttccatgatgcattctgggagatccttgatgttgtcattaatgcacttgataatgttaatgctaggatgtacatggacatgagatgtttgtacttccagaaaccactcctggaatctggaacactgggtacaaaatgtaacacgcaagtggtaattcctcaccttactgaaaattatgggacttcacgagaccctcctgagaagcaggcacccatgtgcacagtccattcatttccacacaatattgaccattgtctaacatgggcccgctcagagtttgagggtttgctcgagaagactccaaaggaagtcaactcttttctgtctaatcccgctcaatatgctgcctccatgaaaaaggcaggtgatgctcaggccagggagttgcttgagcacgtatgtgaatgccttgagaaggagtgttgtggaacatttgacgattgcataacgtgggcaagactgaaatttgaagattacttctccaatcgtgtgaagcagctaacattcacgtttcctgaagatgctgccactagcatgggagcccatttctggtgtgctccaaagcgtttccctcaccctctggaattttcagctgctgattcatcacacattcagtttataatgtctgcttccatattgagggcattgtcttttggaatctctatacctgattgggcaaaggacactgataatctggctgatgcagtcagtaaagttgcagtacctgaatttaagccaaagagcggggtgaagattgagacagacgtgaaggccgaaaacatctccagtgcctcagttgatgacgctgctgttatcgaagatcttttaagcaggctgaaagcatgtaccaagaaactacctccgagattccaaatgaaacctattcagtttgagaaggatgatgatacaaatttccacatggacttaattgctggtcttgcaaatatgcgtgccaggaactatggcatccaagaggttgacaagctgaaggcaaaaattattgcaggaaggatcatcccagctattgcaacttcaactgccatggcgacaggactagtgtgccttgagctttacaaagttctggccagagggcacccaatcgaagactaccgcaatacatttgctaacctggccctaccgatgctcaccacatctgaacctcttccccccactgtgatcaagcatggagatatgacgtggaccgtatgggatcggtggtctatcgagggagacatcacagttgcagagctcctgaagtggttaagcgacaagggcctgagtgcgtacagtgtctcctgcggcacatcgttgctctacaacataatgttcacaaggcacaaggatcgactgagcaagaagatcagagacgtagccaaggaggtggcaaaggtagacattccagaatacaggaagcatctggatgtcgtcgttgcttgtgaggatgacaacgggaaagatgtcgacatccctcttatctccatttatttccggtaggttgcactgtggaaagagttgaatgggaaaaaagagggtcccgtgaaaaagagatttgggtagattcataagttctgtcaataatattctctctcttgtaactagaaatcggtagcgaagtgatcacagctggagttgcttgtggtgcgtctccttacggttgtgtacgagtgcttggggtcctgctgttgcatgccaactatttgcaggtgtgcaatgtgatgtggatatttttgatgaatgaatcttcggagcttcagaatatatttacgcagcacttcactgcaatcgtcaatgtcagatagcaatttcagtct

SEQ ID NO: 7266 - DNA, 3445 bp, Zea Mays
aaaccgacccgcctggccacgagtccacgactgttgtatatgcatctcatcagcttggcctccaagtcgggaggaaggccgaaggggcgacccgcggccgccaccgcgaccgctgcgcgaaccctacccgccactccgatcgccaccgctggggttctcgatatatgcttacgacgaaacgaagagagcggagggagccaaggacggcggtgacgctgtcgtgaagaaggctcggggtgggggaatcggcggtggcggaagagatggtgccgaggtcggatgtgggcggcggtgggagcagcaatgcgagtggggtggtggagatcgacgaggacctgcacagcaggcagctcgctgtgtacggaagggagacaatgcggcagctctttgcctcgaacgtgctcatctccggccttaacgggctaggggccgagatcgcaaagaatcttgctctagctggtgttaaatctgttaccctacatgatactggaaatgtggaaatgtgggacctatcaggcaatttctttctatctgaggatgacatcgggaagaacagggctgttgcttgtgttgcaaagcttcaagaacttaacaatgctgttctcatatataccctaacagaagaattgaccactgagcaccttccaaagttccaagtggttgttttcactgacattagtttggacaaggcatttgagttcgatgattattgtcgtaatcagcagcctccaatttcctttatcaagacagaagtccgtggactttttggtagtgtgttttgtgactttgggcctgaattcagtgttcttgatgtcgacggtgaagatgatggtgatcttgttgttttctcagaggtccagggtatgacagaactgaatgatggcaagccaaggacagtaatgtgaaagaacggaagatcttgaagtttaagagtttgagagattcgattagagaacctgggaatttccctctaagtgattgttcaaagtttactcgccctcctctgcttcattttgcatttatagctttggataaatttaggaaagagtttggacgcttccctggtgttgcttgtggtctggatgcccaaaggtttgtggagttcactgcttctatcaatgaagccacaattgattacaagatagaagatgagcttgatgagaatttgttgcggctttttgctagtggttctaaagctgtcctgaacccaatggctactatgtttggtggaattgtcagtcaagaagctgtgaaggcatgttctgggaaatttcatccactgtaccggttcttctactttgattcatccgaatctctgccaactcaccaattggaccctaaagacctgaagccattgaatagtcgctatgatgctcagatttctgtttttggctctaagcttcagaaaaaactgcgggatgccaatgtctttgttgtgggatctggtgctcttggatgtgaatttttaaagaacctagctttaatgggagtgtcttgcagccgtaaagggaaaattactataacagatgatgatgtcatcgagaaaagtaacttgagtcgccaatttctgttccgtgattggaatattggacatcctaaatctacagtagctgccacagctgctagtgctatcaattcctgcctgcacattgatgctctccagaaccgtgcctgtctagagaccgagcatgtgttccatgatgcattctgggagatccttgatgttgtcattaatgcacttgataatgttaatgctaggatgtacatggacatgagatgtttgtacttccagaaaccactcctggaatctggaacactgggtacaaaatgtaacacgcaagtggtaattcctcaccttactgaaaattatgggacttcacgagaccctcctgagaagcaggcacccatgtgcacagtccattcatttccacacaatattgaccattgtctaacatgggcccgctcagagtttgagggtttgctcgagaagactccaaaggaagtcaactcttttctgtctaatcccgctcaatatgctgcctccatgaaaaaggcaggtgatgctcaggccagggagttgcttgagcacgtatgtgaatgccttgagaaggagtgttgtggaacatttgacgattgcataacgtgggcaagactgaaatttgaagattacttctccaatcgtgtgaagcagctaacattcacgtttcctgaagatgctgccactagcatgggagcccatttctggtgtgctccaaagcgtttccctcaccctctggaattttcagctgctgattcatcacacattcagtttataatgtctgcttccatattgagggcattgtcttttggaatctctatacctgattgggcaaaggacactgataatctggctgatgcagtcagtaaagttgcagtacctgaatttaagccaaagagcggggtgaagattgagacagacgtgaaggccgaaaacatctccagtgcctcagttgatgacgctgctgttatcgaagatcttttaagcaggctgaaagcatgtaccaagaaactacctccgagattccaaatgaaacctattcagtttgagaaggaactatggcatccaagaggttgacaagctgaaggcaaaaattattgcaggaaggatcatcccagctattgcaacttcaactgccatggcgacaggactagtgtgccttgagctttacaaagttctggccagagggcacccaatcgaagactaccgcaatacatttgctaacctggccctaccgatgctcaccacatctgaacctcttccccccactgtgatcaagcatggagatatgacgtggaccgtatgggatcggtggtctatcgagggagacatcacagttgcagagctcctgaagtggttaagcgacaagggcctgagtgcgtacagtgtctcctgcggcacatcgttgctctacaacataatgttcacaaggcacaaggatcgactgagcaagaagatcagagacgtagccaaggaggtggcaaaggtagacattccagaatacaggaagcatctggatgtcgtcgttgcttgtgaggatgacaacgggaaagatgtcgacatccctcttatctccatttatttccggtaggttgcactgtggaaagagttgaatgggaaaaaagagggtcccgtgaaaaagagatttgggtagattcataagttctgtcaataatattctctctcttgtaactagaaatcggtagcgaagtgatcacagctggagttgcttgtggtgcgtctccttacggttgtgtacgagtgcttggggtcctgctgttgcatgccaactatttgcaggtgtgcaatgtgatgtggatatttttgatgaatgaatcttcggagcttcagaatatatttacgcagcacttcactgcaatcgtcaatgtcagatagcaatttcagtct

SEQ ID NO: 7267 - DNA, 4111 bp, Zea Mays
aaaccgacccgcctggccacgagtccacgactgttgtatatgcatctcatcagcttggcctccaagtcgggaggaaggccgaaggggcgacccgcggccgccaccgcgaccgctgcgcgaaccctacccgccactccgatcgccaccgctggggttctcgatatatgcttacgacgaaacgaagagagcggagggagccaaggacggcggtgacgctgtcgtgaagaaggctcggggtgggggaatcggcggtggcggaagagatggtgccgaggtcggatgtgggcggcggtgggagcagcaatgcgagtggggtggtggagatcgacgaggacctgcacagcaggcagctcgctgtgtacggaagggagacaatgcggcagctctttgcctcgaacgtgctcatctccggccttaacgggctaggggccgagatcggttgaatgctggattgcaaaatacagctgggactgttgcatttcatggacatatgggcagaaactgggcacgcaaaagggttcacagccttagacatttatgcttcaatgtttattttgttatgaggtgtttgatttgaggaataagctaatctatcatcttctcactcctcacttttttttatttagtttgtggaatgaattgagttgattcatcaccacctcattcctcatagttagttagtactaacatgagtaatgaggccatcccactaaatttgagaaataagttcatgatgcactatctcatcttggatggagtgattcatcaaaccaaacaccccttaaagtttctggtgaattagaaatgcaaatggtgcggccatcttttcgatttttatatacatattttgtttaatattctgttgaatggctgtcctcattataagacatatggtggagtagtgtaactgtgcaagtcactgcctctcacttgtttacctgtatagttattacaattcggatcaatactcataatgtttttcctttactattggtccagccagtaattaattgttttgttagataactaccattgtatttaccatgaatgtattataagcattatcttggtgagaccttttgaactaatatttcctttcaacagcaaagaatcttgctctagctggtgttaaatctgttaccctacatgatactggaaatgtggaaatgtgggacctatcaggcaatttctttctatctgaggatgacatcgggaagaacagggctgttgcttgtgttgcaaagcttcaagaacttaacaatgctgttctcatatataccctaacagaagaattgaccactgagcaccttccaaagttccaagtggttgttttcactgacattagtttggacaaggcatttgagttcgatgattattgtcgtaatcagcagcctccaatttcctttatcaagacagaagtccgtggactttttggatggtgatcttgttgttttctcagaggtccagggtatgacagaactgaatgatggcaagccaaggacagtaatgtgaaagaacggaagatcttgaagtttaagagtttgagagattcgattagagaacctgggaatttccctctaagtgattgttcaaagtttactcgccctcctctgcttcattttgcatttatagctttggataaatttaggaaagagtttggacgcttccctggtgttgcttgtggtctggatgcccaaaggtttgtggagttcactgcttctatcaatgaagccacaattgattacaagatagaagatgagcttgatgagaatttgttgcggctttttgctagtggttctaaagctgtcctgaacccaatggctactatgtttggtggaattgtcagtcaagaagctgtgaaggcatgttctgggaaatttcatccactgtaccggttcttctactttgattcatccgaatctctgccaactcaccaattggaccctaaagacctgaagccattgaatagtcgctatgatgctcagatttctgtttttggctctaagcttcagaaaaaactgcgggatgccaatgtctttgttgtgggatctggtgctcttggatgtgaatttttaaagaacctagctttaatgggagtgtcttgcagccgtaaagggaaaattactataacagatgatgatgtcatcgagaaaagtaacttgagtcgccaatttctgttccgtgattggaatattggacatcctaaatctacagtagctgccacagctgctagtgctatcaattcctgcctgcacattgatgctctccagaaccgtgcctgtctagagaccgagcatgtgttccatgatgcattctgggagatccttgatgttgtcattaatgcacttgataatgttaatgctaggatgtacatggacatgagatgtttgtacttccagaaaccactcctggaatctggaacactgggtacaaaatgtaacacgcaagtggtaattcctcaccttactgaaaattatgggacttcacgagaccctcctgagaagcaggcacccatgtgcacagtccattcatttccacacaatattgaccattgtctaacatgggcccgctcagagtttgagggtttgctcgagaagactccaaaggaagtcaactcttttctgtctaatcccgctcaatatgctgcctccatgaaaaaggcaggtgatgctcaggccagggagttgcttgagcacgtatgtgaatgccttgagaaggagtgttgtggaacatttgacgattgcataacgtgggcaagactgaaatttgaagattacttctccaatcgtgtgaagcagctaacattcacgtttcctgaagatgctgccactagcatgggagcccatttctggtgtgctccaaagcgtttccctcaccctctggaattttcagctgctgattcatcacacattcagtttataatgtctgcttccatattgagggcattgtcttttggaatctctatacctgattgggcaaaggacactgataatctggctgatgcagtcagtaaagttgcagtacctgaatttaagccaaagagcggggtgaagattgagacagacgtgaaggccgaaaacatctccagtgcctcagttgatgacgctgctgttatcgaagatcttttaagcaggctgaaagcatgtaccaagaaactacctccgagattccaaatgaaacctattcagtttgagaaggatgatgatacaaatttccacatggacttaattgctggtcttgcaaatatgcgtgccaggaactatggcatccaagaggttgacaagctgaaggcaaaaattattgcaggaaggatcatcccagctattgcaacttcaactgccatggcgacaggactagtgtgccttgagctttacaaagttctggccagagggcacccaatcgaagactaccgcaatacatttgctaacctggccctaccgatgctcaccacatctgaacctcttccccccactgtgatcaagcatggagatatgacgtggaccgtatgggatcggtggtctatcgagggagacatcacagttgcagagctcctgaagtggttaagcgacaagggcctgagtgcgtacagtgtctcctgcggcacatcgttgctctacaacataatgttcacaaggcacaaggatcgactgagcaagaagatcagagacgtagccaaggaggtggcaaaggtagacattccagaatacaggaagcatctggatgtcgtcgttgcttgtgaggatgacaacgggaaagatgtcgacatccctcttatctccatttatttccggtaggttgcactgtggaaagagttgaatgggaaaaaagagggtcccgtgaaaaagagatttgggtagattcataagttctgtcaataatattctctctcttgtaactagaaatcggtagcgaagtgatcacagctggagttgcttgtggtgcgtctccttacggttgtgtacgagtgcttggggtcctgctgttgcatgccaactatttgcaggtgtgcaatgtgatgtggatatttttgatgaatgaatcttcggagcttcagaatatatttacgcagcacttcactgcaatcgtcaatgtcagatagcaatttcagtct

SEQ ID NO: 7268 - DNA, 2804 bp, Zea Mays
aaaccgacccgcctggccacgagtccacgactgttgtatatgcatctcatcagcttggcctccaagtcgggaggaaggccgaaggggcgacccgcggccgccaccgcgaccgctgcgcgaaccctacccgccactccgatcgccaccgctggggttctcgatatatgcttacgacgaaacgaagagagcggagggagccaaggacggcggtgacgctgtcgtgaagaaggctcggggtgggggaatcggcggtggcggaagagatggtgccgaggtcggatgtgggcggcggtgggagcagcaatgcgagtggggtggtggagatcgacgaggacctgcacagcaggcagctcgctgtgtacggaagggagacaatgcggcagctctttgcctcgaacgtgctcatctccggccttaacgggctaggggccgagatcgcaaagaatcttgctctagctggtgttaaatctgttaccctacatgatactggaaatgtggaaatgtgggacctatcaggcaatttctttctatctgaggatgacatcgggaagaacagggctgttgcttgtgttgcaaagcttcaagaacttaacaatgctgttctcatatataccctaacagaagaattgaccactgagcaccttccaaagttccaagtggttgttttcactgacattagtttggacaaggcatttgagttcgatgattattgtcgtaatcagcagcctccaatttcctttatcaagacagaagtccgtggactttttggtagtgtgttttgtgactttgggcctgaattcagtgttcttgatgtcgacggtgaagatgcacgtactggcataattgcatccatctccatcaccactgacaatcgtacaatggtgtcctgtgttgatgatgagcgccttgattttcaggatggtgatcttgttgttttctcagaggtccagggtatgacagaactgaatgatggcaagccaaggacagtaatgtgcgcaggaccattttccttttgcatcgaggatacaagtaactttggcacttatacaaaaggtggaattgttacacaggtgaaagaacggaagatcttgaagtttaagagtttgagagattcgattagagaacctgggaatttccctctaagtgattgttcaaagtttactcgccctcctctgcttcattttgcatttatagctttggataaatttaggaaagagtttggacgcttccctggtgttgcttgtggtctggatgcccaaaggtttgtggagttcactgcttctatcaatgaagccacaattgattacaagatagaagatgagcttgatgagaatttgttgcggctttttgctagtggttctaaagctgtcctgaacccaatggctactatgtttggtggaattgtcagtcaagaagctgtgaaggcatgttctgggaaatttcatccactgtaccggatttgaagattacttctccaatcgtgtgaagcagctaacattcacgtttcctgaagatgctgccactagcatgggagcccatttctggtgtgctccaaagcgtttccctcaccctctggaattttcagctgctgattcatcacacattcagtttataatgtctgcttccatattgagggcattgtcttttggaatctctatacctgattgggcaaaggacactgataatctggctgatgcagtcagtaaagttgcagtacctgaatttaagccaaagagcggggtgaagattgagacagacgtgaaggccgaaaacatctccagtgcctcagttgatgacgctgctgttatcgaagatcttttaagcaggctgaaagcatgtaccaagaaactacctccgagattccaaatgaaacctattcagtttgagaaggatgatgatacaaatttccacatggacttaattgctggtcttgcaaatatgcgtgccaggaactatggcatccaagaggttgacaagctgaaggcaaaaattattgcaggaaggatcatcccagctattgcaacttcaactgccatggcgacaggactagtgtgccttgagctttacaaagttctggccagagggcacccaatcgaagactaccgcaatacatttgctaacctggccctaccgatgctcaccacatctgaacctcttccccccactgtgatcaagcatggagatatgacgtggaccgtatgggatcggtggtctatcgagggagacatcacagttgcagagctcctgaagtggttaagcgacaagggcctgagtgcgtacagtgtctcctgcggcacatcgttgctctacaacataatgttcacaaggcacaaggatcgactgagcaagaagatcagagacgtagccaaggaggtggcaaaggtagacattccagaatacaggaagcatctggatgtcgtcgttgcttgtgaggatgacaacgggaaagatgtcgacatccctcttatctccatttatttccggtaggttgcactgtggaaagagttgaatgggaaaaaagagggtcccgtgaaaaagagatttgggtagattcataagttctgtcaataatattctctctcttgtaactagaaatcggtagcgaagtgatcacagctggagttgcttgtggtgcgtctccttacggttgtgtacgagtgcttggggtcctgctgttgcatgccaactatttgcaggtgtgcaatgtgatgtggatatttttgatgaatgaatcttcggagcttcagaatatatttacgcagcacttcactgcaatcgtcaatgtcagatagcaatttcagtct

SEQ ID NO: 7269 - DNA, 4280 bp, Zea Mays
aaaccgacccgcctggccacgagtccacgactgttgtatatgcatctcatcagcttggcctccaagtcgggaggaaggccgaaggggcgacccgcggccgccaccgcgaccgctgcgcgaaccctacccgccactccgatcgccaccgctggggttctcgatatatgcttacgacgaaacgaagagagcggagggagccaaggacggcggtgacgctgtcgtgaagaaggctcggggtgggggaatcggcggtggcggaagagatggtgccgaggtcggatgtgggcggcggtgggagcagcaatgcgagtggggtggtggagatcgacgaggacctgcacagcaggcagctcgctgtgtacggaagggagacaatgcggcagctctttgcctcgaacgtgctcatctccggccttaacgggctaggggccgagatcggttgaatgctggattgcaaaatacagctgggactgttgcatttcatggacatatgggcagaaactgggcacgcaaaagggttcacagccttagacatttatgcttcaatgtttattttgttatgaggtgtttgatttgaggaataagctaatctatcatcttctcactcctcacttttttttatttagtttgtggaatgaattgagttgattcatcaccacctcattcctcatagttagttagtactaacatgagtaatgaggccatcccactaaatttgagaaataagttcatgatgcactatctcatcttggatggagtgattcatcaaaccaaacaccccttaaagtttctggtgaattagaaatgcaaatggtgcggccatcttttcgatttttatatacatattttgtttaatattctgttgaatggctgtcctcattataagacatatggtggagtagtgtaactgtgcaagtcactgcctctcacttgtttacctgtatagttattacaattcggatcaatactcataatgtttttcctttactattggtccagccagtaattaattgttttgttagataactaccattgtatttaccatgaatgtattataagcattatcttggtgagaccttttgaactaatatttcctttcaacagcaaagaatcttgctctagctggtgttaaatctgttaccctacatgatactggaaatgtggaaatgtgggacctatcaggcaatttctttctatctgaggatgacatcgggaagaacagggctgttgcttgtgttgcaaagcttcaagaacttaacaatgctgttctcatatataccctaacagaagaattgaccactgagcaccttccaaagttccaagtggttgttttcactgacattagtttggacaaggcatttgagttcgatgattattgtcgtaatcagcagcctccaatttcctttatcaagacagaagtccgtggactttttggtagtgtgttttgtgactttgggcctgaattcagtgttcttgatgtcgacggtgaagatgcacgtactggcataattgcatccatctccatcaccactgacaatcgtacaatggtgtcctgtgttgatgatgagcgccttgattttcaggatggtgatcttgttgttttctcagaggtccagggtatgacagaactgaatgatggcaagccaaggacagtaatgtgcgcaggaccattttccttttgcatcgaggatacaagtaactttggcacttatacaaaaggtggaattgttacacaggtgaaagaacggaagatcttgaagtttaagagtttgagagattcgattagagaacctgggaatttccctctaagtgattgttcaaagtttactcgccctcctctgcttcattttgcatttatagctttggataaatttaggaaagagtttggacgcttccctggtgttgcttgtggtctggatgcccaaaggtttgtggagttcactgcttctatcaatgaagccacaattgattacaagatagaagatgagcttgatgagaatttgttgcggctttttgctagtggttctaaagctgtcctgaacccaatggctactatgtttggtggaattgtcagtcaagaagctgtgaaggcatgttctgggaaatttcatccactgtaccggttcttctactttgattcatccgaatctctgccaactcaccaattggaccctaaagacctgaagccattgaatagtcgctatgatgctcagatttctgtttttggctctaagcttcagaaaaaactgcgggatgccaatgtctttgttgtgggatctggtgctcttggatgtgaatttttaaagaacctagctttaatgggagtgtcttgcagccgtaaagggaaaattactataacagatgatgatgtcatcgagaaaagtaacttgagtcgccaatttctgttccgtgattggaatattggacatcctaaatctacagtagctgccacagctgctagtgctatcaattcctgcctgcacattgatgctctccagaaccgtgcctgtctagagaccgagcatgtgttccatgatgcattctgggagatccttgatgttgtcattaatgcacttgataatgttaatgctaggatgtacatggacatgagatgtttgtacttccagaaaccactcctggaatctggaacactgggtacaaaatgtaacacgcaagtggtaattcctcaccttactgaaaattatgggacttcacgagaccctcctgagaagcaggcacccatgtgcacagtccattcatttccacacaatattgaccattgtctaacatgggcccgctcagagtttgagggtttgctcgagaagactccaaaggaagtcaactcttttctgtctaatcccgctcaatatgctgcctccatgaaaaaggcaggtgatgctcaggccagggagttgcttgagcacgtatgtgaatgccttgagaaggagtgttgtggaacatttgacgattgcataacgtgggcaagactgaaatttgaagattacttctccaatcgtgtgaagcagctaacattcacgtttcctgaagatgctgccactagcatgggagcccatttctggtgtgctccaaagcgtttccctcaccctctggaattttcagctgctgattcatcacacattcagtttataatgtctgcttccatattgagggcattgtcttttggaatctctatacctgattgggcaaaggacactgataatctggctgatgcagtcagtaaagttgcagtacctgaatttaagccaaagagcggggtgaagattgagacagacgtgaaggccgaaaacatctccagtgcctcagttgatgacgctgctgttatcgaagatcttttaagcaggctgaaagcatgtaccaagaaactacctccgagattccaaatgaaacctattcagtttgagaaggaactatggcatccaagaggttgacaagctgaaggcaaaaattattgcaggaaggatcatcccagctattgcaacttcaactgccatggcgacaggactagtgtgccttgagctttacaaagttctggccagagggcacccaatcgaagactaccgcaatacatttgctaacctggccctaccgatgctcaccacatctgaacctcttccccccactgtgatcaagcatggagatatgacgtggaccgtatgggatcggtggtctatcgagggagacatcacagttgcagagctcctgaagtggttaagcgacaagggcctgagtgcgtacagtgtctcctgcggcacatcgttgctctacaacataatgttcacaaggcacaaggatcgactgagcaagaagatcagagacgtagccaaggaggtggcaaaggtagacattccagaatacaggaagcatctggatgtcgtcgttgcttgtgaggatgacaacgggaaagatgtcgacatccctcttatctccatttatttccggtaggttgcactgtggaaagagttgaatgggaaaaaagagggtcccgtgaaaaagagatttgggtagattcataagttctgtcaataatattctctctcttgtaactagaaatcggtagcgaagtgatcacagctggagttgcttgtggtgcgtctccttacggttgtgtacgagtgcttggggtcctgctgttgcatgccaactatttgcaggtgtgcaatgtgatgtggatatttttgatgaatgaatcttcggagcttcagaatatatttacgcagcacttcactgcaatcgtcaatgtcagatagcaatttcagtct

SEQ ID NO: 7270 - DNA, 3910 bp, Zea Mays
aaaccgacccgcctggccacgagtccacgactgttgtatatgcatctcatcagcttggcctccaagtcgggaggaaggccgaaggggcgacccgcggccgccaccgcgaccgctgcgcgaaccctacccgccactccgatcgccaccgctggggttctcgatatatgcttacgacgaaacgaagagagcggagggagccaaggacggcggtgacgctgtcgtgaagaaggctcggggtgggggaatcggcggtggcggaagagatggtgccgaggtcggatgtgggcggcggtgggagcagcaatgcgagtggggtggtggagatcgacgaggacctgcacagcaggcagctcgctgtgtacggaagggagacaatgcggcagctctttgcctcgaacgtgctcatctccggccttaacgggctaggggccgagatcggttgaatgctggattgcaaaatacagctgggactgttgcatttcatggacatatgggcagaaactgggcacgcaaaagggttcacagccttagacatttatgcttcaatgtttattttgttatgaggtgtttgatttgaggaataagctaatctatcatcttctcactcctcacttttttttatttagtttgtggaatgaattgagttgattcatcaccacctcattcctcatagttagttagtactaacatgagtaatgaggccatcccactaaatttgagaaataagttcatgatgcactatctcatcttggatggagtgattcatcaaaccaaacaccccttaaagtttctggtgaattagaaatgcaaatgcaaagaatcttgctctagctggtgttaaatctgttaccctacatgatactggaaatgtggaaatgtgggacctatcaggcaatttctttctatctgaggatgacatcgggaagaacagggctgttgcttgtgttgcaaagcttcaagaacttaacaatgctgttctcatatataccctaacagaagaattgaccactgagcaccttccaaagttccaagtggttgttttcactgacattagtttggacaaggcatttgagttcgatgattattgtcgtaatcagcagcctccaatttcctttatcaagacagaagtccgtggactttttggtagtgtgttttgtgactttgggcctgaattcagtgttcttgatgtcgacggtgaagatgcacgtactggcataattgcatccatctccatcaccactgacaatcgtacaatggtgtcctgtgttgatgatgagcgccttgattttcaggatggtgatcttgttgttttctcagaggtccagggtatgacagaactgaatgatggcaagccaaggacagtaatgtgaaagaacggaagatcttgaagtttaagagtttgagagattcgattagagaacctgggaatttccctctaagtgattgttcaaagtttactcgccctcctctgcttcattttgcatttatagctttggataaatttaggaaagagtttggacgcttccctggtgttgcttgtggtctggatgcccaaaggtttgtggagttcactgcttctatcaatgaagccacaattgattacaagatagaagatgagcttgatgagaatttgttgcggctttttgctagtggttctaaagctgtcctgaacccaatggctactatgtttggtggaattgtcagtcaagaagctgtgaaggcatgttctgggaaatttcatccactgtaccggttcttctactttgattcatccgaatctctgccaactcaccaattggaccctaaagacctgaagccattgaatagtcgctatgatgctcagatttctgtttttggctctaagcttcagaaaaaactgcgggatgccaatgtctttgttgtgggatctggtgctcttggatgtgaatttttaaagaacctagctttaatgggagtgtcttgcagccgtaaagggaaaattactataacagatgatgatgtcatcgagaaaagtaacttgagtcgccaatttctgttccgtgattggaatattggacatcctaaatctacagtagctgccacagctgctagtgctatcaattcctgcctgcacattgatgctctccagaaccgtgcctgtctagagaccgagcatgtgttccatgatgcattctgggagatccttgatgttgtcattaatgcacttgataatgttaatgctaggatgtacatggacatgagatgtttgtacttccagaaaccactcctggaatctggaacactgggtacaaaatgtaacacgcaagtggtaattcctcaccttactgaaaattatgggacttcacgagaccctcctgagaagcaggcacccatgtgcacagtccattcatttccacacaatattgaccattgtctaacatgggcccgctcagagtttgagggtttgctcgagaagactccaaaggaagtcaactcttttctgtctaatcccgctcaatatgctgcctccatgaaaaaggcaggtgatgctcaggccagggagttgcttgagcacgtatgtgaatgccttgagaaggagtgttgtggaacatttgacgattgcataacgtgggcaagactgaaatttgaagattacttctccaatcgtgtgaagcagctaacattcacgtttcctgaagatgctgccactagcatgggagcccatttctggtgtgctccaaagcgtttccctcaccctctggaattttcagctgctgattcatcacacattcagtttataatgtctgcttccatattgagggcattgtcttttggaatctctatacctgattgggcaaaggacactgataatctggctgatgcagtcagtaaagttgcagtacctgaatttaagccaaagagcggggtgaagattgagacagacgtgaaggccgaaaacatctccagtgcctcagttgatgacgctgctgttatcgaagatcttttaagcaggctgaaagcatgtaccaagaaactacctccgagattccaaatgaaacctattcagtttgagaaggaactatggcatccaagaggttgacaagctgaaggcaaaaattattgcaggaaggatcatcccagctattgcaacttcaactgccatggcgacaggactagtgtgccttgagctttacaaagttctggccagagggcacccaatcgaagactaccgcaatacatttgctaacctggccctaccgatgctcaccacatctgaacctcttccccccactgtgatcaagcatggagatatgacgtggaccgtatgggatcggtggtctatcgagggagacatcacagttgcagagctcctgaagtggttaagcgacaagggcctgagtgcgtacagtgtctcctgcggcacatcgttgctctacaacataatgttcacaaggcacaaggatcgactgagcaagaagatcagagacgtagccaaggaggtggcaaaggtagacattccagaatacaggaagcatctggatgtcgtcgttgcttgtgaggatgacaacgggaaagatgtcgacatccctcttatctccatttatttccggtaggttgcactgtggaaagagttgaatgggaaaaaagagggtcccgtgaaaaagagatttgggtagattcataagttctgtcaataatattctctctcttgtaactagaaatcggtagcgaagtgatcacagctggagttgcttgtggtgcgtctccttacggttgtgtacgagtgcttggggtcctgctgttgcatgccaactatttgcaggtgtgcaatgtgatgtggatatttttgatgaatgaatcttcggagcttcagaatatatttacgcagcacttcactgcaatcgtcaatgtcagatagcaatttcagtct

SEQ ID NO: 7271 - DNA, 4284 bp, Zea Mays
aaaccgacccgcctggccacgagtccacgactgttgtatatgcatctcatcagcttggcctccaagtcgggaggaaggccgaaggggcgacccgcggccgccaccgcgaccgctgcgcgaaccctacccgccactccgatcgccaccgctggggttctcgatatatgcttacgacgaaacgaagagagcggagggagccaaggacggcggtgacgctgtcgtgaagaaggctcggggtgggggaatcggcggtggcggaagagatggtgccgaggtcggatgtgggcggcggtgggagcagcaatgcgagtggggtggtggagatcgacgaggacctgcacagcaggcagctcgctgtgtacggaagggagacaatgcggcagctctttgcctcgaacgtgctcatctccggccttaacgggctaggggccgagatcggttgaatgctggattgcaaaatacagctgggactgttgcatttcatggacatatgggcagaaactgggcacgcaaaagggttcacagccttagacatttatgcttcaatgtttattttgttatgaggtgtttgatttgaggaataagctaatctatcatcttctcactcctcacttttttttatttagtttgtggaatgaattgagttgattcatcaccacctcattcctcatagttagttagtactaacatgagtaatgaggccatcccactaaatttgagaaataagttcatgatgcactatctcatcttggatggagtgattcatcaaaccaaacaccccttaaagtttctggtgaattagaaatgcaaatggtgcggccatcttttcgatttttatatacatattttgtttaatattctgttgaatggctgtcctcattataagacatatggtggagtagtgtaactgtgcaagtcactgcctctcacttgtttacctgtatagttattacaattcggatcaatactcataatgtttttcctttactattggtccagccagtaattaattgttttgttagataactaccattgtatttaccatgaatgtattataagcattatcttggtgagaccttttgaactaatatttcctttcaacagcaaagaatcttgctctagctggtgttaaatctgttaccctacatgatactggaaatgtggaaatgtgggacctatcaggcaatttctttctatctgaggatgacatcgggaagaacagggctgttgcttgtgttgcaaagcttcaagaacttaacaatgctgttctcatatataccctaacagaagaattgaccactgagcaccttccaaagttccaagtggttgttttcactgacattagtttggacaaggcatttgagttcgatgattattgtcgtaatcagcagcctccaatttcctttatcaagacagaagtccgtggactttttggtagtgtgttttgtgactttgggcctgaattcagtgttcttgatgtcgacggtgaagatgcacgtactggcataattgcatccatctccatcaccactgacaatcgtacaatggtgtcctgtgttgatgatgagcgccttgattttcaggatggtgatcttgttgttttctcagaggtccagggtatgacagaactgaatgatggcaagccaaggacagtaatgtgcgcaggaccattttccttttgcatcgaggatacaagtaactttggcacttatacaaaaggtggaattgttacacaggtgaaagaacggaagatcttgaagtttaagagtttgagagattcgattagagaacctgggaatttccctctaagtgattgttcaaagtttactcgccctcctctgcttcattttgcatttatagctttggataaatttaggaaagagtttggacgcttccctggtgttgcttgtggtctggatgcccaaaggtttgtggagttcactgcttctatcaatgaagccacaattgattacaagatagaagatgagcttgatgagaatttgttgcggctttttgctagtggttctaaagctgtcctgaacccaatggctactatgtttggtggaattgtcagtcaagaagctgtgaaggcatgttctgggaaatttcatccactgtaccggacctgaagccattgaatagtcgctatgatgctcagatttctgtttttggctctaagcttcagaaaaaactgcgggatgccaatgtctttgttgtgggatctggtgctcttggatgtgaatttttaaagaacctagctttaatgggagtgtcttgcagccgtaaagggaaaattactataacagatgatgatgtcatcgagaaaagtaacttgagtcgccaatttctgttccgtgattggaatattggacatcctaaatctacagtagctgccacagctgctagtgctatcaattcctgcctgcacattgatgctctccagaaccgtgcctgtctagagaccgagcatgtgttccatgatgcattctgggagatccttgatgttgtcattaatgcacttgataatgttaatgctaggatgtacatggacatgagatgtttgtacttccagaaaccactcctggaatctggaacactgggtacaaaatgtaacacgcaagtggtaattcctcaccttactgaaaattatgggacttcacgagaccctcctgagaagcaggcacccatgtgcacagtccattcatttccacacaatattgaccattgtctaacatgggcccgctcagagtttgagggtttgctcgagaagactccaaaggaagtcaactcttttctgtctaatcccgctcaatatgctgcctccatgaaaaaggcaggtgatgctcaggccagggagttgcttgagcacgtatgtgaatgccttgagaaggagtgttgtggaacatttgacgattgcataacgtgggcaagactgaaatttgaagattacttctccaatcgtgtgaagcagctaacattcacgtttcctgaagatgctgccactagcatgggagcccatttctggtgtgctccaaagcgtttccctcaccctctggaattttcagctgctgattcatcacacattcagtttataatgtctgcttccatattgagggcattgtcttttggaatctctatacctgattgggcaaaggacactgataatctggctgatgcagtcagtaaagttgcagtacctgaatttaagccaaagagcggggtgaagattgagacagacgtgaaggccgaaaacatctccagtgcctcagttgatgacgctgctgttatcgaagatcttttaagcaggctgaaagcatgtaccaagaaactacctccgagattccaaatgaaacctattcagtttgagaaggatgatgatacaaatttccacatggacttaattgctggtcttgcaaatatgcgtgccaggaactatggcatccaagaggttgacaagctgaaggcaaaaattattgcaggaaggatcatcccagctattgcaacttcaactgccatggcgacaggactagtgtgccttgagctttacaaagttctggccagagggcacccaatcgaagactaccgcaatacatttgctaacctggccctaccgatgctcaccacatctgaacctcttccccccactgtgatcaagcatggagatatgacgtggaccgtatgggatcggtggtctatcgagggagacatcacagttgcagagctcctgaagtggttaagcgacaagggcctgagtgcgtacagtgtctcctgcggcacatcgttgctctacaacataatgttcacaaggcacaaggatcgactgagcaagaagatcagagacgtagccaaggaggtggcaaaggtagacattccagaatacaggaagcatctggatgtcgtcgttgcttgtgaggatgacaacgggaaagatgtcgacatccctcttatctccatttatttccggtaggttgcactgtggaaagagttgaatgggaaaaaagagggtcccgtgaaaaagagatttgggtagattcataagttctgtcaataatattctctctcttgtaactagaaatcggtagcgaagtgatcacagctggagttgcttgtggtgcgtctccttacggttgtgtacgagtgcttggggtcctgctgttgcatgccaactatttgcaggtgtgcaatgtgatgtggatatttttgatgaatgaatcttcggagcttcagaatatatttacgcagcacttcactgcaatcgtcaatgtcagatagcaatttcagtct

SEQ ID NO: 7272 - DNA, 3445 bp, Zea Mays
aaaccgacccgcctggccacgagtccacgactgttgtatatgcatctcatcagcttggcctccaagtcgggaggaaggccgaaggggcgacccgcggccgccaccgcgaccgctgcgcgaaccctacccgccactccgatcgccaccgctggggttctcgatatatgcttacgacgaaacgaagagagcggagggagccaaggacggcggtgacgctgtcgtgaagaaggctcggggtgggggaatcggcggtggcggaagagatggtgccgaggtcggatgtgggcggcggtgggagcagcaatgcgagtggggtggtggagatcgacgaggacctgcacagcaggcagctcgctgtgtacggaagggagacaatgcggcagctctttgcctcgaacgtgctcatctccggccttaacgggctaggggccgagatcgcaaagaatcttgctctagctggtgttaaatctgttaccctacatgatactggaaatgtggaaatgtgggacctatcaggcaatttctttctatctgaggatgacatcgggaagaacagggctgttgcttgtgttgcaaagcttcaagaacttaacaatgctgttctcatatataccctaacagaagaattgaccactgagcaccttccaaagttccaagtggttgttttcactgacattagtttggacaaggcatttgagttcgatgattattgtcgtaatcagcagcctccaatttcctttatcaagacagaagtccgtggactttttggatggtgatcttgttgttttctcagaggtccagggtatgacagaactgaatgatggcaagccaaggacagtaatgtgaaagaacggaagatcttgaagtttaagagtttgagagattcgattagagaacctgggaatttccctctaagtgattgttcaaagtttactcgccctcctctgcttcattttgcatttatagctttggataaatttaggaaagagtttggacgcttccctggtgttgcttgtggtctggatgcccaaaggtttgtggagttcactgcttctatcaatgaagccacaattgattacaagatagaagatgagcttgatgagaatttgttgcggctttttgctagtggttctaaagctgtcctgaacccaatggctactatgtttggtggaattgtcagtcaagaagctgtgaaggcatgttctgggaaatttcatccactgtaccggttcttctactttgattcatccgaatctctgccaactcaccaattggaccctaaagacctgaagccattgaatagtcgctatgatgctcagatttctgtttttggctctaagcttcagaaaaaactgcgggatgccaatgtctttgttgtgggatctggtgctcttggatgtgaatttttaaagaacctagctttaatgggagtgtcttgcagccgtaaagggaaaattactataacagatgatgatgtcatcgagaaaagtaacttgagtcgccaatttctgttccgtgattggaatattggacatcctaaatctacagtagctgccacagctgctagtgctatcaattcctgcctgcacattgatgctctccagaaccgtgcctgtctagagaccgagcatgtgttccatgatgcattctgggagatccttgatgttgtcattaatgcacttgataatgttaatgctaggatgtacatggacatgagatgtttgtacttccagaaaccactcctggaatctggaacactgggtacaaaatgtaacacgcaagtggtaattcctcaccttactgaaaattatgggacttcacgagaccctcctgagaagcaggcacccatgtgcacagtccattcatttccacacaatattgaccattgtctaacatgggcccgctcagagtttgagggtttgctcgagaagactccaaaggaagtcaactcttttctgtctaatcccgctcaatatgctgcctccatgaaaaaggcaggtgatgctcaggccagggagttgcttgagcacgtatgtgaatgccttgagaaggagtgttgtggaacatttgacgattgcataacgtgggcaagactgaaatttgaagattacttctccaatcgtgtgaagcagctaacattcacgtttcctgaagatgctgccactagcatgggagcccatttctggtgtgctccaaagcgtttccctcaccctctggaattttcagctgctgattcatcacacattcagtttataatgtctgcttccatattgagggcattgtcttttggaatctctatacctgattgggcaaaggacactgataatctggctgatgcagtcagtaaagttgcagtacctgaatttaagccaaagagcggggtgaagattgagacagacgtgaaggccgaaaacatctccagtgcctcagttgatgacgctgctgttatcgaagatcttttaagcaggctgaaagcatgtaccaagaaactacctccgagattccaaatgaaacctattcagtttgagaaggatgatgatacaaatttccacatggacttaattgctggtcttgcaaatatgcgtgccaggaactatggcatccaagaggttgacaagctgaaggcaaaaattattgcaggaaggatcatcccagctattgcaacttcaactgccatggcgacaggactagtgtgccttgagctttacaaagttctggccagagggcacccaatcgaagactaccgcaatacatttgctaacctggccctaccgatgctcaccacatctgaacctcttccccccactgtgatcaagcatggagatatgacgtggaccgtatgggatcggtggtctatcgagggagacatcacagttgcagagctcctgaagtggttaagcgacaagggcctgagtgcgtacagtgtctcctgcggcacatcgttgctctacaacataatgttcacaaggcacaaggatcgactgagcaagaagatcagagacgtagccaaggaggtggcaaaggtagacattccagaatacaggaagcatctggatgtcgtcgttgcttgtgaggatgacaacgggaaagatgtcgacatccctcttatctccatttatttccggtaggttgcactgtggaaagagttgaatgggaaaaaagagggtcccgtgaaaaagagatttgggtagattcataagttctgtcaataatattctctctcttgtaactagaaatcggtagcgaagtgatcacagctggagttgcttgtggtgcgtctccttacggttgtgtacgagtgcttggggtcctgctgttgcatgccaactatttgcaggtgtgcaatgtgatgtggatatttttgatgaatgaatcttcggagcttcagaatatatttacgcagcacttcactgcaatcgtcaatgtcagatagcaatttcagtct

SEQ ID NO: 7273 - DNA, 3532 bp, Zea Mays
aaaccgacccgcctggccacgagtccacgactgttgtatatgcatctcatcagcttggcctccaagtcgggaggaaggccgaaggggcgacccgcggccgccaccgcgaccgctgcgcgaaccctacccgccactccgatcgccaccgctggggttctcgatatatgcttacgacgaaacgaagagagcggagggagccaaggacggcggtgacgctgtcgtgaagaaggctcggggtgggggaatcggcggtggcggaagagatggtgccgaggtcggatgtgggcggcggtgggagcagcaatgcgagtggggtggtggagatcgacgaggacctgcacagcaggcagctcgctgtgtacggaagggagacaatgcggcagctctttgcctcgaacgtgctcatctccggccttaacgggctaggggccgagatcgcaaagaatcttgctctagctggtgttaaatctgttaccctacatgatactggaaatgtggaaatgtgggacctatcaggcaatttctttctatctgaggatgacatcgggaagaacagggctgttgcttgtgttgcaaagcttcaagaacttaacaatgctgttctcatatataccctaacagaagaattgaccactgagcaccttccaaagttccaagtggttgttttcactgacattagtttggacaaggcatttgagttcgatgattattgtcgtaatcagcagcctccaatttcctttatcaagacagaagtccgtggactttttggtagtgtgttttgtgactttgggcctgaattcagtgttcttgatgtcgacggtgaagatgcacgatggtgatcttgttgttttctcagaggtccagggtatgacagaactgaatgatggcaagccaaggacagtaatgtgcgcaggaccattttccttttgcatcgaggatacaagtaactttggcacttatacaaaaggtggaattgttacacaggtgaaagaacggaagatcttgaagtttaagagtttgagagattcgattagagaacctgggaatttccctctaagtgattgttcaaagtttactcgccctcctctgcttcattttgcatttatagctttggataaatttaggaaagagtttggacgcttccctggtgttgcttgtggtctggatgcccaaaggtttgtggagttcactgcttctatcaatgaagccacaattgattacaagatagaagatgagcttgatgagaatttgttgcggctttttgctagtggttctaaagctgtcctgaacccaatggctactatgtttggtggaattgtcagtcaagaagctgtgaaggcatgttctgggaaatttcatccactgtaccggacctgaagccattgaatagtcgctatgatgctcagatttctgtttttggctctaagcttcagaaaaaactgcgggatgccaatgtctttgttgtgggatctggtgctcttggatgtgaatttttaaagaacctagctttaatgggagtgtcttgcagccgtaaagggaaaattactataacagatgatgatgtcatcgagaaaagtaacttgagtcgccaatttctgttccgtgattggaatattggacatcctaaatctacagtagctgccacagctgctagtgctatcaattcctgcctgcacattgatgctctccagaaccgtgcctgtctagagaccgagcatgtgttccatgatgcattctgggagatccttgatgttgtcattaatgcacttgataatgttaatgctaggatgtacatggacatgagatgtttgtacttccagaaaccactcctggaatctggaacactgggtacaaaatgtaacacgcaagtggtaattcctcaccttactgaaaattatgggacttcacgagaccctcctgagaagcaggcacccatgtgcacagtccattcatttccacacaatattgaccattgtctaacatgggcccgctcagagtttgagggtttgctcgagaagactccaaaggaagtcaactcttttctgtctaatcccgctcaatatgctgcctccatgaaaaaggcaggtgatgctcaggccagggagttgcttgagcacgtatgtgaatgccttgagaaggagtgttgtggaacatttgacgattgcataacgtgggcaagactgaaatttgaagattacttctccaatcgtgtgaagcagctaacattcacgtttcctgaagatgctgccactagcatgggagcccatttctggtgtgctccaaagcgtttccctcaccctctggaattttcagctgctgattcatcacacattcagtttataatgtctgcttccatattgagggcattgtcttttggaatctctatacctgattgggcaaaggacactgataatctggctgatgcagtcagtaaagttgcagtacctgaatttaagccaaagagcggggtgaagattgagacagacgtgaaggccgaaaacatctccagtgcctcagttgatgacgctgctgttatcgaagatcttttaagcaggctgaaagcatgtaccaagaaactacctccgagattccaaatgaaacctattcagtttgagaaggatgatgatacaaatttccacatggacttaattgctggtcttgcaaatatgcgtgccaggaactatggcatccaagaggttgacaagctgaaggcaaaaattattgcaggaaggatcatcccagctattgcaacttcaactgccatggcgacaggactagtgtgccttgagctttacaaagttctggccagagggcacccaatcgaagactaccgcaatacatttgctaacctggccctaccgatgctcaccacatctgaacctcttccccccactgtgatcaagcatggagatatgacgtggaccgtatgggatcggtggtctatcgagggagacatcacagttgcagagctcctgaagtggttaagcgacaagggcctgagtgcgtacagtgtctcctgcggcacatcgttgctctacaacataatgttcacaaggcacaaggatcgactgagcaagaagatcagagacgtagccaaggaggtggcaaaggtagacattccagaatacaggaagcatctggatgtcgtcgttgcttgtgaggatgacaacgggaaagatgtcgacatccctcttatctccatttatttccggtaggttgcactgtggaaagagttgaatgggaaaaaagagggtcccgtgaaaaagagatttgggtagattcataagttctgtcaataatattctctctcttgtaactagaaatcggtagcgaagtgatcacagctggagttgcttgtggtgcgtctccttacggttgtgtacgagtgcttggggtcctgctgttgcatgccaactatttgcaggtgtgcaatgtgatgtggatatttttgatgaatgaatcttcggagcttcagaatatatttacgcagcacttcactgcaatcgtcaatgtcagatagcaatttcagtct

SEQ ID NO: 7274 - DNA, 4170 bp, Zea Mays
aaaccgacccgcctggccacgagtccacgactgttgtatatgcatctcatcagcttggcctccaagtcgggaggaaggccgaaggggcgacccgcggccgccaccgcgaccgctgcgcgaaccctacccgccactccgatcgccaccgctggggttctcgatatatgcttacgacgaaacgaagagagcggagggagccaaggacggcggtgacgctgtcgtgaagaaggctcggggtgggggaatcggcggtggcggaagagatggtgccgaggtcggatgtgggcggcggtgggagcagcaatgcgagtggggtggtggagatcgacgaggacctgcacagcaggcagctcgctgtgtacggaagggagacaatgcggcagctctttgcctcgaacgtgctcatctccggccttaacgggctaggggccgagatcggttgaatgctggattgcaaaatacagctgggactgttgcatttcatggacatatgggcagaaactgggcacgcaaaagggttcacagccttagacatttatgcttcaatgtttattttgttatgaggtgtttgatttgaggaataagctaatctatcatcttctcactcctcacttttttttatttagtttgtggaatgaattgagttgattcatcaccacctcattcctcatagttagttagtactaacatgagtaatgaggccatcccactaaatttgagaaataagttcatgatgcactatctcatcttggatggagtgattcatcaaaccaaacaccccttaaagtttctggtgaattagaaatgcaaatggtgcggccatcttttcgatttttatatacatattttgtttaatattctgttgaatggctgtcctcattataagacatatggtggagtagtgtaactgtgcaagtcactgcctctcacttgtttacctgtatagttattacaattcggatcaatactcataatgtttttcctttactattggtccagccagtaattaattgttttgttagataactaccattgtatttaccatgaatgtattataagcattatcttggtgagaccttttgaactaatatttcctttcaacagcaaagaatcttgctctagctggtgttaaatctgttaccctacatgatactggaaatgtggaaatgtgggacctatcaggcaatttctttctatctgaggatgacatcgggaagaacagggctgttgcttgtgttgcaaagcttcaagaacttaacaatgctgttctcatatataccctaacagaagaattgaccactgagcaccttccaaagttccaagtggttgttttcactgacattagtttggacaaggcatttgagttcgatgattattgtcgtaatcagcagcctccaatttcctttatcaagacagaagtccgtggactttttggtagtgtgttttgtgactttgggcctgaattcagtgttcttgatgtcgacggtgaagatgatggtgatcttgttgttttctcagaggtccagggtatgacagaactgaatgatggcaagccaaggacagtaatgtgaaagaacggaagatcttgaagtttaagagtttgagagattcgattagagaacctgggaatttccctctaagtgattgttcaaagtttactcgccctcctctgcttcattttgcatttatagctttggataaatttaggaaagagtttggacgcttccctggtgttgcttgtggtctggatgcccaaaggtttgtggagttcactgcttctatcaatgaagccacaattgattacaagatagaagatgagcttgatgagaatttgttgcggctttttgctagtggttctaaagctgtcctgaacccaatggctactatgtttggtggaattgtcagtcaagaagctgtgaaggcatgttctgggaaatttcatccactgtaccggttcttctactttgattcatccgaatctctgccaactcaccaattggaccctaaagacctgaagccattgaatagtcgctatgatgctcagatttctgtttttggctctaagcttcagaaaaaactgcgggatgccaatgtctttgttgtgggatctggtgctcttggatgtgaatttttaaagaacctagctttaatgggagtgtcttgcagccgtaaagggaaaattactataacagatgatgatgtcatcgagaaaagtaacttgagtcgccaatttctgttccgtgattggaatattggacatcctaaatctacagtagctgccacagctgctagtgctatcaattcctgcctgcacattgatgctctccagaaccgtgcctgtctagagaccgagcatgtgttccatgatgcattctgggagatccttgatgttgtcattaatgcacttgataatgttaatgctaggatgtacatggacatgagatgtttgtacttccagaaaccactcctggaatctggaacactgggtacaaaatgtaacacgcaagtggtaattcctcaccttactgaaaattatgggacttcacgagaccctcctgagaagcaggcacccatgtgcacagtccattcatttccacacaatattgaccattgtctaacatgggcccgctcagagtttgagggtttgctcgagaagactccaaaggaagtcaactcttttctgtctaatcccgctcaatatgctgcctccatgaaaaaggcaggtgatgctcaggccagggagttgcttgagcacgtatgtgaatgccttgagaaggagtgttgtggaacatttgacgattgcataacgtgggcaagactgaaatttgaagattacttctccaatcgtgtgaagcagctaacattcacgtttcctgaagatgctgccactagcatgggagcccatttctggtgtgctccaaagcgtttccctcaccctctggaattttcagctgctgattcatcacacattcagtttataatgtctgcttccatattgagggcattgtcttttggaatctctatacctgattgggcaaaggacactgataatctggctgatgcagtcagtaaagttgcagtacctgaatttaagccaaagagcggggtgaagattgagacagacgtgaaggccgaaaacatctccagtgcctcagttgatgacgctgctgttatcgaagatcttttaagcaggctgaaagcatgtaccaagaaactacctccgagattccaaatgaaacctattcagtttgagaaggatgatgatacaaatttccacatggacttaattgctggtcttgcaaatatgcgtgccaggaactatggcatccaagaggttgacaagctgaaggcaaaaattattgcaggaaggatcatcccagctattgcaacttcaactgccatggcgacaggactagtgtgccttgagctttacaaagttctggccagagggcacccaatcgaagactaccgcaatacatttgctaacctggccctaccgatgctcaccacatctgaacctcttccccccactgtgatcaagcatggagatatgacgtggaccgtatgggatcggtggtctatcgagggagacatcacagttgcagagctcctgaagtggttaagcgacaagggcctgagtgcgtacagtgtctcctgcggcacatcgttgctctacaacataatgttcacaaggcacaaggatcgactgagcaagaagatcagagacgtagccaaggaggtggcaaaggtagacattccagaatacaggaagcatctggatgtcgtcgttgcttgtgaggatgacaacgggaaagatgtcgacatccctcttatctccatttatttccggtaggttgcactgtggaaagagttgaatgggaaaaaagagggtcccgtgaaaaagagatttgggtagattcataagttctgtcaataatattctctctcttgtaactagaaatcggtagcgaagtgatcacagctggagttgcttgtggtgcgtctccttacggttgtgtacgagtgcttggggtcctgctgttgcatgccaactatttgcaggtgtgcaatgtgatgtggatatttttgatgaatgaatcttcggagcttcagaatatatttacgcagcacttcactgcaatcgtcaatgtcagatagcaatttcagtct

SEQ ID NO: 7275 - DNA, 2849 bp, Zea Mays
tgccttggcccatggcccatcgtccatggacatggaccagaggccctcacgctcacgccttcctagcacgctggcattggtagtactacaaaaacaggcgtcgtttttctttgcctccctccccaccttgtctggctcccttcttcgctctccatgagctgagcaaggctgggcagcaacacggcgacggagaaaaatctcttccctggctcagagattcccccacaagaccacggcatttccccttgctactgaccaaacatcgcagccttttctttttgcgatttttcttcacattttgtagacaccaacgccccttccttcagtgttctgaatataaataaatacagtagattcatccagcagaaaatacagaactctcggtttgttctgatcactcggttccatctcccaaagcgaccccgccgccagtagatccatccggcaagaactcggttctgctccgtccttctgccgtgcagaaacgatcccgccgccttcagtagcggtagcagaaagccctatcaagcgagtgaagactcagcagcaggcaaagaggtcgagtctccagcgatggcggcggcgctggagtgctggtcggggcggccgagcaccgacgaggagatggtggagcaggtcctcatgaagccccacggccgttcagacgactccctcccgacctgcgccgactctgcctccgccggcgagccgacgtcggcgcccgcgccgcccaaccccaagaagtggcagcggctgggccgcaactttgccggcgccatcgccgcgttcaagaacacgctgagcctggatggcggcggcctcccccgcgacccctcgcctcgggccgagaagccgccgccgctcctcctccgtggcctcgcgcagctctactcccgcggcgccgccgccaaccagcagctgccggagaagctcgtagctgacctccgccgccacttcgacgctctccccaacagctacgcacaggcaggatttgacatgaaagatgtcctcttgcatgcccgccttgtagagcaggcgaccggcgaggatcagcctgcggtgaacattgaggaagtccatggcagaggagctggtgatgaaggcactgttttccagctaacatttgcttgcactgccccgctctcgtggcagtcaatgtcaggatcactagacagcccttcgttctgctgcaagaagatccagatctttgagaagagaggtctgacacttggtgtcgtcatgatacttgtgcagactgggaacgaggcgctcttcaagaaccgggttgagtctgcgctgaaatcggtagcaaagaagcaaaggaagaacagtggtggtggtgtgaagctgccattcgggctctgcggttgccaggaagaaggatcgagaaacttcgatgaggagtcgatgtttgatccggacgatggccaggtactcgacaatgagccggcgcgcaggccacagctacccactcgcctaccgcagtcatcagtcttcgtctcggtagatgaatggcagaccatccgctctggtggcgaggagctcggtcgctggatgctgcgttccgaggagatcgagttcatcgattgggttggtgcgaattcgttcaggggtgtctatagaggaaagaaggtttgggtcaacaaattgaggggctgtgacatgggaagtgcttacgaagttgagattcgtcaggacttgctgcagttgatgagttgtggccagaggaacatcctgcaattccatggcatctgtttcaatggaaaccatgggctctgcatagtaaccaggatgatggaagggggatcagttcatgatattcttacgcagagaaacaagaggctgtccctccgggacacggtcaggatcgctcttgatgtcgccgacactctggctttcatgaacagctacggcattgcgtaccgcgatctcaatgctaggaagatcctgctggataggcaagggaatgcttgcctcggggatatgggcattgttaccccctgtagtaatgttggtgaggtcactgagtatgagacgtctgggtaccgatggctggctccagaggttagttttcttgacttggtttactgaaaaattgtattgttgtctacgagtagcctttatgaaagtaaatgctcagttgcagttgctagaggttcttgctgaacaaagttgctctattttgaactgctacctgatattatggaatggcctatacagtattcaatgcaacgttgaagagctgttgcgtttcttctacaagttcatgctttcttgtagtagatcagcgagtcagttgcatttttttgcttccttcttgggcagtcactaacacaataaaaagatgctggaaaagtcaatcatctagtcgacagttgtgcaaacaagttttctgctatctcattttatactgatctgtccttgctgaaaagttcagtatgatggtgtctacagatcatcgctggagatcctgaaaccgtctccgagacctggatgagcaacgtctacagctacggaatggtgctctgggagatgatcaccggagaggaggcctactccgcctactctccggtgcaagcggccgtcggaatcgcggcctgcgggctgaggccggagatccccagagagtgtcctccttttctgagatcatatccatcctacaaaggcagcagaacgttagatagtgttcttttcttttctttttttctcttccccccttccttctatattattatatatgctatatatcagtttggcttggctgtttgcatgcctaatcatgcaggaaactgcatctgagaaaaaatataatataattatatatgtgcagtgcggaggctttttatatt

SEQ ID NO: 7276 - DNA, 2337 bp, Zea Mays
cagccccacctccctctcctcttcctgccatgccttggcccatggcccatcgtccatggacatggaccagaggccctcacgctcacgccttcctagcacgctggcattggtagtactacaaaaacaggcgtcgtttttctttgcctccctccccaccttgtctggctcccttcttcgctctccatgagctgagcaaggctgggcagcaacacggcgacggagaaaaatctcttccctggctcagagattcccccacaagaccacggcatttccccttgctactgaccaaacatcgcagccttttctttttgcgatttttcttcacattttgtagacaccaacgccccttccttcagtgttctgaatataaataaatacagtagattcatccagcagaaaatacagaactctcggtttgttctgatcactcggttccatctcccaaagcgaccccgccgccagtagatccatccggcaagaactcggttctgctccgtccttctgccgtgcagaaacgatcccgccgccttcagtagcggtagcagaaagccctatcaagcgagtgaagactcagcagcaggcaaagaggtcgagtctccagcgatggcggcggcgctggagtgctggtcggggcggccgagcaccgacgaggagatggtggagcaggtcctcatgaagccccacggccgttcagacgactccctcccgacctgcgccgactctgcctccgccggcgagccgacgtcggcgcccgcgccgcccaaccccaagaagtggcagcggctgggccgcaactttgccggcgccatcgccgcgttcaagaacacgctgagcctggatggcggcggcctcccccgcgacccctcgcctcgggccgagaagccgccgccgctcctcctccgtggcctcgcgcagctctactcccgcggcgccgccgccaaccagcagctgccggagaagctcgtagctgacctccgccgccacttcgacgctctccccaacagctacgcacaggcaggatttgacatgaaagatgtcctcttgcatgcccgccttgtagagcaggcgaccggcgaggatcagcctgcggtgaacattgaggaagtccatggcagaggagctggtgatgaagactgggaacgaggcgctcttcaagaaccgggttgagtctgcgctgaaatcggtagcaaagaagcaaaggaagaacagtggtggtggtgtgaagctgccattcgggctctgcggttgccaggaagaaggatcgagaaacttcgatgaggagtcgatgtttgatccggacgatggccaggtactcgacaatgagccggcgcgcaggccacagctacccactcgcctaccgcagtcatcagtcttcgtctcggtagatgaatggcagaccatccgctctggtggcgaggagctcggtcgctggatgctgcgttccgaggagatcgagttcatcgattgggttggtgcgaattcgttcaggggtgtctatagaggaaagaaggtttgggtcaacaaattgaggggctgtgacatgggaagtgcttacgaagttgagattcgtcaggacttgctgcagttgatgagttgtggccagaggaacatcctgcaattccatggcatctgtttcaatggaaaccatgggctctgcatagtaaccaggatgatggaagggggatcagttcatgatattcttacgcagagaaacaagaggctgtccctccgggacacggtcaggatcgctcttgatgtcgccgacactctggctttcatgaacagctacggcattgcgtaccgcgatctcaatgctaggaagatcctgctggataggcaagggaatgcttgcctcggggatatgggcattgttaccccctgtagtaatgttggtgaggtcactgagtatgagacgtctgggtaccgatggctggctccagagatcatcgctggagatcctgaaaccgtctccgagacctggatgagcaacgtctacagctacggaatggtgctctgggagatgatcaccggagaggaggcctactccgcctactctccggtgcaagcggccgtcggaatcgcggcctgcgggctgaggccggagatccccagagagtgtcctccttttctgagatcatatccatcctacaaaggcagcagaacgttagatagtgttcttttcttttctttttttctcttccccccttccttctatattattatatatgctatatatcagtttggcttggctgtttgcatgcctaatcatgcaggaaactgcatctgagaaaaaatataatataattatatatgtgcagtgcggaggctttttatatt

SEQ ID NO: 7277 - DNA, 1000 bp, Zea Mays
cgtcgttgcatcggtcgccaccacacaccggccggcccctatcacccgtttcctcacgacggaacgggacgatgccgcagcagtcagcgtaacaaaaagaaagcaaagggtgaaaggggaagggggagaataatctcggtttttagcacgcaaacacacggcacgagcagctgagcgcccatggcaggtccccggcgtctcctactcctcgtcccgctgctcgtgctcctcggcgcgcacccgccgcagtgcgggtccgcggaggaggggacgaaggtctccctggagctctactacgagtcgttgtgcccgtactgctcgcggttcatcgtcaaccgcctcgcggggatcttcgaggacgggctgatcgacgccgtccacctccggctcgtcccctacggcaacgcgcgcgtcgcatccaacagcgagatctcttgccagcatggtccgtacgagtgtctgctcaacaccgtggaagcttgcgccatcgacgcctggccggatctggatgtgcatttcagcttcatctactgcgtggaggacctggtggtgaaacggcagtacaaggactgggagtcctgcttcgagaagctgggcctcgaccccaagcccgtaacagaatgctacaaaagcgagcatggccacaagctcgagctcaagtacgcgaaccagaccgacgctctcgagccgccgcaccggtacgtgccctgggtggtcgtcgacgggcagcccctgcttgaggattacgagaatttcgaggcttacatctgcaaggcttacaagggcactccaccgaaggcctgccagggcctgggacgtctgcagatggccctcgagacagcggcggaggcgcgcaacggcgtcagctacaactccggtgtcagcaagcttgcgactgctgaagatgagggtggggagcataaggctatgaccctgagtggggtgtggcgccgcgctcaccgcatcggcacgacgacggcacatggcatgagatctttgg

SEQ ID NO: 7278 - DNA, 636 bp, Zea Mays
agctttcttccagctatttgtgtctctggtctccttcctatatctcaagaattatataggtggccctaaagctacatgctttggatgtgtggggtttgctgcgttctcagtggcaattgaaaagttctttgatcggcatacttgaaatgggtgttgtgaatttgaacgctttttggccatgttcgtttgatcccaaaaccatagggattgaggtggactggaagagattgaagaggattttgacttgtaggggatttgatcccctcaatccctatggatcagcacaaaacgaacagagccttagctgagcatgagcagcgttggcaggagaacctgattgtttgcaacatccagtcatctacaactcattaaggactgtaacctaatttttttttacttattcccagtttcttgcctggattcgtaattactgaactaccggaacgcctaagagatctaccctgatcaatatcgatgcacgatgacattgaccagagttgttgttctcgaatgtgttttgtgttattctcgacatctgcaggcaacgggtgtctatttattattgcaatctgactgaggtcctgtttggaagtgtagcgtttttggagttttcaaacaatactatgatatttgatg

SEQ ID NO: 7279 - DNA, 918 bp, Zea Mays
ctacggcgacctctaggcgcggctggaggcagacaccaccgggatggcctttccgtagtttgctgagagtcgagattataggagccatggataagacagagagctgctggtggtagatctaatggtgatggatccaagaagacggagaacatgtgatcgacctaaggcagtttcagctccagaggcaaatactgaacttcaagtaaatattgataaagaaaggtccattactcatgcaaatgctaagagcaagagtgaaaagttccctcccctcgtgcggttggtgtctcctggatgcttcagtacccttttcctctgtactcttttaatgctcctggtggtatatatggaatcaaacattttcgaaggtgaataacgagtaagttctacagttccattgatacgatagtgacataaaagctcaaatgtttgtaatatttttcttttgtgctaaacatttttgaatcatgcattctgcggtgggttcaatgtgacaaatgtgaatgctagcaacaccaaatttgtgctctatttgatggaagaaggaatgatgaaggacaagccgaatatacttgtcccaattgctacgttgaggaggtcaaatgtgggctgcgcaaacctttatcatagtgtgttgttcttgggggcaaaagatttgccaagaactgttcttagtgatcatatagaagatcggctatttaaacgacttaagcagtgctggcaaaagtattgatgaggttagtgataccatgcagctgctgcaggagaaacaagatcatgcttcaaatgtctatctatctgttcgcttgttaattcgagatgtatttgagactgagtgtatactattttgcgagggatgcacactatgaacaatgctaacatcttggaattcgatatcaccaccatgctttgtttttc

SEQ ID NO: 7280 - DNA, 1263 bp, Zea Mays
ctttcgtgcttcatggcggaggtttctggaagacaagagcaagagacgagacgtgagccgtgtgtgagtacgtgaccatcgtcagctgccggtttttccatacgcgcaacagtgtgccgactgccgacgacgaccaaccaaaccatgcgaagaggaaagagccgtcgctttcgctacgctcgacagtggaggacacatcttcctcgccgcttctggctttgatccggtcgcatccaacgcacgacctgttgaaccagggcgcgccctcccagggttcctttcttctccgtctccgcgtaggcgtagcgaagaagctaacctagaatcaaagagatcgcacgcaagagggagcaccggagcagcgagccagcgacagcagcagagagatcgccggggccgctcgcctgtctggagagagaaaggaaacaagagatggacgagatcatgaacaaggtgggcgcttactggctggggcagagggccaacaaggagatctcctcggcaggcgacgacctcgatcgtcggggatggagcgaaatggctggtgaacaagctgaagggcaagatgcagaagccgctggcggacctgctcaaggagcacaacctccccgtgggcctgttcccgcgcgaggcgaccaactacgagttcgtgccagagacgcggcgcctgacggtgtacatcccgtccccctgcgaggtcggctaccgcgacggctccgagctgcggttcgacgccacggtgtctggcacgctgggcgagggccgcctcacggaggtggaagggatcaagaccaaggtgctcgtctgggccagggtcaccgccgtcaaggccgacgccgccaaggtccacttcaccgctgggatcaagaggtcgcgcagccgggacgcctacgaggtcgtcaggggcggcatcaccgtcgacgagttctagcttagttttgctttcgcggctcacatggatggacaggcttcgtcttgctcgctgcacgctgagaaggacagattgttgctttcagttgcaggaataaattctacacccattagctatgtgggagatctgcgtgcaccgtatatcgtgtgttttgggttttgctgtgagaatctaacacttgaaggattcagaaggtgtgctcgttgcttatgatatatgttgttcacttgtttttaatatcttcgggtattagaaaacaagacaatataatgagattaaggtccaccttcgtccttaaacccatccttattttaaaagaaggtcaaataaga

SEQ ID NO: 7281 - DNA, 1586 bp, Zea Mays
tcaagcccattttctcggcctgcctcgcgcaactcgtcccagcacaccgctgtggcgctgtcgtcctcgctcacctcgtccgtcctcgtgagctccgcctgccctccatctggacagctccagcctccagccatctccccccacctgtacacagttacaaagcttggcacttcgcagttcgcactcgcatgctcttcgcccctcgcgcttaccgctgccgcgcctcccgacttgccgcctccgcctagctccgggctctccaatggcctccatgctcgccatcctcaggccctccgcgccggccccgctcgcggggcgccgggccagggctgccgcgccggcgaccgcgagggtggcgctatcttccagatctaggtattcgtcggtcagggtgtcgctcggctccgaggttgcagtgggcgccgacgcgctcttcgccgactataagcccaccaccgctttcctcttccccggccagggtgcccaaaccgttggaatgggggcagaagctcagagtgttccagcagctaccaaattgttcaaccaggcaaatgaaatccttggatatgacttgctggatctttgcaccaatggaccaaaagaaaagcttgactcaacaatgatcagtcagccggctatatatgtcaccagccttgcagcagtagaggtactacgtgcacgcgatggaggccaagatgtgattaactctgtagatgttacatgtggtctcagtttgggagagtataccgctcttgcatttgccggtgcttttagctttgaggatggactgaagcttgtcaagctaagaggagaagctatgcagatgctgccaatagtgcgatggttagtgtgattggtctggattcagaaaaggtgcaagaactatgtgatgctgctaatgacgaagtagatgaaaacgatagagttcaaatagcaaactttctgtgccctgggaattatgcagtttctggtggtgtaaaaggtattgaagtagtcgaagccaaagcaaagtccttcaaggccagaatgacggttcgcctagctgttgctggcgctttccatactagcttcatgcaaccagctgtttcaagattggaatctgcgttggctgccactgagattagaacacctagaattccggtcatctccaatgttgatgcgcagccccactcagatcctaacaccatcaagcagattttagctcagcaggtaacctctccggtgcaatgggaaaccactgttaagaatcttatgggcaaggggcttgagataagttatgaactcggacctggaaaggttatagcaggtattctcaagaggatcaacaaaggcactagcattgagaacatcggggcttaaacgtctgggatctgaagaactcttgatggaaccaagttacacagcagaggattgaaacatgccattattgtggaacgatgtttccactcagagttaccgttttttttaccttagtggttgaattttgatcttgatgtaaaattgacatgaaacacatggttaatgattttatgaacagtgtagttttcacagtttgaataagggtgtgtctggtttctaaggactaa

SEQ ID NO: 7282 - DNA, 1583 bp, Zea Mays
tcaagcccattttctcggcctgcctcgcgcaactcgtcccagcacaccgctgtggcgctgtcgtcctcgctcacctcgtccgtcctcgtgagctccgcctgccctccatctggacagctccagcctccagccatctccccccacctgtacacagttacaaagcttggcacttcgcagttcgcactcgcatgctcttcgcccctcgcgcttaccgctgccgcgcctcccgacttgccgcctccgcctagctccgggctctccaatggcctccatgctcgccatcctcaggccctccgcgccggccccgctcgcggggcgccgggccagggctgccgcgccggcgaccgcgagggtggcgctatcttccagatctaggtattcgtcggtcagggtgtcgctcggctccgaggttgcagtgggcgccgacgcgctcttcgccgactataagcccaccaccgctttcctcttccccggccagggtgcccaaaccgttggaatgggggcagaagctcagagtgttccagcagctaccaaattgttcaaccaggcaaatgaaatccttggatatgacttgctggatctttgcaccaatggaccaaaagaaaagcttgactcaacaatgatcagtcagccggctatatatgtcaccagccttgcagcagtagaggtactacgtgcacgcgatggaggccaagatgtgattaactctgtagatgttacatgtggtctcagtttgggagagtataccgctcttgcatttgccggtgcttttagctttgaggatggactgaagcttgtcaagctaagaggagaagctatgcaggatgcttcagatgctgccaatagtgcgatggttagtgtgattggtctggattcagaaaaggtgcaagaactatgtgatgctgctaatgacgaagtagatgaaaacgatagagttcaaatagcaaactttctgtgcccttttctggtggtgtaaaaggtattgaagtagtcgaagccaaagcaaagtccttcaaggccagaatgacggttcgcctagctgttgctggcgctttccatactagcttcatgcaaccagctgtttcaagattggaatctgcgttggctgccactgagattagaacacctagaattccggtcatctccaatgttgatgcgcagccccactcagatcctaacaccatcaagcagattttagctcagcaggtaacctctccggtgcaatgggaaaccactgttaagaatcttatgggcaaggggcttgagataagttatgaactcggacctggaaaggttatagcaggtattctcaagaggatcaacaaaggcactagcattgagaacatcggggcttaaacgtctgggatctgaagaactcttgatggaaccaagttacacagcagaggattgaaacatgccattattgtggaacgatgtttccactcagagttaccgttttttttaccttagtggttgaattttgatcttgatgtaaaattgacatgaaacacatggttaatgattttatgaacagtgtagttttcacagtttgaataagggtgtgtctggtttctaaggactaa

SEQ ID NO: 7283 - DNA, 1128 bp, Zea Mays
ccgcccccgggctcagatttttcacgcctcttctttatcttctccctggcctccttcatctgttcgtggctccaacgcccacatggagcactggttccggcgcagcggaagcagcttccatggctgcccaggctttgctcggagctcccctctcctgctgcgctcgcccggccatgctccacctcgccccatcgcgacgctccagctcgcgtcgagctccccatcgaacccccatggcggccgagctcacagcctgcgcgcgctccggctgctttgctccagcgtcgcgcgctccgctcctgcacgccgagcgtcctcttcagctccttggtcaaccttctctcgcgctctgctcctctctcttccttgccgcggagctcctgtgcgcgcgctgttcctgctcgccgagctgttctctgccctgcgcgcctccctctgctcacgcgctcacctgcttgttcactgcgcgagctgcgtcaagctttttccccagccgctcggtgtccccaaccatagccgcgcccctgatcgagctccagctcctgcgcgccccgctcgccgagctcgccctgcgctcgggtgcagccctgcgcacagccgcttttcatctccctgctcagctcaccgcgctgaactgtccagcgccgcgcgcgcttgcccctgatacttctcgcgcgatatttggatctcgtagattggccccgtcatctttgtttccctctggtcgcaataaaatcctgtcccaccgggtcatcgggcgctgttcccaactcactatggagtttgttaggctcgccatatgtttaaatgtcgtcccagagttcgtcgtcatcttgcccatgccgtggccgcaacttcctatgtccctagtccacgtcgtcgtttcgtatgtcatcaagaaaccctaagaatcgggtaaagacaaagctagcagcgtggtattcaccaagtgcgcgacaaaaagctcggacatcctacgcgactcaagtttgagttgtcagaattattcagtcgaggaaaagatctttagcaatcgattaccgaagaaaagaagatccctggatgacgtcaaccggaactcgtagtcgcgcttgcgactatcgcgtcgaattagtcagggtaagcaaa

SEQ ID NO: 7284 - DNA, 4253 bp, Zea Mays
ttcacatgtgccgcgccgcgccagagcatgaagaagaagcgccccagttcggttccccggtagaggcgtcgagcccaccccgcccgcccctagtacgagacagcgagcgggacgaagaagaaacaaaacataacagggccgtgcgttcctgccggaactggtggccgcctgccccgcgcaagaagctaccacggcagcagcagaaaggaggaggaagaggcgtcgtcgtctcgaggatcgcgcgcgcaatgcctctgtcgcggcatacggtccggagcgagtacgcgctgggcggccgcgacctctaccgcggcgccgaccagcacgacccggaggccgtcctcgatggcgccgccatggccgggctcgtcggcgtcctccgccagctcggcgacctcgccgaattcgctgcacaggtgttccacggcctgtacgacgaggtgatgagcacgtctgcgcgagggcacggcctcatgctccgggtgcagcagctggaggcggagctgccgctgctagaggaagactcctgccagagaaactacctgcacgtcgttgcctctaacaggggtgtcgactggcatccaaatccaagggtggaccatggggttgtcgcaggaggcgacacgcctcgcttcatcatggagtcggtcaagcagtgccgcgggccgcccaagctcttcgtgcttgacaagtacgatgtcggtggcgacggggcgtgcttgaagaggtacaccgacccgtcctccttcaggacgggctccgcatgtcctacgaccttgctgcaggaaggaactcgagatgatagaagacctctgagagccgtggagatcagtcctaaccttcagaatgctgagattttcagatcccccaatgcagccgacaatttctccaaactggagaccggttcatcggctggagctctggatgaagtgcccacaaaccgcagacgactcaagttccgccagctaaatggatccgtgtttcaaagcttcagaccgctcatgcagaatctgcatgaaaagccttcatcagaggagagactcatcacaggcgaccactcaaaagtgcatgtatttatggttgagtcacctgaaccaggtgctgaagagagagatgtcatggtagacacgtccgacaacatggagaaaggcaagctcaccgttcgcaggaaaagatcagtttctgaagaagcactgtcacgttcgtctgatgctcggtcagcaggaagcagcaggggcggctacgactccgaactggatatctacgtggacgcattaaccacgatggattctgaagatttcagtgctccggagtctggagcaagagagcaagctactgaagaagaagaagaagagcagagatgcaatggcagtgtcaccagtgctgtatcaaatggcacacgagatattactaagaagaccaaggaagtcaaggagaactccaagaaaatagcaagcaagaggtccaagtatgttggcagcatggagctcactgcttcaaaagttggcattctgccaagggagctctccgagaagcatgcccctttctctggttccctccggtacatggcgaagcaactccttgaactgaggtatgatggcactcaagacagcgaattatatgacgttgaagcagacggcgtgggacgtgatgtcaagtaccaggaaatttctgaccatgctgttgaagctaaggagagtgatgctgtgcacaaaattctgtcaggttcaccctatgatgatgcgggtttaggaaaatgcccgcaggaagaaattaaccatgggcaggagcatgatgttccacctactgacagtccacatgattcggcccctgatgaaggaaatgggtttcaggactccaacatggcctacttggtaggcatcatcacatcttccagttcccaagagggagaaggatgtacaagtactgcactgcatgagaattcatctatggcagtgctcaaccatgttttggaacatgctcaagagaggtttggggaagatcttgacaaggaagtggatgtggacattcatacagaagccatttctgagaatacatctgataagtgtgaggacttgaaagaagtcagcatttacacggagcaggtgaatgtggaagatatggaggaaatcaatgaatctgatgtatatgcgttggacgatgaaagagccgagtacatagaacagcaagtagtttcagatggtagtatctcttcaccggtttcatccaagcaatcggatgatccttgctggataactccactcaccctcgcagatgaagatgatacagtggcatgtaaggtcgtcgacagacctgaaggggatcatgttatattatcagaaacattcaagggcattgatctacctaatgtggtaactgagtcagtaatcaacagcaaacatgacatgccaaataatggacagtactatttacatccaaaagctacttttggacaagatctgtgtcttggcagctataagattgttggagaaaatggggaagttccactatgcagctcaaccactgcgactacaactccagaactaactgtaaacacagagacaaagcatgagtttcatcaagctgtgtatcaggaaccatcgaattcattcaatagcagtgctgaagtttttggagatccactagctcccgactccagagatgatgcaccgtcagtcatctcaagctttgattggatgctcaatggtgcaacgcagaagtcattcaatatctttccttctcatccaactaatggaaatgcagaagaaaatggttcttctgaagatgtgccaccgcttcctcctcttccaccgatgcagtggcgaacaaacaagatacagactgggccatcaccgttatctgcgaaaattgggagaccaccaaggccaaaaccttcagtaaaacaacaacaaagtgaagcttctcatgttcttcaggagaacagtctgcacaaaggcttgagtttgcagaatgaactagtgcaggcaaatatttctagtgaccatgagaaaaaccaaattcttaacatagattttcgtgaaagtcatcaccaggaaggagaggagtatgatgcacaggattctaatccatttgcctcgtcagaagttgaatgcttggccgaagttgcttcggtaaaaagtgaaaatctgcacccattgcagctacctgagcttatagttgttctggaagaggcatggtcagagttcggtaatataaaattcatgccagaacaagaaggaaaattccaactaagcaatggactttctgtttggaatgacttgtgcacttctggtttgtcatcacaaaagaccagcgagaagcctgaattttttgcagattataagggaaaggaattttcatttgcaggtagtgacgaagttgcagattcagaagaaaacaaaccaaatggtgctgttaaacatctgcagaatcctgacttgccagcacaacagaaagacgacatacatgattgtgatggcaaggtaacaaagttttcctctgcattagaagaggactcgtcacaatcaccaactcatacagtgtcaggaccacctagatatcctctacttcctgttacttctcacgacagaagcatgataagaaaggctccaactttggttcagccttcgagtatgcttgcagatgagaagaacacactactggaacagataaagaacaagcctgttcttgcaaagagaccagatgtaatgggtggtccaaaaactaacttacaagtggtggccattctagagagagctcatgcgattcgccaggctgttgctgatgacgacgacgatgataactggagtgagtagctggctcttcctaagagcaagttcggcttctgatgtttaacaagtgcttgcgtcgatctagaactttgtgtccctgttcttgcatggagcaaaagatggaatggagccaacttactataggatttcatgccaagacagttggtctggaccaggtgatgtacatggatgggcaagaaggagaaggatagaagcaacattgcaactccaaacatagtgtgtgtctctacttatactatctgtaacgtttcgaagcgcgtcaatgtttattatcattcaatgcgcctactgaaaatttgacgtgcttggtgaggattgttagattgtatatgcctcctattagtattgtgatttttgtaacttggtgagtgtacataaagaagcatgatttttgagttgttttgaacaaatctaaagtagctagagaaagcaactgttgga

SEQ ID NO: 7285 - DNA, 4247 bp, Zea Mays
ttcacatgtgccgcgccgcgccagagcatgaagaagaagcgccccagttcggttccccggtagaggcgtcgagcccaccccgcccgcccctagtacgagacagcgagcgggacgaagaagaaacaaaacataacagggccgtgcgttcctgccggaactggtggccgcctgccccgcgcaagaagctaccacggcagcagcagaaaggaggaggaagaggcgtcgtcgtctcgaggatcgcgcgcgcaatgcctctgtcgcggcatacggtccggagcgagtacgcgctgggcggccgcgacctctaccgcggcgccgaccagcacgacccggaggccgtcctcgatggcgccgccatggccgggctcgtcggcgtcctccgccagctcggcgacctcgccgaattcgctgcacaggtgttccacggcctgtacgacgaggtgatgagcacgtctgcgcgagggcacggcctcatgctccgggtgcagcagctggaggcggagctgccgctgctagaggaagactcctgccagagaaactacctgcacgtcgttgcctctaacaggggtgtcgactggcatccaaatccaagggtggaccatggggttgtcgcaggaggcgacacgcctcgcttcatcatggagtcggtcaagcagtgccgcgggccgcccaagctcttcgtgcttgacaagtacgatgtcggtggcgacggggcgtgcttgaagaggtacaccgacccgtcctccttcaggacgggctccgcatgtcctacgaccttgctgcaggaaggaactcgagatgatagaagacctctgagagccgtggtaataaacaaaatcagatcccccaatgcagccgacaatttctccaaactggagaccggttcatcggctggagctctggatgaagtgcccacaaaccgcagacgactcaagttccgccagctaaatggatccgtgtttcaaagcttcagaccgctcatgcagaatctgcatgaaaagccttcatcagaggagagactcatcacaggcgaccactcaaaagtgcatgtatttatggttgagtcacctgaaccaggtgctgaagagagagatgtcatggtagacacgtccgacaacatggagaaaggcaagctcaccgttcgcaggaaaagatcagtttctgaagaagcactgtcacgttcgtctgatgctcggtcagcaggaagcagcaggggcggctacgactccgaactggatatctacgtggacgcattaaccacgatggattctgaagatttcagtgctccggagtctggagcaagagagcaagctactgaagaagaagaagaagagcagagatgcaatggcagtgtcaccagtgctgtatcaaatggcacacgagatattactaagaagaccaaggaagtcaaggagaactccaagaaaatagcaagcaagaggtccaagtatgttggcagcatggagctcactgcttcaaaagttggcattctgccaagggagctctccgagaagcatgcccctttctctggttccctccggtacatggcgaagcaactccttgaactgaggtatgatggcactcaagacagcgaattatatgacgttgaagcagacggcgtgggacgtgatgtcaagtaccaggaaatttctgaccatgctgttgaagctaaggagagtgatgctgtgcacaaaattctgtcaggttcaccctatgatgatgcgggtttaggaaaatgcccgcaggaagaaattaaccatgggcaggagcatgatgttccacctactgacagtccacatgattcggcccctgatgaaggaaatgggtttcaggactccaacatggcctacttggtaggcatcatcacatcttccagttcccaagagggagaaggatgtacaagtactgcactgcatgagaattcatctatggcagtgctcaaccatgttttggaacatgctcaagagaggtttggggaagatcttgacaaggaagtggatgtggacattcatacagaagccatttctgagaatacatctgataagtgtgaggacttgaaagaagtcagcatttacacggagcaggtgaatgtggaagatatggaggaaatcaatgaatctgatgtatatgcgttggacgatgaaagagccgagtacatagaacagcaagtagtttcagatggtagtatctcttcaccggtttcatccaagcaatcggatgatccttgctggataactccactcaccctcgcagatgaagatgatacagtggcatgtaaggtcgtcgacagacctgaaggggatcatgttatattatcagaaacattcaagggcattgatctacctaatgtggtaactgagtcagtaatcaacagcaaacatgacatgccaaataatggacagtactatttacatccaaaagctacttttggacaagatctgtgtcttggcagctataagattgttggagaaaatggggaagttccactatgcagctcaaccactgcgactacaactccagaactaactgtaaacacagagacaaagcatgagtttcatcaagctgtgtatcaggaaccatcgaattcattcaatagcagtgctgaagtttttggagatccactagctcccgactccagagatgatgcaccgtcagtcatctcaagctttgattggatgctcaatggtgcaacgcagaagtcattcaatatctttccttctcatccaactaatggaaatgcagaagaaaatggttcttctgaagatgtgccaccgcttcctcctcttccaccgatgcagtggcgaacaaacaagatacagactgggccatcaccgttatctgcgaaaattgggagaccaccaaggccaaaaccttcagtaaaacaacaacaaagtgaagcttctcatgttcttcaggagaacagtctgcacaaaggcttgagtttgcagaatgaactagtgcaggcaaatatttctagtgaccatgagaaaaaccaaattcttaacatagattttcgtgaaagtcatcaccaggaaggagaggagtatgatgcacaggattctaatccatttgcctcgtcagaagttgaatgcttggccgaagttgcttcggtaaaaagtgaaaatctgcacccattgcagctacctgagcttatagttgttctggaagaggcatggtcagagttcggtaatataaaattcatgccagaacaagaaggaaaattccaactaagcaatggactttctgtttggaatgacttgtgcacttctggtttgtcatcacaaaagaccagcgagaagcctgaattttttgcagattataagggaaaggaattttcatttgcaggtagtgacgaagttgcagattcagaagaaaacaaaccaaatggtgctgttaaacatctgcagaatcctgacttgccagcacaacagaaagacgacatacatgattgtgatggcaaggtaacaaagttttcctctgcattagaagaggactcgtcacaatcaccaactcatacagtgtcaggaccacctagatatcctctacttcctgttacttctcacgacagaagcatgataagaaaggctccaactttggttcagccttcgagtatgcttgcagatgagaagaacacactactggaacagataaagaacaagtctttcaacttgaagcctgttcttgcaaagagaccagatgtaatgggtggtccaaaaactaacttacaagtggtggccattctagagagagctcatgcgattcgccaggctgttgctgatgacgacgacgatgataactggagtgagtagctggctcttcctaagagcaagttcggcttctgatgtttaacaagtgcttgcgtcgatctagaactttgtgtccctgttcttgcatggagcaaaagatggaatggagccaacttactataggatttcatgccaagacagttggtctggaccaggtgatgtacatggatgggcaagaaggagaaggatagaagcaacattgcaactccaaacatagtgtgtgtctctacttatactatctgtaacgtttcgaagcgcgtcaatgtttattatcattcaatgcgcctactgaaaatttgacgtgcttggtgaggattgttagattgtatatgcctcctattagtattgtgatttttgtaacttggtgagtgtacataaagaagcatgatttttgagttgttttgaacaaatctaaagtagctagagaaagcaactgttgga

SEQ ID NO: 7286 - DNA, 1045 bp, Zea Mays
ctctcatcggcctccacacaccgacacttcactcgtccgtcaggagttgaagagatcactttatgccttgtgttcacagtatggaaggatactggatgtggtggccctgaaaacacaaaaactgagagggcaagcatgggtggcgtttagcgaaattacagctgctaccaatgctttccgtggtttgcaagatttcgatttctacagcaaaaaaatgcgagtacaatatgcaaaaacaaaatcagactgtattgcaaaagaagatggtacttatgcacctaaggagaaaaggaagaagcaagaggagaaagctgctgagaaaaaacgacgaacagaagaggcacaacaagctggcctcaatgctgctgctgcccaaagcaatggaactggctatcaagcgtctcgtctgggcaaggcttcacaggagccacctgcgcctccgaacaacatcctcttcatccagaatctgccagaccagaccacgagcatgatgctccagatcctgttccagcagtaccctggcttccgggaagtacggatgatcgaagctaaaccaggcatcgcttttgtggagttcgaggacgacggccagtccatggtcgcgatgcaggctctccaaggcttcaagatcaccccggagaaccccatggctatatcctatgccaaaaaatgagaaccctaggggactctgtaccggctttgtttcggtactctagtattgatcccaaatccacgtgtgctgaggtggattgtggtgtaaattagtttaagttacaccctaatctacctcaatacatgtagattgagctcaatactagagtatccaaactagacctaagatctttccgctccgcctttagaaatcgagccacggtacccactttccagtcatgtgtttttggaaagcactcgcttgatttcgaagttaaactcttaacacttttaaatcaggtttggtcctcagtctctatgttcactcggcttttgctcttgtcaattacggtattgcaccctatgatatatataagctgtcttgattatctgt

SEQ ID NO: 7287 - DNA, 1243 bp, Zea Mays
gttttttttctctacccgtatcctatacccgatgtggggtacccgaccctgtgttcacccatactcatagacaaaggaaaaaaccaacacactctcgcttgcggcaagaattttccggcccgaaaccgaaagcacccgcaccaatctctgcgtctcttcgtcttcggctgcgcggcggcggcagcagcggaggaggttgaggagatgctgtccggcgacatccccccgagccagaccatctacctcaacaacctcaacgagaaggtcaagaaagaagtatggaaggatactggatgtggtggccctgaaaacacaaaaactgagagggcaagcatgggtggcgtttagcgaaattacagctgctaccaatgctttccgtggtttgcaagatttcgatttctacagcaaaaaaatgcgagtacaatatgcaaaaacaaaatcagactgtattgcaaaagaagatggtacttatgcacctaaggagaaaaggaagaagcaagaggagaaagctgctgagaaaaaacgacgaacagaagaggcacaacaagctggcctcaatgctgctgctgcccaaagcaatggaactggctatcaagcgtctcgtctgggcaaggcttcacaggagccacctgcgcctccgaacaacatcctcttcatccagaatctgccagaccagaccacgagcatgatgctccagatcctgttccagcagtaccctggcttccgggaagtacggatgatcgaagctaaaccaggcatcgcttttgtggagttcgaggacgacggccagtccatggtcgcgatgcaggctctccaaggcttcaagatcaccccggagaaccccatggctatatcctatgccaaaaaatgagaaccctaggggactctgtaccggctttgtttcggtactctagtattgatcccaaatccacgtgtgctgaggtggattgtggtgtaaattagtttaagttacaccctaatctacctcaatacatgtagattgagctcaatactagagtatccaaactagacctaagatctttccgctccgcctttagaaatcgagccacggtacccactttccagtcatgtgtttttggaaagcactcgcttgatttcgaagttaaactcttaacacttttaaatcaggtttggtcctcagtctctatgttcactcggcttttgctcttgtcaattacggtattgcaccctatgatatatataagctgtcttgattatctgt

SEQ ID NO: 7288 - DNA, 2273 bp, Zea Mays
ccctgtccccgacccgccaatgctgacctccctccctccctccctcccccggccaagctcccctctcgacaggaaggagagactgacctcccatgcgaccaagaaccgagactcgccccgagagcatagcatagcttgcgcgccgccgccgacctcacctccggcatccgaagccacccggtgcgagcagatgccacgtctagtctaagccgagagccaaggtggctttgctcctattaaaagctgccaagaactgcggcgtgtaccaggaaagatcttcgagcgcgtcttcggggcatgcatggcgagtggcgacgaggactcggggatgaggtgctgagctctgcaggttgaagttgaagttgcacatagcgcatacgacatcatgttctgaaatctcgaagcacgtactgctgctactgtctggcagaggagttcgacacagagtcgagatgcctccggactcgaatggcagcttcgacgggcacgagatcgtcgaggttgtcggcgagcctggcacgccgtcggggacgacagccaggctgatggacttcatccccatcgatatctacatcccgtccgtggagcggggcgcgctcagcgagagccggcgcaagcggcggtttctggacttcctccgcgcccacccgtccaaggactggtttttgcgctccaccttcgtcggccgcctccgccggaggagccacggccaccaggagtcggcagacgacggctcggacgacggcgggcgccgcggcccgcggaggcggttccgcgtgccgttcgtgcgcaagatcaagtggcgcaagctgtggacctacgcggtgagctggtgcaggaagcccgagaacttcgcgatgatcatctggctggcgttcgtgggggccgggctgctgctgctcctcatgctcatgaccggcatgctcgacgccgccatccccgacgacgagcggcgcaagaagtggacggaggtgatcaaccagatcctcaacgcgctcttcaccatcatgtgcctgtaccagcaccccaagatcttccaccacctggtgctgctcctccggtggcgccccgacggcgaccgcgaggagatcaggaaggtgtactgcaaggacggcgccgcgcgcccgcacgaccgggcgcacatgctcctcgtcgtggccttgctgcacgtcacctgcttcgcccagtactactgctgcgccctgttctggagctacacgcgcaaggaccgcccggactgggcgctcaacatcggctacggcctcggcacgggctgccccgtcgtcgctggcctctacaccgcgtacagcccgcttggacggaaggagcccgacaccgagtcgtcgtcggcggcgccggccgatgcggcgcagcaggaccaccacaccagccgtaccgagaacgacggcgtagagatcacgatatacaaccgccgcgtggtggtgagcagcccggagtggagcggcgggctgttcgactgctgcgacgacgggacggtgtgcgcgctgtcggcgacgtgcaccttctgtgtcttcggctggaacatggagcgcctcgggttcggcaacatatgcggaagcgctacaagctcccgggcggccgctcctggtggtggtgcggcagcgcggccgtgggcgactgcgccaagtggctgttctgctggacctgcgcgctggcgcaggaggtgcggaccgccaacttctacgacgtggaggacgaccgattcgtggccatcctgggcgcgcgcaacggggagggccgccccgtgcttttgccgctcccgcgcgaggcgtcaaccacgacgtacacacggagcatgtcgtgcccgcctaagctcgacgacgcggaggacgccggcggggtgacgagctcgctgggactggagatggtcgaagccgctgctgccatggagaggtcggccacgtaccaccccatgaggccaccgctgcctccactgatgaatgagcgacgacaagagtaggactaggcatacactccaccttggtacctgtgttgcagctgtgtactgtaccatacatagtgtagagtcattctgggagtcacttctgaagtcccgttcgtatacatataagttttttttttcaagtcgtaaagaaaacataagattttttttctccaataatgccatcaccatttttttaaactttctacctatcgccatttcaaatccacaatttttatgcatcagttgccatgattagggccaggggataaatgaacaaccaatgaaccaaacaggatgaataagagcc

SEQ ID NO: 7289 - DNA, 2355 bp, Zea Mays
ccctgtccccgacccgccaatgctgacctccctccctccctccctcccccggccaagctcccctctcgacaggaaggagagactgacctcccatgcgaccaagaaccgagactcgccccgagagcatagcatagcttgcgcgccgccgccgacctcacctccggcatccgaagccacccggtgcgagcagatgccacgtctagtctaagccgagagccaaggtggctttgctcctattaaaagctgccaagaactgcggcgtgtaccaggaaagatcttcgagcgcgtcttcggggcatgcatggcgagtggcgacgaggactcggggatgaggtgctgagctctgcaggtagcgtgagattctgggcgatcggcagagcgacgtgccttggctgttgattcggctttatttctcttcttcctccaagccagttgaagttgaagttgcacatagcgcatacgacatcatgttctgaaatctcgaagcacgtactgctgctactgtctggcagaggagttcgacacagagtcgagatgcctccggactcgaatggcagcttcgacgggcacgagatcgtcgaggttgtcggcgagcctggcacgccgtcggggacgacagccaggctgatggacttcatccccatcgatatctacatcccgtccgtggagcggggcgcgctcagcgagagccggcgcaagcggcggtttctggacttcctccgcgcccacccgtccaaggactggtttttgcgctccaccttcgtcggccgcctccgccggaggagccacggccaccaggagtcggcagacgacggctcggacgacggcgggcgccgcggcccgcggaggcggttccgcgtgccgttcgtgcgcaagatcaagtggcgcaagctgtggacctacgcggtgagctggtgcaggaagcccgagaacttcgcgatgatcatctggctggcgttcgtgggggccgggctgctgctgctcctcatgctcatgaccggcatgctcgacgccgccatccccgacgacgagcggcgcaagaagtggacggaggtgatcaaccagatcctcaacgcgctcttcaccatcatgtgcctgtaccagcaccccaagatcttccaccacctggtgctgctcctccggtggcgccccgacggcgaccgcgaggagatcaggaaggtgtactgcaaggacggcgccgcgcgcccgcacgaccgggcgcacatgctcctcgtcgtggccttgctgcacgtcacctgcttcgcccagtactactgctgcgccctgttctggagctacacgcgcaaggaccgcccggactgggcgctcaacatcggctacggcctcggcacgggctgccccgtcgtcgctggcctctacaccgcgtacagcccgcttggacggaaggagcccgacaccgagtcgtcgtcggcggcgccggccgatgcggcgcagcaggaccaccacaccagccgtaccgagaacgacggcgtagagatcacgatatacaaccgccgcgtggtggtgagcagcccggagtggagcggcgggctgttcgactgctgcgacgacgggacggtgtgcgcgctgtcggcgacgtgcaccttctgtgtcttcggctggaacatggagcgcctcgggttcggcaacatatgcggaagcgctacaagctcccgggcggccgctcctggtggtggtgcggcagcgcggccgtgggcgactgcgccaagtggctgttctgctggacctgcgcgctggcgcaggaggtgcggaccgccaacttctacgacgtggaggacgaccgattcgtggccatcctgggcgcgcgcaacggggagggccgccccgtgcttttgccgctcccgcgcgaggcgtcaaccacgacgtacacacggagcatgtcgtgcccgcctaagctcgacgacgcggaggacgccggcggggtgacgagctcgctgggactggagatggtcgaagccgctgctgccatggagaggtcggccacgtaccaccccatgaggccaccgctgcctccactgatgaatgagcgacgacaagagtaggactaggcatacactccaccttggtacctgtgttgcagctgtgtactgtaccatacatagtgtagagtcattctgggagtcacttctgaagtcccgttcgtatacatataagttttttttttcaagtcgtaaagaaaacataagattttttttctccaataatgccatcaccatttttttaaactttctacctatcgccatttcaaatccacaatttttatgcatcagttgccatgattagggccaggggataaatgaacaaccaatgaaccaaacaggatgaataagagcc

SEQ ID NO: 7290 - DNA, 1504 bp, Zea Mays
ggaagatttctcccaccagtccaagaaggaggtagcatccggatgaggggctaaactatgaagtgcacatcttcttagcatagcataccagaacactcttgtgaatacacaagatattaagaagaagcttaatcagagccccgaccgagaaaggtcacgaaagccgacccctgtgtatcatgagcccatgtatgccactggtgtggtacctggaaaggtgataaaatatgtagtagctgtaagaaagcaagatactgttctgagaaacatcaggcactgcattggcgtactggtcataaaaatgattgcctccagataataagttcttctgctgcttcaaattcagttttgccaactgttggaaaagttcctgctaacactttttggccagaatttgagataaaaatagactatgaaggtagatttgattccgatagtggtgatgagaataactcgaagttgttggtgatgcaaagacatgggaaacctgatgctatgatgcagtcatggatggatcaatttgaggctgattctgacaacaaatgctgggcatcttttcaagagcgggtctcaagagcaccaaatcaagtgttgaggtattgtcgagaaccaaatgctaaacctctctgggcgttatcttctgggtgtccatcaaatgctgatatcccatcatgtagctactgtaaaggtccattatgttatgaatttcaggggcatgtgaccaaagtgttagctacaaagaggagtttgcttgggttcaattgtaccctacaacaactacgaggcaataataatgtttgcctattccttgctgtccaatgctgcaggtgtcaaaaagtttgcagaaagtcagaaacaattcagtaaatacccccgccagaagaattggaggttgggatgctcgaggcaggagttgacaggaaccgtctgcaagtacgtacctccttttggtactagagtttctgagatagggaggagtggcttcaatgtttccaggtctattggtcgtgaggagaccgtgggtcccagacacatggtcgttacatcgcctttggtccattttaggcactaccatagggcccatgtagatgtgatggctatagggggtgtttggtttctaaggactaatatttagtcccttcattttattccttttaagttttagtttctatatttggtaattttggaactaaaatggaataaaatgtagggactaaacattagtccctacaaaccaaacaccccaatagttgcatatgcttccattttttgtggtggccaccatgtgtggtttattagtgttcgtgccgttgaaaggctttgttgttttttcatctctaaaaggatccttggtaagctatttttgttcgcttagtctcactcagaaggtgctcgcatgcatgtgaacatttccgacgatggttcatcggcgaaagatttgattttaataaaacggaacattatggcatgctaatcttctagtggtgttttcagttgccaatat

SEQ ID NO: 7291 - DNA, 2042 bp, Zea Mays
gtcaatgtggaaccttttttaaaaaaacttgggcggtaggggaaagactgtcccatggtattatattaaaaagaagcttttttttctcgaaaaccgtagctacgctttataaatatattagaagagtggaataggtccgaagatgacccaaaaaattacaatagaccttccccttcgggaggccagaaacaagcgtacaagaaactgtccatttgttcactaataatcagcgacaacgctcagcacctcccctaaacatttggcattggcgccgccaagaaggagagccagttgccatttgtgtctttcctcctcagcagatctgagcagaagggtgaggtctggagtggctccatcaaacaccactctattccggtgcttccaaaccatccaggctcccaagatgatgagggaatccaggcctttcttaatcatcctaggaacaatgtcggaagatttctcccaccagtccaagaaggaggtagcatccggatgaggggctaaactatgaagtgcacatcttcttagcatagcataccagaacactcttgtgaatacacaagatattaagaagaagcttaatcagagccccgaccgagaaaggtcacgaaagccgacccctgtgtatcatgagcccatgtatgccactggtgtggtacctggaaaggtgataaaatatgtagtagctgtaagaaagcaagatactgttctgagaaacatcaggcactgcattggcgtactggtcataaaaatgattgcctccagataataagttcttctgctgcttcaaattcagttttgccaactgttggaaaagttcctgctaacactttttggccagaatttgagataaaaatagactatgaaggtagatttgattccgatagtggtgatgagaataactcgaagttgttggtgatgcaaagacatgggaaacctgatgctatgatgcagtcatggatggatcaatttgaggctgattctgacaacaaatgctgggcatcttttcaagagcgggtctcaagagcaccaaatcaagtgttgaggtattgtcgagaaccaaatgctaaacctctctgggcgttatcttctgggtgtccatcaaatgctgatatcccatcatgtagctactgtaaaggtccattatgttatgaatttcaggtaatgccacaattgctatatttctttgttgtgggaaatcaaccagactcccttgactgggcaacaattgctgtctacacgtgtcaaggggcatgtgaccaaagtgttagctacaaagaggagtttgcttgggttcaattgtaccctacaacaactacgaggcaataataatgtttgcctattccttgctgtccaatgctgcaggtgtcaaaaagtttgcagaaagtcagaaacaattcagtaaatacccccgccagaagaattggaggttgggatgctcgaggcaggagttgacaggaaccgtctgcaagtacgtacctccttttggtactagagtttctgagatagggaggagtggcttcaatgtttccaggtctattggtcgtgaggagaccgtgggtcccagacacatggtcgttacatcgcctttggtccattttaggcactaccatagggcccatgtagatgtgatggctatagggggtgtttggtttctaaggactaatatttagtcccttcattttattccttttaagttttagtttctatatttggtaattttggaactaaaatggaataaaatgtagggactaaacattagtccctacaaaccaaacaccccaatagttgcatatgcttccattttttgtggtggccaccatgtgtggtttattagtgttcgtgccgttgaaaggctttgttgttttttcatctctaaaaggatccttggtaagctatttttgttcgcttagtctcactcagaaggtgctcgcatgcatgtgaacatttccgacgatggttcatcggcgaaagatttgattttaataaaacggaacattatggcatgctaatcttctagtggtgttttcagttgccaatat

SEQ ID NO: 7292 - DNA, 2706 bp, Zea Mays
ggcagcgaccgttttgtcaccgcaacacccccgccgactccctcgccgccgccaggaatggagtccagcgctaagaagcttagcagcctccgtatcacctcactggatggcgatgatgacgaaaccgaggacccgcatcagccccctccagcaggaccctccgccgctgcagcagattctgatgacgacgatgaagaggaagaagcggaagtgactcttggtgtccttagcaaaccgaaacacccaggcctccttctccgccacttgttccccagcaaggccggcggcatcccggcgtggctagaccccgtgaacttgccgtcggggaagtccagctgctgcggtttttgtggcgagcctttgcagtttgttcttcagatttatgcagcagttgaagacaatgtagcagccttccatcgaactctgttcatgttcatgtgcccatccatggcgtgcttgcttcgagatcaacatgaacaatggaagcacaagcatgggaatccatgtagaagcgtgaaggttttccggtgtcaattgccacggactaatgccttctactcagctcaacctccaaagcatgaccggtctgacaaaccactgtgtccaggagcccatgtatgccactggtgtggtacctggaaaggtgataaaatatgtagtagctgtaagaaagcaagatactgttctgagaaacatcaggcactgcattggcgtactggtcataaaaatgattgcctccagataataagttcttctgctgcttcaaattcagttttgccaactgttggaaaagttcctgctaacactttttggccagaatttgagataaaaatagactatgaaggtagatttgattccgatagtggtgatgagaataactcgaagttgttggtgatgcaaagacatgggaaacctgatgctatgatgcagtcatggatggatcaatttgaggctgattctgacaacaaatgctgggcatcttttcaagagcgggtctcaagagcaccaaatcaagtgttgaggtattgtcgagaaccaaatgctaaacctctctgggcgttatcttctgggtgtccatcaaatgctgatatcccatcatgtagctactgtaaaggtccattatgttatgaatttcaggtaatgccacaattgctatatttctttgttgtgggaaatcaaccagactcccttgactgggcaacaattgctgtctacacgtgtcaaggggcatgtgaccaaagtgttagctacaaagaggagtttgcttgggttcaattgtaccctacaacaactacgaggcaataataatgtttgcctattccttgctgtccaatgctgcaggtgtcaaaaagtttgcagaaagtcagaaacaattcagtaaatacccccgccagaagaattggaggttgggatgctcgaggcagtgagtagtgagagcttcttgattcccattattgcacttatgccgagtatagatattttaagtttcacatgttctacattttaggtgcctgattttttttgttcaggcaacaggcaattttgttgtttgaatatagaaaaaacatgaattgtctcttgtgagttatctttttaattgtactagttggttgtataaggttgttgcatgctcaaaacgcaggcacttgaaatatagtaactctcaaccatgtgcatctatgtgaagtggcttgtagctttggaggaagaattgagtcaaaacggaatattgcactttaagttcttatacatggatctaagagtttcatgactcctgtgtccaccaaatgggttggcctttttcaatgttatggtttgcaattagtgttgagttggcgggctttatctgtagtattaattaattgtgccgcatcaagtgcgagtcaggtaaaaaagaatcgtgaaatgtggctgagaagttctgaactcgatttaatcctttccaaacccccttcgattcagacgcaaccgaacaagcgctaagtgggccactctgtggttgggtcgacattgtttctccttgatggaactactctcatgcctgcaaccatgtcgacctgcattaccaaagagtctttactaacttctgttatgctttcttgtatggccagggagttgacaggaaccgtctgcaagtacgtacctccttttggtactagagtttctgagatagggaggagtggcttcaatgtttccaggtctattggtcgtgaggagaccgtgggtcccagacacatggtcgttacatcgcctttggtccattttaggcactaccatagggcccatgtagatgtgatggctatagggggtgtttggtttctaaggactaatatttagtcccttcattttattccttttaagttttagtttctatatttggtaattttggaactaaaatggaataaaatgtagggactaaacattagtccctacaaaccaaacaccccaatagttgcatatgcttccattttttgtggtggccaccatgtgtggtttattagtgttcgtgccgttgaaaggctttgttgttttttcatctctaaaaggatccttggtaagctatttttgttcgcttagtctcactcagaaggtgctcgcatgcatgtgaacatttccgacgatggttcatcggcgaaagatttgattttaataaaacggaacattatggcatgctaatcttctagtggtgttttcagttgccaatat

SEQ ID NO: 7293 - DNA, 2038 bp, Zea Mays
gttttttcgcaagccagcgaggcagcgaccgttttgtcaccgcaacacccccgccgactccctcgccgccgccaggaatggagtccagcgctaagaagcttagcagcctccgtatcacctcactggatggcgatgatgacgaaaccgaggacccgcatcagccccctccagcaggaccctccgccgctgcagcagattctgatgacgacgatgaagaggaagaagcggaagtgactcttggtgtccttagcaaaccgaaacacccaggcctccttctccgccacttgttccccagcaaggccggcggcatcccggcgtggctagaccccgtgaacttgccgtcggggaagtccagctgctgcggtttttgtggcgagcctttgcagtttgttcttcagatttatgcagcagttgaagacaatgtagcagccttccatcgaactctgttcatgttcatgtgcccatccatggcgtgcttgcttcgagatcaacatgaacaatggaagcacaagcatgggaatccatgtagaaggttttccggtgtcaattgccacggactaatgccttctactcagctcaacctccaaagcatgaccggtctgacaaaccactgtgtccaggagcccatgtatgccactggtgtggtacctggaaaggtgataaaatatgtagtagctgtaagaaagcaagatactgttctgagaaacatcaggcactgcattggcgtactggtcataaaaatgattgcctccagataataagttcttctgctgcttcaaattcagttttgccaactgttggaaaagttcctgctaacactttttggccagaatttgagataaaaatagactatgaaggtagatttgattccgatagtggtgatgagaataactcgaagttgttggtgatgcaaagacatgggaaacctgatgctatgatgcagtcatggatggatcaatttgaggctgattctgacaacaaatgctgggcatcttttcaagagcgggtctcaagagcaccaaatcaagtgttgaggtattgtcgagaaccaaatgctaaacctctctgggcgttatcttctgggtgtccatcaaatgctgatatcccatcatgtagctactgtaaaggtccattatgttatgaatttcaggtaatgccacaattgctatatttctttgttgtgggaaatcaaccagactcccttgactgggcaacaattgctgtctacacgtgtcaaggggcatgtgaccaaagtgttagctacaaagaggagtttgcttgggttcaattgtaccctacaacaactacgaggcaataataatgtttgcctattccttgctgtccaatgctgcaggtgtcaaaaagtttgcagaaagtcagaaacaattcagtaaatacccccgccagaagaattggaggttgggatgctcgaggcagtgagtaggagttgacaggaaccgtctgcaagtacgtacctccttttggtactagagtttctgagatagggaggagtggcttcaatgtttccaggtctattggtcgtgaggagaccgtgggtcccagacacatggtcgttacatcgcctttggtccattttaggcactaccatagggcccatgtagatgtgatggctatagggggtgtttggtttctaaggactaatatttagtcccttcattttattccttttaagttttagtttctatatttggtaattttggaactaaaatggaataaaatgtagggactaaacattagtccctacaaaccaaacaccccaatagttgcatatgcttccattttttgtggtggccaccatgtgtggtttattagtgttcgtgccgttgaaaggctttgttgttttttcatctctaaaaggatccttggtaagctatttttgttcgcttagtctcactcagaaggtgctcgcatgcatgtgaacatttccgacgatggttcatcggcgaaagatttgattttaataaaacggaacattatggcatgctaatcttctagtggtgttttcagttgccaatat

SEQ ID NO: 7294 - DNA, 2081 bp, Zea Mays
aacgtgttgaggaggggtgggggatagggttttttcgcaagccagcgaggcagcgaccgttttgtcaccgcaacacccccgccgactccctcgccgccgccaggaatggagtccagcgctaagaagcttagcagcctccgtatcacctcactggatggcgatgatgacgaaaccgaggacccgcatcagccccctccagcaggaccctccgccgctgcagcagattctgatgacgacgatgaagaggaagaagcggaagtgactcttggtgtccttagcaaaccgaaacacccaggcctccttctccgccacttgttccccagcaaggccggcggcatcccggcgtggctagaccccgtgaacttgccgtcggggaagtccagctgctgcggtttttgtggcgagcctttgcagtttgttcttcagatttatgcagcagttgaagacaatgtagcagccttccatcgaactctgttcatgttcatgtgcccatccatggcgtgcttgcttcgagatcaacatgaacaatggaagcacaagcatgggaatccatgtagaagtggattgtgttctagcgtgaaggttttccggtgtcaattgccacggactaatgccttctactcagctcaacctccaaagcatgaccggtctgacaaaccactgtgtccaggagcccatgtatgccactggtgtggtacctggaaaggtgataaaatatgtagtagctgtaagaaagcaagatactgttctgagaaacatcaggcactgcattggcgtactggtcataaaaatgattgcctccagataataagttcttctgctgcttcaaattcagttttgccaactgttggaaaagttcctgctaacactttttggccagaatttgagataaaaatagactatgaaggtagatttgattccgatagtggtgatgagaataactcgaagttgttggtgatgcaaagacatgggaaacctgatgctatgatgcagtcatggatggatcaatttgaggctgattctgacaacaaatgctgggcatcttttcaagagcgggtctcaagagcaccaaatcaagtgttgaggtattgtcgagaaccaaatgctaaacctctctgggcgttatcttctgggtgtccatcaaatgctgatatcccatcatgtagctactgtaaaggtccattatgttatgaatttcaggtaatgccacaattgctatatttctttgttgtgggaaatcaaccagactcccttgactgggcaacaattgctgtctacacgtgtcaaggggcatgtgaccaaagtgttagctacaaagaggagtttgcttgggttcaattgtaccctacaacaactacgaggcaataataatgtttgcctattccttgctgtccaatgctgcaggtgtcaaaaagtttgcagaaagtcagaaacaattcagtaaatacccccgccagaagaattggaggttgggatgctcgaggcaggagttgacaggaaccgtctgcaagtacgtacctccttttggtactagagtttctgagatagggaggagtggcttcaatgtttccaggtctattggtcgtgaggagaccgtgggtcccagacacatggtcgttacatcgcctttggtccattttaggcactaccatagggcccatgtagatgtgatggctatagggggtgtttggtttctaaggactaatatttagtcccttcattttattccttttaagttttagtttctatatttggtaattttggaactaaaatggaataaaatgtagggactaaacattagtccctacaaaccaaacaccccaatagttgcatatgcttccattttttgtggtggccaccatgtgtggtttattagtgttcgtgccgttgaaaggctttgttgttttttcatctctaaaaggatccttggtaagctatttttgttcgcttagtctcactcagaaggtgctcgcatgcatgtgaacatttccgacgatggttcatcggcgaaagatttgattttaataaaacggaacattatggcatgctaatcttctagtggtgttttcagttgccaatat

SEQ ID NO: 7295 - DNA, 1986 bp, Zea Mays
ggaacgtgttgaggaggggtgggggatagggttttttcgcaagccagcgaggcagcgaccgttttgtcaccgcaacacccccgccgactccctcgccgccgccaggaatggagtccagcgctaagaagcttagcagcctccgtatcacctcactggatggcgatgatgacgaaaccgaggacccgcatcagccccctccagcaggaccctccgccgctgcagcagattctgatgacgacgatgaagaggaagaagcggaagtgactcttggtgtccttagcaaaccgaaacacccaggcctccttctccgccacttgttccccagcaaggccggcggcatcccggcgtggctagaccccgtgaacttgccgtcggggaagtccagctgctgcggtttttgtggcgagcctttgcagtttgttcttcagatttatgcagcagttgaagacaatgtagcagccttccatcgaactctgttcatgttcatgtgcccatccatggcgtgcttgcttcgagatcaacatgaacaatggaagcacaagcatgggaatccatgtagaagcgtgaaggttttccggtgtcaattgccacggactaatgccttctactcagctcaacctccaaagcatgaccggtctgacaaaccactgtgtccaggagcccatgtatgccactggtgtggtacctggaaaggtgataaaatatgtagtagctgtaagaaagcaagatactgttctgagaaacatcaggcactgcattggcgtactggtcataaaaatgattgcctccagataataagttcttctgctgcttcaaattcagttttgccaactgttggaaaagttcctgctaacactttttggccagaatttgagataaaaatagactatgaaggtagatttgattccgatagtggtgatgagaataactcgaagttgttggtgatgcaaagacatgggaaacctgatgctatgatgcagtcatggatggatcaatttgaggctgattctgacaacaaatgctgggcatcttttcaagagcgggtctcaagagcaccaaatcaagtgttgaggtattgtcgagaaccaaatgctaaacctctctgggcgttatcttctgggtgtccatcaaatgctgatatcccatcatgtagctactgtaaaggtccattatgttatgaatttcaggtaatgccacaattgctatatttctttgttgtgggaaatcaaccagactcccttgactgggcaacaattgctgtctacacgtgtcaaggggcatgtgaccaaagtgttagctacaaagaggagtttgcttgggttcaattgtaccctacaacaactacgaggcaataataatgtttgcctattccttgctgtccaatgctgcagggagttgacaggaaccgtctgcaagtacgtacctccttttggtactagagtttctgagatagggaggagtggcttcaatgtttccaggtctattggtcgtgaggagaccgtgggtcccagacacatggtcgttacatcgcctttggtccattttaggcactaccatagggcccatgtagatgtgatggctatagggggtgtttggtttctaaggactaatatttagtcccttcattttattccttttaagttttagtttctatatttggtaattttggaactaaaatggaataaaatgtagggactaaacattagtccctacaaaccaaacaccccaatagttgcatatgcttccattttttgtggtggccaccatgtgtggtttattagtgttcgtgccgttgaaaggctttgttgttttttcatctctaaaaggatccttggtaagctatttttgttcgcttagtctcactcagaaggtgctcgcatgcatgtgaacatttccgacgatggttcatcggcgaaagatttgattttaataaaacggaacattatggcatgctaatcttctagtggtgttttcagttgccaatat

SEQ ID NO: 7296 - DNA, 2098 bp, Zea Mays
gccccatgccccggtcagtttcacacggctgaagccagccggaacgtgttgaggaggggtgggggatagggttttttcgcaagccagcgaggcagcgaccgttttgtcaccgcaacacccccgccgactccctcgccgccgccaggaatggagtccagcgctaagaagcttagcagcctccgtatcacctcactggatggcgatgatgacgaaaccgaggacccgcatcagccccctccagcaggaccctccgccgctgcagcagattctgatgacgacgatgaagaggaagaagcggaagtgactcttggtgtccttagcaaaccgaaacacccaggcctccttctccgccacttgttccccagcaaggccggcggcatcccggcgtggctagaccccgtgaacttgccgtcggggaagtccagctgctgcggtttttgtggcgagcctttgcagtttgttcttcagcagttgaagacaatgtagcagccttccatcgaactctgttcatgttcatgtgcccatccatggcgtgcttgcttcgagatcaacatgaacaatggaagcacaagcatgggaatccatgtagaagcgtgaaggttttccggtgtcaattgccacggactaatgccttctactcagctcaacctccaaagcatgaccggtctgacaaaccactgtgtccaggagcccatgtatgccactggtgtggtacctggaaaggtgataaaatatgtagtagctgtaagaaagcaagatactgttctgagaaacatcaggcactgcattggcgtactggtcataaaaatgattgcctccagataataagttcttctgctgcttcaaattcagttttgccaactgttggaaaagttcctgctaacactttttggccagaatttgagataaaaatagactatgaaggtagatttgattccgatagtggtgatgagaataactcgaagttgttggtgatgcaaagacatgggaaacctgatgctatgatgcagtcatggatggatcaatttgaggctgattctgacaacaaatgctgggcatcttttcaagagcgggtctcaagagcaccaaatcaagtgttgaggtattgtcgagaaccaaatgctaaacctctctgggcgttatcttctgggtgtccatcaaatgctgatatcccatcatgtagctactgtaaaggtccattatgttatgaatttcaggtaatgccacaattgctatatttctttgttgtgggaaatcaaccagactcccttgactgggcaacaattgctgtctacacgtgtcaaggggcatgtgaccaaagtgttagctacaaagaggagtttgcttgggttcaattgtaccctacaacaactacgaggcaataataatgtttgcctattccttgctgtccaatgctgcaggtgtcaaaaagtttgcagaaagtcagaaacaattcagtaaatacccccgccagaagaattggaggttgggatgctcgaggcaggagttgacaggaaccgtctgcaagtacgtacctccttttggtactagagtttctgagatagggaggagtggcttcaatgtttccaggtctattggtcgtgaggagaccgtgggtcccagacacatggtcgttacatcgcctttggtccattttaggcactaccatagggcccatgtagatgtgatggctatagggggtgtttggtttctaaggactaatatttagtcccttcattttattccttttaagttttagtttctatatttggtaattttggaactaaaatggaataaaatgtagggactaaacattagtccctacaaaccaaacaccccaatagttgcatatgcttccattttttgtggtggccaccatgtgtggtttattagtgttcgtgccgttgaaaggctttgttgttttttcatctctaaaaggatccttggtaagctatttttgttcgcttagtctcactcagaaggtgctcgcatgcatgtgaacatttccgacgatggttcatcggcgaaagatttgattttaataaaacggaacattatggcatgctaatcttctagtggtgttttcagttgccaatat

SEQ ID NO: 7297 - DNA, 2093 bp, Zea Mays
gttgccccatgccccggtcagtttcacacggctgaagccagccggaacgtgttgaggaggggtgggggatagggttttttcgcaagccagcgaggcagcgaccgttttgtcaccgcaacacccccgccgactccctcgccgccgccaggaatggagtccagcgctaagaagcttagcagcctccgtatcacctcactggatggcgatgatgacgaaaccgaggacccgcatcagccccctccagcaggaccctccgccgctgcagcagattctgatgacgacgatgaagaggaagaagcggaagtgactcttggtgtccttagcaaaccgaaacacccaggcctccttctccgccacttgttccccagcaaggccggcggcatcccggcgtggctagaccccgtgaacttgccgtcggggaagtccagctgctgcggtttttgtggcgagcctttgcagtttgttcttcagatttatgcagcagttgaagacaatgtagcagccttccatcgaactctgttcatgttcatgtgcccatccatggcgtgcttgcttcgagatcaacatgaacaatggaagcacaagcatgggaatccatgtagaagcgtgaaggttttccggtgtcaattgccacggactaatgccttctactcagctcaacctccaaagcatgaccggtctgacaaaccactgtgtccaggagcccatgtatgccactggtgtggtacctggaaaggtgataaaatatgtagtagctgtaagaaagcaagatactgttctgagaaacatcaggcactgcattggcgtactggtcataaaaatgattgcctccagataataagttcttctgctgcttcaaattcagttttgccaactgttggaaaagttcctgctaacactttttggccagaatttgagataaaaatagactatgaaggtagatttgattccgatagtggtgatgagaataactcgaagttgttggtgatgcaaagacatgggaaacctgatgctatgatgcagtcatggatggatcaatttgaggctgattctgacaacaaatgctgggcatcttttcaagagcgggtctcaagagcaccaaatcaagtgttgaggtattgtcgagaaccaaatgctaaacctctctgggcgttatcttctgggtgtccatcaaatgctgatatcccatcatgtagctactgtaaaggtccattatgttatgaatttcaggtaatgccacaattgctatatttctttgttgtgggaaatcaaccagactcccttgactgggcaacaattgctgtctacacgtgtcaaggggcatgtgaccaaagtgttagctacaaagaggagtttgcttgggttcaattgtaccctacaacaactacgaggcaataataatgtttgcctattccttgctgtccaatgctgcaggtgtcaaaaagtttgcagaaagtcagaaacaattcagtaaatacccccgccagaagaattggagggagttgacaggaaccgtctgcaagtacgtacctccttttggtactagagtttctgagatagggaggagtggcttcaatgtttccaggtctattggtcgtgaggagaccgtgggtcccagacacatggtcgttacatcgcctttggtccattttaggcactaccatagggcccatgtagatgtgatggctatagggggtgtttggtttctaaggactaatatttagtcccttcattttattccttttaagttttagtttctatatttggtaattttggaactaaaatggaataaaatgtagggactaaacattagtccctacaaaccaaacaccccaatagttgcatatgcttccattttttgtggtggccaccatgtgtggtttattagtgttcgtgccgttgaaaggctttgttgttttttcatctctaaaaggatccttggtaagctatttttgttcgcttagtctcactcagaaggtgctcgcatgcatgtgaacatttccgacgatggttcatcggcgaaagatttgattttaataaaacggaacattatggcatgctaatcttctagtggtgttttcagttgccaatat

SEQ ID NO: 7298 - DNA, 2127 bp, Zea Mays
ttgggctcggttgccccatgccccggtcagtttcacacggctgaagccagccggaacgtgttgaggaggggtgggggatagggttttttcgcaagccagcgaggcagcgaccgttttgtcaccgcaacacccccgccgactccctcgccgccgccaggaatggagtccagcgctaagaagcttagcagcctccgtatcacctcactggatggcgatgatgacgaaaccgaggacccgcatcagccccctccagcaggaccctccgccgctgcagcagattctgatgacgacgatgaagaggaagaagcggaagtgactcttggtgtccttagcaaaccgaaacacccaggcctccttctccgccacttgttccccagcaaggccggcggcatcccggcgtggctagaccccgtgaacttgccgtcggggaagtccagctgctgcggtttttgtggcgagcctttgcagtttgttcttcagatttatgcagcagttgaagacaatgtagcagccttccatcgaactctgttcatgttcatgtgcccatccatggcgtgcttgcttcgagatcaacatgaacaatggaagcacaagcatgggaatccatgtagaagcgtgaaggttttccggtgtcaattgccacggactaatgccttctactcagctcaacctccaaagcatgaccggtctgacaaaccactgtgtccaggagcccatgtatgccactggtgtggtacctggaaaggtgataaaatatgtagtagctgtaagaaagcaagatactgttctgagaaacatcaggcactgcattggcgtactggtcataaaaatgattgcctccagataataagttcttctgctgcttcaaattcagttttgccaactgttggaaaagttcctgctaacactttttggccagaatttgagataaaaatagactatgaaggtagatttgattccgatagtggtgatgagaataactcgaagttgttggtgatgcaaagacatgggaaacctgatgctatgatgcagtcatggatggatcaatttgaggctgattctgacaacaaatgctgggcatcttttcaagagcgggtctcaagagcaccaaatcaagtgttgaggtattgtcgagaaccaaatgctaaacctctctgggcgttatcttctgggtgtccatcaaatgctgatatcccatcatgtagctactgtaaaggtccattatgttatgaatttcaggtaatgccacaattgctatatttctttgttgtgggaaatcaaccagactcccttgactgggcaacaattgctgtctacacgtgtcaaggggcatgtgaccaaagtgttagctacaaagaggagtttgcttgggttcaattgtaccctacaacaactacgaggcaataataatgtttgcctattccttgctgtccaatgctgcaggtgtcaaaaagtttgcagaaagtcagaaacaattcagtaaatacccccgccagaagaattggaggttgggatgctcgaggcagtgagtaggagttgacaggaaccgtctgcaagtacgtacctccttttggtactagagtttctgagatagggaggagtggcttcaatgtttccaggtctattggtcgtgaggagaccgtgggtcccagacacatggtcgttacatcgcctttggtccattttaggcactaccatagggcccatgtagatgtgatggctatagggggtgtttggtttctaaggactaatatttagtcccttcattttattccttttaagttttagtttctatatttggtaattttggaactaaaatggaataaaatgtagggactaaacattagtccctacaaaccaaacaccccaatagttgcatatgcttccattttttgtggtggccaccatgtgtggtttattagtgttcgtgccgttgaaaggctttgttgttttttcatctctaaaaggatccttggtaagctatttttgttcgcttagtctcactcagaaggtgctcgcatgcatgtgaacatttccgacgatggttcatcggcgaaagatttgattttaataaaacggaacattatggcatgctaatcttctagtggtgttttcagttgccaatat

SEQ ID NO: 7299 - DNA, 2126 bp, Zea Mays
tgccgtttgggctcggttgccccatgccccggtcagtttcacacggctgaagccagccggaacgtgttgaggaggggtgggggatagggttttttcgcaagccagcgaggcagcgaccgttttgtcaccgcaacacccccgccgactccctcgccgccgccaggaatggagtccagcgctaagaagcttagcagcctccgtatcacctcactggatggcgatgatgacgaaaccgaggacccgcatcagccccctccagcaggaccctccgccgctgcagcagattctgatgacgacgatgaagaggaagaagcggaagtgactcttggtgtccttagcaaaccgaaacacccaggcctccttctccgccacttgttccccagcaaggccggcggcatcccggcgtggctagaccccgtgaacttgccgtcggggaagtccagctgctgcggtttttgtggcgagcctttgcagtttgttcttcagatttatgcagcagttgaagacaatgtagcagccttccatcgaactctgttcatgttcatgtgcccatccatggcgtgcttgcttcgagatcaacatgaacaatggaagcacaagcatgggaatccatgtagaagcgtgaaggttttccggtgtcaattgccacggactaatgccttctactcagctcaacctccaaagcatgaccggtctgacaaaccactgtgtccaggagcccatgtatgccactggtgtggtacctggaaaggtgataaaatatgtagtagctgtaagaaagcaagatactgttctgagaaacatcaggcactgcattggcgtactggtcataaaaatgattgcctccagataataagttcttctgctgcttcaaattcagttttgccaactgttggaaaagttcctgctaacactttttggccagaatttgagataaaaatagactatgaaggtagatttgattccgatagtggtgatgagaataactcgaagttgttggtgatgcaaagacatgggaaacctgatgctatgatgcagtcatggatggatcaatttgaggctgattctgacaacaaatgctgggcatcttttcaagagcgggtctcaagagcaccaaatcaagtgttgaggtattgtcgagaaccaaatgctaaacctctctgggcgttatcttctgggtgtccatcaaatgctgatatcccatcatgtagctactgtaaaggtccattatgttatgaatttcaggtaatgccacaattgctatatttctttgttgtgggaaatcaaccagactcccttgactgggcaacaattgctgtctacacgtgtcaaggggcatgtgaccaaagtgttagctacaaagaggagtttgcttgggttcaattgtaccctacaacaactacgaggcaataataatgtttgcctattccttgctgtccaatgctgcaggtgtcaaaaagtttgcagaaagtcagaaacaattcagtaaatacccccgccagaagaattggaggttgggatgctcgaggcaggagttgacaggaaccgtctgcaagtacgtacctccttttggtactagagtttctgagatagggaggagtggcttcaatgtttccaggtctattggtcgtgaggagaccgtgggtcccagacacatggtcgttacatcgcctttggtccattttaggcactaccatagggcccatgtagatgtgatggctatagggggtgtttggtttctaaggactaatatttagtcccttcattttattccttttaagttttagtttctatatttggtaattttggaactaaaatggaataaaatgtagggactaaacattagtccctacaaaccaaacaccccaatagttgcatatgcttccattttttgtggtggccaccatgtgtggtttattagtgttcgtgccgttgaaaggctttgttgttttttcatctctaaaaggatccttggtaagctatttttgttcgcttagtctcactcagaaggtgctcgcatgcatgtgaacatttccgacgatggttcatcggcgaaagatttgattttaataaaacggaacattatggcatgctaatcttctagtggtgttttcagttgccaatat

SEQ ID NO: 7300 - DNA, 428 bp, Zea Mays
ctcgccgccgcacgcgctctggaaccttcattggccccaaccctcccgacgaccaaaactctccccgcggaataaaagaagagatattttttttgtcacgccctcggccctccccgcggaataaaagctttttctctggcctcccttcctccgaatccatccatccatccatctattgtctcccttccaattcgatgcctttgtagcgctgctgcctcgccgcgtcgtcgcgggtccccgatttccgcttgctgctgcgcttccaacaccatggacggcgggggatccggcaatgcctccggcggcagcggcggcgcatcgacgtgctgctactacgcgctcctcggcatccgcaagaacgcctccgccaccgacatacgcgccgcttaccggaggctcgcgatgacatgctcacacgttccgatcta

SEQ ID NO: 7301 - DNA, 3438 bp, Zea Mays
gcgagggagaacccagcagctcccattaatggactgcgcaacagcttaaactccgccgcccatttcaaacagaaccgaaccggccgcagcatcgcagcgcagcggtacgcgcctcggaggtggagggaatgtcggaggcggtggcgatcctctcgctctccgcgtccgccgtggtagaagacgtgctgcggcagcacgggtgccgcctcagcgaccgcgacctcgcgtcccgcagggccgaggaagctgcggggaggaggaacgaggcggcgggatggctgcgccgcacggtgggggccgttgccgcgcgcgatcttccggaggagccgtcggaggaggagtttcgcctcggcctccgcaacggccagatcctctgcggcgcgcttaatcgtgtccacccgggcgccgtcccgaaggcaagcgctccttgtgccgacggcgcggcgctgtcggcgtttcagtacttcgagaacgtgcgcaacttcctggtggcggcgcaggagatcggcctgccgtgctttgaggcctccgatttggagcagggagggaagagcgccagggtggtgaactgcgtcctcgcactgaagtcgtacggtgactggaagcaatgcggtggcaccgggccgtggaagtacggcgggaatcttaagccatcggtatccggcaagtccggccacgggaggaagaactctgaaccgttccggaggagccaatcgatcaatgaaggtgaagtgccctatgaggaagctgggttcaacggcgacgctcattttgattccagtgacatgtcaacatcccgcccccttaaaatgttggtcagtgcagttttgtccgacaaaaggccagatgaagttccacagctcttggagtccatgctgagcaaacttgttgaagaatttgaaaatcgtctaaacagccaaaatgaattggtcaaagcggctctaaaaagtggtattgataacaccaaatcattttcaaaatcaaaggtcctggttgagacccctcctaatactagtgggagaaaggagatatttactgtaaccacaaaaaaacaaaaaaagaagcatcaagagaagtggcactgaagcaacatttaattttacaacaacagtcaaagaatgttgaggaacttaagagtgatctgataactacaagggcgggtatggagtatatgcaaatgaagtactctgaggatctcaaccttcttggaaggcacctgtttagcttggctcatgctgcttctggttatcacaaagttcttgaagaaaatagaaaactatacaaccaggtgcaggatcttaaaggaagtatcagggtatattgtagggtgcgtccctttttgcctggacaagcaagtccgtccactgtgggttccatcgacgagggcaacataaccattgtcaccccttccaagtctggaaaggaaggccggaaaacttttagcttcaataaggtttttggcccatcagcaacacaagctgaggtgttcttggatactcaacccctcattcgctcggtccttgatggatacaatgtttgtatcttcgcatatggccaaaccggatcagggaagacatacacgatgagtgggcccaagaacatgactgagcaaacccaaggcgtcaactatcgggcacttggtgatctatttaagcttgctgaacaaaggaaaggaaccttcatttatgatattgctgtacaaatgattgagatttacaatgaacaagttagggatctccttgtcagtgatggtctcaacaaaaaattagagattcggaataattctcaaaatgggctaaatgttccggatgcaagccttgttcgtgtggcatcaacaatggatgtcatggaattgatgaatgttgggcaaaagaatcgtgctgttggcgcgactgcactaaatgacaggagtagtcgttcccacagttgtttaactgttcatgttcagggaagggatctgacatcagggacaatctttcgtggttgcatgcatctagttgatcttgctggaagtgaacgggttgataaatcagaggtcactggagaaaggttaaaagaagcacaacatataaacaaatcattgtcagccttaggggatgtaattgcttcgcttgcccaaaagaattcacatgtaccttacaggaatagtaaattaacacaacttctccaagattcacttggaggtcaggccaaaaccttgatgtttgttcatataagcccagaaagtgatgctgtaggagaaaccatcagcaccttgaagtttgctgagcgtgtgtcaactgttgaacttggtgctgctcgattaaataaagaatctggagaagttagagagcttaaagagcagattgctcgacttaaatcagcattagctgcgaaaaatttaggatcggagcaaatcatcagtcatgactctgaggcatttaatataaagatgccttcgcctggtttttcaaacacacgacagggtagctgtgatctactctctagccaaagtaacttcagacaaccaatggaggatgttggaaacatagaggctagagccaatcatacactgaggcaaaagaaaccaagctttgatctccaggatttattaacagcaagtgattctccttcatggccagatagcaatttgagggtaaattttcagatgggagatgaaagagaagcaattggtggggactggatagataaggttgtagtgaacaacaataattcagccagtgattgggagggtgacaacacagctttacctgactttttttaccagagatatcattcaggtatgagggagaagcagtaccagaggaacaacatgagacaaaaggatgaccacgagtatgaacagcaaaggcctcgattttactctacaaatactgatgattctgatgacattgacatagcaacaagtgattcctcagaatcagatgcattatggcagctcaatgtccaaagcatgaataactcaattagtgagagtggttcaaaggttaagaaaccacaaataaagcttagagatggttcagatgccaggacaccgattcattctcaaataccatcagggtcgagaaaagtcgcaaacggttcgagtagatctgttaggcagcctttaagcagaagcgacagcagaaggctttcatcaaatggaagacaaactggtgcaaagtagggacttacaatgatcgcgtgcagtttttgcctttttcttttctgtgtttgtcacgagagattgtgaggttgctctcgagtacagcaatgagtgacaataaacccaattgagtgtgtcagtgtggtgagttgtgatctcaacaactggtgtgtgaggccattaactttttttccttattggcttatcaggctacgttgagttcttgctaattctctgtatcttgtccataatataaatacataatgaaaagaaaggaaattgattgatcaaaa

SEQ ID NO: 7302 - DNA, 3444 bp, Zea Mays
gcgagggagaacccagcagctcccattaatggactgcgcaacagcttaaactccgccgcccatttcaaacagaaccgaaccggccgcagcatcgcagcgcagcggtacgcgcctcggaggtggagggaatgtcggaggcggtggcgatcctctcgctctccgcgtccgccgtggtagaagacgtgctgcggcagcacgggtgccgcctcagcgaccgcgacctcgcgtcccgcagggccgaggaagctgcggggaggaggaacgaggcggcgggatggctgcgccgcacggtgggggccgttgccgcgcgcgatcttccggaggagccgtcggaggaggagtttcgcctcggcctccgcaacggccagatcctctgcggcgcgcttaatcgtgtccacccgggcgccgtcccgaaggcaagcgctccttgtgccgacggcgcggcgctgtcggcgtttcagtacttcgagaacgtgcgcaacttcctggtggcggcgcaggagatcggcctgccgtgctttgaggcctccgatttggagcagggagggaagagcgccagggtggtgaactgcgtcctcgcactgaagtcgtacggtgactggaagcaatgcggtggcaccgggccgtggaagtacggcgggaatcttaagccatcggtatccggcaagtccggccacgggaggaagaactctgaaccgttccggaggagccaatcgatcaatgaaggtgaagtgccctatgaggaagctgggttcaacggcgacgctcattttgattccagtgacatgtcaacatcccgcccccttaaaatgttggtcagtgcagttttgtccgacaaaaggccagatgaagttccacagctcttggagtccatgctgagcaaacttgttgaagaatttgaaaatcgtctaaacagccaaaatgaattggtcaaagcggctctaaaaagtggtattgataacaccaaatcattttcaaaatcaaaggtcctggttgagacccctcctaatactagtgggagaaagatggatacaggagatatttactgtaaccacaaaaaaacaaaaaaagaagcatcaagagaagtggcactgaagcaacatttaattttacaacaacagtcaaagaatgttgaggaacttaagagtgatctgataactacaagggcgggtatggagtatatgcaaatgaagtactctgaggatctcaaccttcttggcacctgtttagcttggctcatgctgcttctggttatcacaaagttcttgaagaaaatagaaaactatacaaccaggtgcaggatcttaaaggaagtatcagggtatattgtagggtgcgtccctttttgcctggacaagcaagtccgtccactgtgggttccatcgacgagggcaacataaccattgtcaccccttccaagtctggaaaggaaggccggaaaacttttagcttcaataaggtttttggcccatcagcaacacaagctgaggtgttcttggatactcaacccctcattcgctcggtccttgatggatacaatgtttgtatcttcgcatatggccaaaccggatcagggaagacatacacgatgagtgggcccaagaacatgactgagcaaacccaaggcgtcaactatcgggcacttggtgatctatttaagcttgctgaacaaaggaaaggaaccttcatttatgatattgctgtacaaatgattgagatttacaatgaacaagttagggatctccttgtcagtgatggtctcaacaaaaaattagagattcggaataattctcaaaatgggctaaatgttccggatgcaagccttgttcgtgtggcatcaacaatggatgtcatggaattgatgaatgttgggcaaaagaatcgtgctgttggcgcgactgcactaaatgacaggagtagtcgttcccacagttgtttaactgttcatgttcagggaagggatctgacatcagggacaatctttcgtggttgcatgcatctagttgatcttgctggaagtgaacgggttgataaatcagaggtcactggagaaaggttaaaagaagcacaacatataaacaaatcattgtcagccttaggggatgtaattgcttcgcttgcccaaaagaattcacatgtaccttacaggaatagtaaattaacacaacttctccaagattcacttggaggtcaggccaaaaccttgatgtttgttcatataagcccagaaagtgatgctgtaggagaaaccatcagcaccttgaagtttgctgagcgtgtgtcaactgttgaacttggtgctgctcgattaaataaagaatctggagaagttagagagcttaaagagcagattgctcgacttaaatcagcattagctgcgaaaaatttaggatcggagcaaatcatcagtcatgactctgaggcatttaatataaagatgccttcgcctggtttttcaaacacacgacagggtagctgtgatctactctctagccaaagtaacttcagacaaccaatggaggatgttggaaacatagaggctagagccaatcatacactgaggcaaaagaaaccaagctttgatctccaggatttattaacagcaagtgattctccttcatggccagatagcaatttgagggtaaattttcagatgggagatgaaagagaagcaattggtggggactggatagataaggttgtagtgaacaacaataattcagccagtgattgggagggtgacaacacagctttacctgactttttttaccagagatatcattcaggtatgagggagaagcagtaccagaggaacaacatgagacaaaaggatgaccacgagtatgaacagcaaaggcctcgattttactctacaaatactgatgattctgatgacattgacatagcaacaagtgattcctcagaatcagatgcattatggcagctcaatgtccaaagcatgaataactcaattagtgagagtggttcaaaggttaagaaaccacaaataaagcttagagatggttcagatgccaggacaccgattcattctcaaataccatcagggtcgagaaaagtcgcaaacggttcgagtagatctgttaggcagcctttaagcagaagcgacagcagaaggctttcatcaaatggaagacaaactggtgcaaagtagggacttacaatgatcgcgtgcagtttttgcctttttcttttctgtgtttgtcacgagagattgtgaggttgctctcgagtacagcaatgagtgacaataaacccaattgagtgtgtcagtgtggtgagttgtgatctcaacaactggtgtgtgaggccattaactttttttccttattggcttatcaggctacgttgagttcttgctaattctctgtatcttgtccataatataaatacataatgaaaagaaaggaaattgattgatcaaaa

SEQ ID NO: 7303 - DNA, 3518 bp, Zea Mays
attataaccaccccgtcccacaaaaccactacgccgactcgccgaggctgcgagggagaacccagcagctcccattaatggactgcgcaacagcttaaactccgccgcccatttcaaacagaaccgaaccggccgcagcatcgcagcgcagcggtacgcgcctcggaggtggagggaatgtcggaggcggtggcgatcctctcgctctccgcgtccgccgtggtagaagacgtgctgcggcagcacgggtgccgcctcagcgaccgcgacctcgcgtcccgcagggccgaggaagctgcggggaggaggaacgaggcggcgggatggctgcgccgcacggtgggggccgttgccgcgcgcgatcttccggaggagccgtcggaggaggagtttcgcctcggcctccgcaacggccagatcctctgcggcgcgcttaatcgtgtccacccgggcgccgtcccgaaggtggtcgtgaatacggcggcggactccgtgctgcaggccgacggcgcggcgctgtcggcgtttcagtacttcgagaacgtgcgcaacttcctggtggcggcgcaggagatcggcctgccgtgctttgaggcctccgatttggagcagggagggaagagcgccagggtggtgaactgcgtcctcgcactgaagtcgtacggtgactggaagcaatgcggtggcaccgggccgtggaagtacggcgggaatcttaagccatcggtatccggcaagtccggccacgggaggaagaactctgaaccgttccggaggagccaatcgatcaatgaaggtgaagtgccctatgaggaagctgggttcaacggcgacgctcattttgattccagtgacatgtcaacatcccgcccccttaaaatgttggtcagtgcagttttgtccgacaaaaggccagatgaagttccacagctcttggagtccatgctgagcaaacttgttgaagaatttgaaaatcgtctaaacagccaaaatgaattggtcaaagcggctctaaaaagtggtattgataacaccaaatcattttcaaaatcaaaggtcctggttgagacccctcctaatactagtgggagaaagatggatacaggagatatttactgtaaccacaaaaaaacaaaaaaagaagcatcaagagaagtggcactgaagcaacatttaattttacaacaacagtcaaagaatgttgaggaacttaagagtgatctgataactacaagggcgggtatggagtatatgcaaatgaagtactctgaggatctcaaccttcttggaaggcacctgtttagcttggctcatgctgcttctggttatcacaaagttcttgaagaaaatagaaaactatacaaccaggtgcaggatcttaaaggaagtatcagggtatattgtagggtgcgtccctttttgcctggacaagcaagtccgtccactgtgggttccatcgacgagggcaacataaccattgtcaccccttccaagtctggaaaggaaggccggaaaacttttagcttcaataaggtttttggcccatcagcaacacaagctgaggtgttcttggatactcaacccctcattcgctcggtccttgatggatacaatgtttgtatcttcgcatatggccaaaccggatcagggaagacatacacgatgagtgggcccaagaacatgactgagcaaacccaaggcgtcaactatcgggcacttggtgatctatttaagcttgctgaacaaaggaaaggaaccttcatttatgatattgctgtacaaatgattgagatttacaatgaacaagttagggatctccttgtcagtgatggtctcaacaaaaaattagagattcggaataattctcaaaatgggctaaatgttccggatgcaagccttgttcgtgtggcatcaacaatggatgtcatggaattgatgaatgttgggcaaaagaatcgtgctgttggcgcgactgcactaaatgacaggagtagtcgttcccacagttgtttaactgttcatgttcagggaagggatctgacatcagggacaatctttcgtggttgcatgcatctagttgatcttgctggaagtgaacgggttgataaatcagaggtcactggagaaaggttaaaagaagcacaacatataaacaaatcattgtcagccttaggggatgtaattgcttcgcttgcccaaaagaattcacatgtaccttacaggaatagtaaattaacacaacttctccaagattcacttggaggtcaggccaaaaccttgatgtttgttcatataagcccagaaagtgatgctgtaggagaaaccatcagcaccttgaagtttgctgagcgtgtgtcaactgttgaacttggtgctgctcgattaaataaagaatctggagaagttagagagcttaaagagcagattgctcgacttaaatcagcattagctgcgaaaaatttaggatcggagcaaatcatcagtcatgactctgaggcatttaatataaagatgccttcgcctggtttttcaaacacacgacagggtagctgtgatctactctctagccaaagtaacttcagacaaccaatggaggatgttggaaacatagaggctagagccaatcatacactgaggcaaaagaaaccaagctttgatctccaggatttattaacagcaagtgattctccttcatggccagatagcaatttgagggtaaattttcagatgggagatgaaagagaagcaattggtggggactggatagataaggttgtagtgaacaacaataattcagccagtgattgggagggtgacaacacagctttacctgactttttttaccagagatatcattcaggtatgagggagaagcagtaccagaggaacaacatgagacaaaaggatgaccacgagtatgaacagcaaaggcctcgattttactctacaaatactgatgattctgatgacattgacatagcaacaagtgattcctcagaatcagatgcattatggcagctcaatgtccaaagcatgaataactcaattagtgagagtggttcaaaggttaagaaaccacaaataaagcttagagatggttcagatgccaggacaccgattcattctcaaataccatcagggtcgagaaaagtcgcaaacggttcgagtagatctgttaggcagcctttaagcagaagcgacagcagaaggctttcatcaaatggaagacaaactggtgcaaagtagggacttacaatgatcgcgtgcagtttttgcctttttcttttctgtgtttgtcacgagagattgtgaggttgctctcgagtacagcaatgagtgacaataaacccaattgagtgtgtcagtgtggtgagttgtgatctcaacaactggtgtgtgaggccattaactttttttccttattggcttatcaggctacgttgagttcttgctaattctctgtatcttgtccataatataaatacataatgaaaagaaaggaaattgattgatcaaaa

SEQ ID NO: 7304 - DNA, 983 bp, Zea Mays
cacaaaagcaagcctcgatcgtagcccgtgcctaaccctgccgatgccgtaataaacttgtgtgctccacgcaaccatgaaatgaacctagaaatcgcaggggcgggatgcgagtgaaaaggagcgggcaggtcaggtaggtttgaactctctcctataataatcctagctagcacacttgcccagattatattgcctgctccgacgaccttgaatattcactggccatttaatttctacttacaagcctgaatgagctagagatccatctgcttctgtacgtgctcgtcaggtacgctcgtaaaaagaaaagaaaaaaaaagaagagatcgagatcgatctgttgacgacgcccccgtcgccgatatgggcgacctctctgtcggccacagccgccgctggtgcggccgtttcgcggccgtcctttgcctgtgcgcggccttctgcaagccagatgaactcccgatggatccactgccgaacttgccgccggcgaggtcgctgcagtgcttcgaggacgaacaggcgacttcaacgatttggagccgcatctgggcgactaccctgacatctatggcgacgatgatgaacacagctttggcagcaaggttgttgcagctcctctgaggttgctcgcgtttcttggcggtgcggggctgttcttcctgggcccttgaacgaagatataaaagaactagcgatgtgatccgcgtaaatatatactccgtatatagcatgacatgagtatctagtttgtcttatatggtaaaccatactaaattttcttgtatggcattaaaaaaaattaagactttatttagttatttgactagttgttctctctggatcctctaatcagttcgaactctataagcttttttattccactcctatctagaggtcgcataatatgctaaggtgagatcttgatgtctttcgtttttttaactcgataaagttgttgtgagtctctcttataaaat

SEQ ID NO: 7305 - DNA, 879 bp, Zea Mays
aacatcagcaggttgaataaccttttgctgtcttgtttctaatgtagaaagattggagtaacctctcagtgtgctttcttcagccctctgaggtgataccatatggttaactgaatacccttcctgtaaaaatgaattccgagaggtctttttatagttatttgtgttcttgatgtagttagacatggaatcactacgaggcttcggattgaactcatgattgttgagcttggcatcggcatttaagtaaccagctgctgtgatatgactacctgagggtctatccttctcctgatgttgccatctgtcaacttttgatgaatcgagctcgtccacagactgatttcctctcaaaggactggtcaataagacttcagcaacatcagtctgatcatggctggcagaatattttcgagaaacatgatctgtatggccttttagaacgtccagggtcccatttaagaagattgaatgggagcgagtatatcaaccttggcagaaattggcaacaaactagagtcaggattgtcttggcctgtaatatcatgggtattgatgtctgcatcttctatattcatgatatgaacagaaggactttgaatgggtccaaacacatcaacattagcagaaactgcaaccgtagagttagcactgattcggcctctaatgccatgtgtcttgctgttgtcatcttctgtatttacgatatgaacaggagtgttcgaattccttcctaccaccacctctctgttaccactgtgaatgataggtgatcactgataaatctacatcaggcttggtaaaagtttcatcgtattttttttcagttgaaaagcgcacctgacactgggcctattgttcaatgaccttggttctgat

SEQ ID NO: 7306 - DNA, 2900 bp, Zea Mays
cttgccccgccgtataggagtatataataacctcctctctcttctccccatctcgccttcgattgcccttccggccatcctacctcctaccctctccacctctcctcccacccctcccctccccttccgtgtcctcccctcgcctggggatcgattcaggctacgcgtggggttgcgtccattgatgcgagggaggcaatggcggtgtcctcgccttcttctgctccggagaagaagaggaagtggctgctcagcaacaggaagtcccacctgaacgtttcttggtgttcaagaactgcacgagagccaagcttgtgccttttgacttctggaggacttgacgtccgaatgccaggagggcgtagaaccgttcgcgtctctgaagctcgctgtgcgtgccttttgtttgtttcgtttcgttcaacaacagcttggttccagcgcgttctgtccggtggcttgtcctgttttggttccgtttgttttgtttgtctcccccccaaaagaatgatctcatcccagagtggtcaatccggctctgtttagagggaagaatgttgccttcgctgcggaaaatctgatgtttcccggttccgttttcgccaggtgaccgacaagtacctgcgtgaggcgaggaagattcttgcggcggcgccagagtgtggcggcggtgacgcggtggcggcgctcggcctggtcgacgcggcgctggagctgtcgccgcggatggaggccgccctggagctgcgggcgcgcgcgctcctcgcgctgcgtcgctacagggaggtcgcggagatgctccgcgattacatccccagctgcggcaagtcgtgctctggcgaggacacctcctcgtcctcgtcggcgtccctcttgtccactggctccggtgatctcggcacgatctcccgcgccaagctcctctcgcccgaccgccaccgctccgacgacgcggaacctgacgcccgccccgtccgctccttccgctgcttcgacatctccgagctcaagcgccgcgtccttgccggcctctccaagaacccgaacaccgatacccagtggaggtacttggtcctcggccaagcttgcttccacctcggcctcatcgaggacgctatggtgctgctgcagaccggccgccgcctcgcttcggcggcgttccgccgcgagagcgtgtgctggtcggacgacagcttctcgtcgtcgtcgtcgtcctccgcgaccgccgcggctccctgcgtcccgtccggcaagacatccagctccggttgggcgttcataatcccggcgacggagtcggaggctgtgtcccagctcctggcgcacgtgaagctcctgctccggcgccgcgcggctgccatggccgcgctggacgctggcctcccggccgaggccgtgcgccatttctccaagatcctcgaggcgcgccgtggcgtgctgccgcacccgttcgccgccgcgtgcctcgtgggccgcgccgccgcgttccaggccagcgggcgtccggccgacgccatcgcggactgcaaccgcgcgctcgctctggaccctgcctacatcccggcgctccgcgcccgcgccgacctcctgcagtccgtgggcgcgctcgcggactgcctgcgtgacctggaccacctcaagctcctgtacgacgccgcgctacgcgacggcaagctcccggggccccggtggcggccgcagggcggcgtgcggtaccgcgagatctccggcgcgcaccgcaagctgacggcccgcatccaggggctgcgcggccgcgtcgccgccggcgaggcgtgcaacatcgactactacctgctgcttggcgtgcggcgcgggtgcacgcggtccgagctggagcgcgcgcacctgctgctctccctgaagctcaagcccgaccgcgccgtggtgttcggggaacgcctggagctcgtggacgagcaccgcgacctggaggcggtgcgtgaccaggcgcgcatgtccgcgctgctgctgtacaggatgctgcagaaggggtactcgttcgtcatgtcagccgttctggacgaggaggccgccgagaggcagagggcaaaggacgccgcggccgcggccgcggccgcagctgccgcgctggcggccaagcaggaagctccgaagcaggaaccaccgccgccggtgcctgagaaatccgagaacacggagagcggccgtccaagaagcccgccaccgccagggcgcgcgcagacggcgaaaccgaaaccgaagcccaaggccaaggccgcgaccaccacggcgacaatgcccaaggcggcggcggccgtgacgtctacggcccctgtttaccagggggtgttctgccgcgacatggcggtggtgggaaccctgctgtcccgcggcggcgggttcgaccgcgctctcccggtgaagtgcgaggcaatgagctgctgacgaaacgtgacatgtgcgacgtggcgtgcaaggacaggcgcaacgtgagatccagcgaggtggcgggaacgcggtgatgtgtttgaattgtttggtcgtccagctcgctgtggtactgtacagctgggggggaagtgaacaggtggtattggcatttggtattgggtgggagtgggactgacggaggggagaaaggaaaatggcgagttttaagaggacggtaattttggctgcatcttcatgaatgagttgttacattgcagtgcttctagtcgtgcccttgtacatcgccgtcgctgcctcgtgcttgcaggtttcacgctgaaacctgctccggctactgctgctggtctgtactgtacagtcgttgattgtttttgcaccaaaatgcaagatcagattctgcacccagccccatgaacatactgacctctcaatggcctctactgccgtgcagtgcttatatcatttgc

SEQ ID NO: 7307 - DNA, 1885 bp, Zea Mays
cagatcttgaatcctgtgccatattcacctgggcgtaggtagctgtaatagccccaaacatccccgcgatctatgaagctcattttggagtgcccatggctggggcagtggtcaactgtgtcaacattcgactaaatgctgccactgtagcatttctcttggagcactcctcagcagaagttgtcatggttgaccaagaatttttcaccctggcagaggattctttgaggattatcgcagataaaaagaaaggcacttttgaacagccacttctaatagttattggtgacgcaacttgcgatccaacaaccctccaagacgctttgagaaaaggagccatcgattatgaggcattcttggaaagtggagatcctgaatttgcttggagaccaccacaggatgaatggaagagtatcgcgctaggttatacttctgggacaacttctaacccaaagggtgtggtattgcatcacaggggggcttacctaatgtcactgagtggtgctttgatatggggaatgaacgaaggcgctgtttacttgtggactttgccaatgttccattgcaacggttggtgctatacatggacacttgctgctctctgcgggacaagcatatgtcttcgtcaggtttcagcgaaggccatcttctcagctatagccaacgagggcgtgactcacttctgtggggcaccggtcgtcctgaacaccatcatcaacgcccctccagccgacacgattctccccctacctcgtgtcgtcaacgtcatgaccgctggcgctgctccgccaccctctgtcctggcggcaatgtcgaagcttgggttccgcatcactcacacctacggcctgtcggagacctatggaccatccacggtgtgcgcctggaagccggaatgggacaggctgccagccgacgagcgcgcccggctccacgcgcgtcagggcgtccgttacgtgggcctggagggcctggacgtggtggacccgaagacgatgacgccggtcccggccgacggcaccacgatgggggagatcgtgatgcgcgggaacggcgtcatgaaggggtacctgaagaacccggaggcgaacgcggaggcgttcgagaacgggtggttccactcgggcgacctgggcgtgcggcacggcgacgggtacgtcgaggtgagggaccgcgccaaggacatcatcatctccggcggggagaacatcagcagcctggaggtggagaaggcggtgtacctgcacccggcggtgctggaggcgtcggtcgtggcccgcgccgacgagcggtggggggagtcgccgtgcgcgttcgtgacgctcaaggacgccgtggaccgctccgacgaggcggcgctggcgcgggacatcatgcggttctgccgcgagaagctgcccggttactgggtgcccaagtccgtggtgttcgggccgctgcccaagacagcgaccggcaagatcaagaagcatgagctcagggccaaggccaaggaactgggcccggtcgggaagagcaggatgtgatcgagcctcgagctcgtcttgctttgctacactgtactattcgtaggatggatggaagttgtatactacagactacagtgcaaactgcgtttcttctgtataacaccactactgtacgaacaatacagtcgtgtctgagcttttcttttgccagtgaggactgaactttgtatgaagtatgaactcgcgaagggcgctgcaacactgctcccacttgtatattccaaatttccaagggtacagtaatggcaagacagttaagaagttgcccaaatactagtttcgctggcacggtacaaccgtgaaactacacgtgaaatatcgaagagcaaaagacagagagtcagagacagatatct

SEQ ID NO: 7308 - DNA, 3874 bp, Zea Mays
aaaaactggactcccgcccataaacaaacagcaggaattctctgaatccaaccggaacggatcagccacggcgttcgccaccacccacgcctcgcgccacccacccaccttcccgcacagacgccctgcacactgcgccgccattaaaaaaccctcgccacggcggatctgcaccacccgctcctcatctccgccctccacatataaaaaacggcaaagcgcccccacttgttcggacgactctgcgcgcttccatcccccccccccccccaacagtcccacaccacctgcatatctccgtgcggccgtgccaagtcaaagtcgcacctcagctctgccgaggttggcattggtggtggtgacccggcgatggcggcggagcgggacatcgacgacctgccgcggaacgacgccaactacacggcgctcacgccgctctggttcctcgagcgcgccgcgctgacccacccggccagggcctccgtcgtgcacgggcccgtgcgctacacctgggccgacacctacagccgctgccgccgcctcgcctccgccctcgcgcgcagatccgtcggccacggaagcacggtagctgtaatagccccaaacatccccgcgatctatgaagctcattttggagtgcccatggctggggcagtggtcaactgtgtcaacattcgactaaatgctgccactgtagcatttctcttggagcactcctcagcagaagttgtcatggttgaccaagaatttttcaccctggcagaggattctttgaggattatcgcagataaaaagaaaggcacttttgaacagccacttctaatagttattggtgacgcaacttgcgatccaacaaccctccaagacgctttgagaaaaggagccatcgattatgaggcattcttggaaagtggagatcctgaatttgcttggagaccaccacaggatgaatggaagagtatcgcgctaggttatacttctgggacaacttctaacccaaagggtgtggtattgcatcacaggggggcttacctaatgtcactgagtggtgctttgatatggggaatgaacgaaggcgctgtttacttgtggactttgccaatgttccattgcaacggttggtgctatacatggacacttgctgctctctgcgggacaagcatatgtcttcgtcagaaggtgatttgcacaacttcaagaacaagagcacaagtcaagtcaggtcatcagaaaagacactctggtaacttgttgatgctaatgtcacaaggtctgctttcagcatgttgatataaaaaaatgaagcatgatatattaacaaagagaaatagagaaaaaaatggaaacctgcatagatgaaacacttagtactaatagagaaaataaagaatgatgaacggagtaactgaacaagtatgaatgtgtggagagaaactagtaattgaagctatgttgctgctgatcgatggtttggagcagttttcaaaaacattgaagtgtaaacatgaaagatgttagcctgaattatatatatggagataaaaggaaatacatgacacgaaattatacttggtaggtactgcattggtatgttgtctggctagaattaagattgtcatttgtgccggtataagcaggacatcatggatttttaattggaagctgaatgatgccttatctttcttattcacttcggtttctcattaataagttgtggtaagattttgttcgtatcacaagttttactaactgctcataactcaggaaaacaaggtgggctttaatggtcttgcatgtgatacaatggccacatacccacacaaatggaatgaataggttcacatttagctgggccaatgttgttgatgtcctttgagtaaaacctagggcagtactggcttgacgtttagcttcctcgatacccttgatcccccaaagtaaacttttccccccagatgctaccaagtagttctaacaataactccttttcatatgcatcaaacattatactcgattctgtctccacccaagaatgtcagacaaccaaacatcaaatgtatgaccttggagacctctctccctgcattatgtaaggcgtatttgatgagaaatcgtaatttttgacttttgatttctcttacaatattgggaattgctccaaaaatattgtcattttatggacatattgatgaagctttgcacactaagcatacacaatttgactatttttttatcgaacttgcaaagtttgaatttttcaaatcataatgcaccccacccttcgttgatggactggccggagggagtacgttctgaccaaaacttagcgttcttgaatcacttgtttggttctaactttctttgtttagttctgactttccttggtaattcctttcttcttcttttttgtaattttgagtcattgagggtatggcgtttatttaaggctttttgttgaagtaatgaagaattacaaaacacatgataaaagagttgttcttctccatgcacccaagacacctacgactacgacgagcaggtttattcatctaattaataggagtctgttctaattcgcaactgactgttctttttttcattgtactatgcgctgacaggtttcagcgaaggccatcttctcagctatagccaacgagggcgtgactcacttctgtggggcaccggtcgtcctgaacaccatcatcaacgcccctccagccgacacgattctccccctacctcgtgtcgtcaacgtcatgaccgctggcgctgctccgccaccctctgtcctggcggcaatgtcgaagcttgggttccgcatcactcacacctacggcctgtcggagacctatggaccatccacggtgtgcgcctggaagccggaatgggacaggctgccagccgacgagcgcgcccggctccacgcgcgtcagggcgtccgttacgtgggcctggagggcctggacgtggtggacccgaagacgatgacgccggtcccggccgacggcaccacgatgggggagatcgtgatgcgcgggaacggcgtcatgaaggggtacctgaagaacccggaggcgaacgcggaggcgttcgagaacgggtggttccactcgggcgacctgggcgtgcggcacggcgacgggtacgtcgaggtgagggaccgcgccaaggacatcatcatctccggcggggagaacatcagcagcctggaggtggagaaggcggtgtacctgcacccggcggtgctggaggcgtcggtcgtggcccgcgccgacgagcggtggggggagtcgccgtgcgcgttcgtgacgctcaaggacgccgtggaccgctccgacgaggcggcgctggcgcgggacatcatgcggttctgccgcgagaagctgcccggttactgggtgcccaagtccgtggtgttcgggccgctgcccaagacagcgaccggcaagatcaagaagcatgagctcagggccaaggccaaggaactgggcccggtcgggaagagcaggatgtgatcgagcctcgagctcgtcttgctttgctacactgtactattcgtaggatggatggaagttgtatactacagactacagtgcaaactgcgtttcttctgtataacaccactactgtacgaacaatacagtcgtgtctgagcttttcttttgccagtgaggactgaactttgtatgaagtatgaactcgcgaagggcgctgcaacactgctcccacttgtatattccaaatttccaagggtacagtaatggcaagacagttaagaagttgcccaaatactagtttcgctggcacggtacaaccgtgaaactacacgtgaaatatcgaagagcaaaagacagagagtcagagacagatatct

SEQ ID NO: 7309 - DNA, 2745 bp, Zea Mays
tcatccgttaattgacaagattggacagcggcttgctggctggaaaggacatctccttaacagagcaggaactgccttatgataaggatgctgttgtcataaaggcgacatcttttgaagttatatccactttaaaggatgctctcaggacaaactccctttggaaggatcaagttcaagcctatacccagcatatgggtgacttcaactatccaagactagcagatcttggtgctgctatttcaggcgccaacaagttgctttgccaggaagttcttgaagagttagatgtatgcaaacggttgaagttgactcttgagttggtaaagagggagttagagattagtaagttgcaggaatccatagcaaaaacaattgaagagaaaattactcgagaacaacgccgctacttgttgaatgagctacttaaagcaattaagaaggagctaggattggagacagatgataaaacaactttgtcagaaaaatttaggggaaggattgaagcaaaaaaagacaggtgcccccctcatgtcttacaagtcatggacgaggagctcactaagcttcagctgctagaagctagctccagtgagttcagtgtaacccgcaattatttagactggctaaccgtattgccctggggagattatagtgatgaaaactttgatgtgcaccacgctcaacatattcttgatgaagatcactatggtctagctgatgtcaaagaaagaattttggaattcatagcagttggaaagttgagaggaagttcacaaggtaagatcatatgtctttctgggccacctggagttggaaaaactagtattggacgttcaattgcacgtgcactaaaccggaagttctacagattctctgttggaggtttggccgatgtagcagaaattaagggtcataggcggacatatgttggggcaatgccagggaagatcgttcagtgtttgagatcagtaggaacagcaaatcctctagttttgatagatgagattgacaagcttgggaaagggcattcaggtgatccagccagtgcactattggaactttttgatcctgaacagaatgctaactttcttgatcactatctagatgcccctgttgacttatccaaggttctttttgtttgcactgcaaatgtcattgagatgataccaagccctctactggacaggatggaaatcattgctattgccggttatataactgatgagaagatgcatattgctaggaattatttagaaaagaagacaagggaggcctgtggcatcaagcctgagcaggttgaggtcacaaatgatgctcttcttgctcttattgaaaactactgccgtgaagctggcgtacggaaccttcaacaacagatcgaaaaaatttatcgaaatatagctctgaaacttgtccgtcaaggggtatcaaatgagtcacctcaagatatcatggtagtagaagcagaaaaaaacccggttaattttgacgttgcgacaaaagtagaagataagaactcgaagaattctattgcagaagatgcttcagtggacgtgagcccaattgattcttctcttgataatattaatgtggtgcctttaacaacagagtcagaagtagaggccaacaatgaaagcacacatagaaatatggaagtgcttgtagacaagcctgaggagaaagttgttgtcaatgcgtctaatcttggtaattttgttgggaagcctgtgttccaagcagagcgcatatacaatcagactcctgtcggagtggtcatgggtttagcttggaatgctatgggtggttcgaccttgtacattgagacagcaaaagtagaggaaagcaaaggcaagggaacactttttgtgacaggccagcttggcgatgtcatgaaagagagcgcccaaatcgcacatacagtttgtagagctgtattactagagaaagaaccaaataatcccttttttgcaaagtcaaagctgcatttgcatgttcctgctggagccacaccaaaggatgggccaagcgctgggtgcaccatggtaacatcgatgttgtccttagccatagggaaatctgtgaagaaagacttggcaatgactggtgaagtaactctaacaggacgaattcttccaatcggtggggtgaaggagaaaaccatcgctgcaaggagaagcggggtaaagacgatcatattcccatcagcaaaccgaagggattttgatgagcttgcttctaatgtaaaagaaggtcttgaagttcactttgttgacaaatacagcgaaatatatgatttagtttttacaagtgacaccaagacgcaggaaagctagtgattaactgctcgaattcatttcccatttcaattgttggcaacaacatattcaaagcaatcgagtttcatcaaatatgatgataatggctggctttacagaaactttcaaaattcctcacaagtttttgggcgcaccttaccacatgagaactaaaagccaattcttgcaagagcgtactgctaatgccaagatagcttgacaagctgcccccactcccttcctgtaaattaattgttatgtgcaagctcagaaacaatgggaatgcacaagtgtaatcattgtctgacttgtcacataattccctggtggtgtatgcatataaaccgaccattccaggttagaacttgttcggttagtctcattccacatgaattggatggggttgaaaaaaaatgtgaagaacttt

SEQ ID NO: 7310 - DNA, 3265 bp, Zea Mays
gtcccggtgccggggaggagagtgtgcttatgctccgctgccgccgacgatagcggctcggaagcggagtcctccgcggcggagggcgaagaggctgcgcgtggggaggaaggcgagggggaaaatgtctctgcgatcgtgcccgctgtcctccgccccgaggattgccacacggtcatagctttgcctttgctacagcgaccactatttccaggattttacatgccagtctatgtaaaggacgcaaagctgttgcgaactttagatgaaaatagcaaaaaatctacaccatatgctggggcttttcttgtcaagaatgaggaagataatagcattcatgaattgaaagggaaagaattgttgaattgtcttcatgatgttggcacgcttgcccagataacaagaattcaaggagatttggtggtgctacttggtcaccatcgtatacagatatctgagattgttgttgatgagccacttacagttaaagttgatcatctcaaggaactgccttatgataaggatgctgttgtcataaaggcgacatcttttgaagttatatccactttaaaggatgctctcaggacaaactccctttggaaggatcaagttcaagcctatacccagcatatgggtgacttcaactatccaagactagcagatcttggtgctgctatttcaggcgccaacaagttgctttgccaggaagttcttgaagagttagatgtatgcaaacggttgaagttgactcttgagttggtaaagagggagttagagattagtaagttgcaggaatccatagcaaaaacaattgaagagaaaattactcgagaacaacgccgctacttgttgaatgagctacttaaagcaattaagaaggagctaggattggagacagatgataaaacaactttgtcagaaaaatttaggggaaggattgaagcaaaaaaagacaggtgcccccctcatgtcttacaagtcatggacgaggagctcactaagcttcagctgctagaagctagctccagtgagttcagtgtaacccgcaattatttagactggctaaccgtattgccctggggagattatagtgatgaaaactttgatgtgcaccacgctcaacatattcttgatgaagatcactatggtctagctgatgtcaaagaaagaattttggaattcatagcagttggaaagttgagaggaagttcacaaggtaagatcatatgtctttctgggccacctggagttggaaaaactagtattggacgttcaattgcacgtgcactaaaccggaagttctacagattctctgttggaggtttggccgatgtagcagaaattaagggtcataggcggacatatgttggggcaatgccagggaagatcgttcagtgtttgagatcagtaggaacagcaaatcctctagttttgatagatgagattgacaagcttgggaaagggcattcaggtgatccagccagtgcactattggaactttttgatcctgaacagaatgctaactttcttgatcactatctagatgcccctgttgacttatccaaggttctttttgtttgcactgcaaatgtcattgagatgataccaagccctctactggacaggatggaaatcattgctattgccggttatataactgatgagaagatgcatattgctaggaattatttagaaaagaagacaagggaggcctgtggcatcaagcctgagcaggttgaggtcacaaatgatgctcttcttgctcttattgaaaactactgccgtgaagctggcgtacggaaccttcaacaacagatcgaaaaaatttatcgaaatatagctctgaaacttgtccgtcaaggggtatcaaatgagtcacctcaagatatcatggtagtagaagcagaaaaaaacccggttaattttgacgttgcgacaaaagtagaagataagaactcgaagaattctattgcagaagatgcttcagtggacgtgagcccaattgattcttctcttgataatattaatgtggtgcctttaacaacagagtcagaagtaggccacaatgagcattcaaatgaagcacctacaaaaacttttgcagaagagacagccaaactacctaatacttttaagacaccagaggccaacaatgaaagcacacatagaaatatggaagtgcttgtagacaagcctgaggagaaagttgttgtcaatgcgtctaatcttggtaattttgttgggaagcctgtgttccaagcagagcgcatatacaatcagactcctgtcggagtggtcatgggtttagcttggaatgctatgggtggttcgaccttgtacattgagacagcaaaagtagaggaaagcaaaggcaagggaacactttttgtgacaggccagcttggcgatgtcatgaaagagagcgcccaaatcgcacatacagtttgtagagctgtattactagagaaagaaccaaataatcccttttttgcaaagtcaaagctgcatttgcatgttcctgctggagccacaccaaaggatgggccaagcgctgggtgcaccatggtaacatcgatgttgtccttagccatagggaaatctgtgaagaaagacttggcaatgactggtgaagtaactctaacaggacgaattcttccaatcggtggggtgaaggagaaaaccatcgctgcaaggagaagcggggtaaagacgatcatattcccatcagcaaaccgaagggattttgatgagcttgcttctaatgtaaaagaaggtcttgaagttcactttgttgacaaatacagcgaaatatatgatttagtttttacaagtgacaccaagacgcaggaaagctagtgattaactgctcgaattcatttcccatttcaattgttggcaacaacatattcaaagcaatcgagtttcatcaaatatgatgataatggctggctttacagaaactttcaaaattcctcacaagtttttgggcgcaccttaccacatgagaactaaaagccaattcttgcaagagcgtactgctaatgccaagatagcttgacaagctgcccccactcccttcctgtaaattaattgttatgtgcaagctcagaaacaatgggaatgcacaagtgtaatcattgtctgacttgtcacataattccctggtggtgtatgcatataaaccgaccattccaggttagaacttgttcggttagtctcattccacatgaattggatggggttgaaaaaaaatgtgaagaacttt

SEQ ID NO: 7311 - DNA, 3772 bp, Zea Mays
gtcccggtgccggggaggagagtgtgcttatgctccgctgccgccgacgatagcggctcggaagcggagtcctccgcggcggagggcgaagaggctgcgcgtggggaggaaggcgagggggaaaatgtctctgcgatcgtgcccgctgtcctccgccccgaggattgccacacggtcatagctttgcctttgctacagcgaccactatttccaggattttacatgccagtctatgtaaaggacgcaaagctgttgcgaactttagatgaaaatagcaaaaaatctacaccatatgctggggcttttcttgtcaagaatgaggaagataatagcattcatgaattgaaagggaaagaattgttgaattgtcttcatgatgttggcacgcttgcccagataacaagaattcaaggagatttggtggtgctacttggtcaccatcgtatacagatatctgagattgttgttgatgagccacttacagttaaagttgatcatctcaaggaactgccttatgataaggatgctgttgtcataaaggcgacatcttttgaagttatatccactttaaaggatgctctcaggacaaactccctttggaaggatcaagttcaagcctatacccagcatatgggtgacttcaactatccaagactagcagatcttggtgctgctatttcaggcgccaacaagttgctttgccaggaagttcttgaagagttagatgtatgcaaacggttgaagttgactcttgagttggtaaagagggagttagagattagtaagttgcaggaatccatagcaaaaacaattgaagagaaaattactcgagaacaacgccgctacttgttgaatgagctacttaaagcaattaagaaggagctaggattggagacagatgataaaacaactttgtcagaaaaatttaggggaaggattgaagcaaaaaaagacaggtgcccccctcatgtcttacaagtcatggacgaggagctcactaagcttcagctgctagaagctagctccagtgagttcagtgtaacccgcaattatttagactggctaaccgtattgccctggggagattatagtgatgaaaactttgatgtgcaccacgctcaacatattcttgatgaagatcactatggtctagctgatgtcaaagaaagaattttggaattcatagcagttggaaagttgagaggaagttcacaaggtaagatcatatgtctttctgggccacctggagttggaaaaactagtattggacgttcaattgcacgtgcactaaaccggaagttctacagattctctgttggaggtttggccgatgtagcagaaattaagggtcataggcggacatatgttggggcaatgccagggaagatcgttcagtgtttgagatcagtaggaacagcaaatcctctagttttgatagatgagattgacaagcttgggaaagggcattcaggtgatccagccagtgcactattggaactttttgatcctgaacagaatgctaactttcttgatcactatctagatgcccctgttgacttatccaaggttctttttgtttgcactgcaaatgtcattgagatgataccaagccctctactggacaggatggaaatcattgctattgccggttatataactgatgagaagatgcatattgctaggaattatttagaaaagaagacaagggaggcctgtggcatcaagcctgagcaggttgaggtcacaaatgatgctcttcttgctcttattgaaaactactgccgtgaagctggcgtacggaaccttcaacaacagatcgaaaaaatttatcgaaatatagctctgaaacttgtccgtcaaggggtatcaaatgagtcacctcaagatatcatggtagtagaagcagaaaaaaacccggttaattttgacgttgcgacaaaagtagaagataagaactcgaagaattctattgcagaagatgcttcagtggacgtgagcccaattgattcttctcttgataatattaatgtggtgcctttaacaacagagtcagaagtaggccacaatgagcattcaaatgaagcacctacaaaaacttttgcagaagagacagccaaactacctaatacttttaagacaccagaggccaacaatgaaagcacacatagaaatatggaagtgcttgtagacaagcctgaggagaaagttgttgtcaatgcgtctaatcttggtaattttgttgggaagcctgtgttccaagcagagcgcatatacaatcagactcctgtcggagtggtcatgggtttagcttggaatgctatgggtggttcgaccttgtacattgagacagcaaaagtagaggaaagcaaaggcaagggaacactttttgtgacaggccagcttggcgatgtcatgaaagagagcgcccaaatcgcacatacagtttgtagagctgtattactagagaaagaaccaaataatcccttttttgcaaagtcaaagctgcatttgcatgttcctgctggagccacaccaaaggatgggccaagcgctgggtgcaccatggtaacatcgatgttgtccttagccatagggaaatctgtgaagaaagacttggcaatgactggtgaagtaactctaacaggacgaattcttccaatcggtggggtgcaccgatattttcagtcaaagaaaatgttgatttcatgattgtgcctgctcgccttcaggttctagacttcttaaatgagtatgatctgaattgaattctggtaactgagttatctacatattatagaaccagatgaatacaatgagataggggcagatcatgctctaatctatggccttttcccatctagaatatgctccgactatttgggtgggaaaaagaaccctttcctaggttgatcttgattgccccccataatcatgaactagattacctttatataagaggtgctatttaaataactcaggaaactaggaaatagacaatcaaatagaactatccaacttttcctcctactgatcgactagataagttatccataacatgcaataacattaaatacgcattcgaaagctctgaaccattcgcatgcatacatacattgtttgcaacctactctgagattatcatattattattattgtcactgaaatgtctcttaggtgaaggagaaaaccatcgctgcaaggagaagcggggtaaagacgatcatattcccatcagcaaaccgaagggattttgatgagcttgcttctaatgtaaaagaaggtcttgaagttcactttgttgacaaatacagcgaaatatatgatttagtttttacaagtgacaccaagacgcaggaaagctagtgattaactgctcgaattcatttcccatttcaattgttggcaacaacatattcaaagcaatcgagtttcatcaaatatgatgataatggctggctttacagaaactttcaaaattcctcacaagtttttgggcgcaccttaccacatgagaactaaaagccaattcttgcaagagcgtactgctaatgccaagatagcttgacaagctgcccccactcccttcctgtaaattaattgttatgtgcaagctcagaaacaatgggaatgcacaagtgtaatcattgtctgacttgtcacataattccctggtggtgtatgcatataaaccgaccattccaggttagaacttgttcggttagtctcattccacatgaattggatggggttgaaaaaaaatgtgaagaacttt

SEQ ID NO: 7312 - DNA, 3178 bp, Zea Mays
gtcccggtgccggggaggagagtgtgcttatgctccgctgccgccgacgatagcggctcggaagcggagtcctccgcggcggagggcgaagaggctgcgcgtggggaggaaggcgagggggaaaatgtctctgcgatcgtgcccgctgtcctccgccccgaggattgccacacggtcatagctttgcctttgctacagcgaccactatttccaggattttacatgccagtctatgtaaaggacgcaaagctgttgcgaactttagatgaaaatagcaaaaaatctacaccatatgctggggcttttcttgtcaagaatgaggaagataatagcattcatgaattgaaagggaaagaattgttgaattgtcttcatgatgttggcacgcttgcccagataacaagaattcaaggagatttggtggtgctacttggtcaccatcgtatacagatatctgagattgttgttgatgagccacttacagttaaagttgatcatctcaaggaactgccttatgataaggatgctgttgtcataaaggcgacatcttttgaagttatatccactttaaaggatgctctcaggacaaactccctttggaaggatcaagttcaagcctatacccagcatatgggtgacttcaactatccaagactagcagatcttggtgctgctatttcaggcgccaacaagttgctttgccaggaagttcttgaagagttagatgtatgcaaacggttgaagttgactcttgagttggtaaagagggagttagagattagtaagttgcaggagctaggattggagacagatgataaaacaactttgtcagaaaaatttaggggaaggattgaagcaaaaaaagacaggtgcccccctcatgtcttacaagtcatggacgaggagctcactaagcttcagctgctagaagctagctccagtgagttcagtgtaacccgcaattatttagactggctaaccgtattgccctggggagattatagtgatgaaaactttgatgtgcaccacgctcaacatattcttgatgaagatcactatggtctagctgatgtcaaagaaagaattttggaattcatagcagttggaaagttgagaggaagttcacaaggtaagatcatatgtctttctgggccacctggagttggaaaaactagtattggacgttcaattgcacgtgcactaaaccggaagttctacagattctctgttggaggtttggccgatgtagcagaaattaagggtcataggcggacatatgttggggcaatgccagggaagatcgttcagtgtttgagatcagtaggaacagcaaatcctctagttttgatagatgagattgacaagcttgggaaagggcattcaggtgatccagccagtgcactattggaactttttgatcctgaacagaatgctaactttcttgatcactatctagatgcccctgttgacttatccaaggttctttttgtttgcactgcaaatgtcattgagatgataccaagccctctactggacaggatggaaatcattgctattgccggttatataactgatgagaagatgcatattgctaggaattatttagaaaagaagacaagggaggcctgtggcatcaagcctgagcaggttgaggtcacaaatgatgctcttcttgctcttattgaaaactactgccgtgaagctggcgtacggaaccttcaacaacagatcgaaaaaatttatcgaaatatagctctgaaacttgtccgtcaaggggtatcaaatgagtcacctcaagatatcatggtagtagaagcagaaaaaaacccggttaattttgacgttgcgacaaaagtagaagataagaactcgaagaattctattgcagaagatgcttcagtggacgtgagcccaattgattcttctcttgataatattaatgtggtgcctttaacaacagagtcagaagtaggccacaatgagcattcaaatgaagcacctacaaaaacttttgcagaagagacagccaaactacctaatacttttaagacaccagaggccaacaatgaaagcacacatagaaatatggaagtgcttgtagacaagcctgaggagaaagttgttgtcaatgcgtctaatcttggtaattttgttgggaagcctgtgttccaagcagagcgcatatacaatcagactcctgtcggagtggtcatgggtttagcttggaatgctatgggtggttcgaccttgtacattgagacagcaaaagtagaggaaagcaaaggcaagggaacactttttgtgacaggccagcttggcgatgtcatgaaagagagcgcccaaatcgcacatacagtttgtagagctgtattactagagaaagaaccaaataatcccttttttgcaaagtcaaagctgcatttgcatgttcctgctggagccacaccaaaggatgggccaagcgctgggtgcaccatggtaacatcgatgttgtccttagccatagggaaatctgtgaagaaagacttggcaatgactggtgaagtaactctaacaggacgaattcttccaatcggtggggtgaaggagaaaaccatcgctgcaaggagaagcggggtaaagacgatcatattcccatcagcaaaccgaagggattttgatgagcttgcttctaatgtaaaagaaggtcttgaagttcactttgttgacaaatacagcgaaatatatgatttagtttttacaagtgacaccaagacgcaggaaagctagtgattaactgctcgaattcatttcccatttcaattgttggcaacaacatattcaaagcaatcgagtttcatcaaatatgatgataatggctggctttacagaaactttcaaaattcctcacaagtttttgggcgcaccttaccacatgagaactaaaagccaattcttgcaagagcgtactgctaatgccaagatagcttgacaagctgcccccactcccttcctgtaaattaattgttatgtgcaagctcagaaacaatgggaatgcacaagtgtaatcattgtctgacttgtcacataattccctggtggtgtatgcatataaaccgaccattccaggttagaacttgttcggttagtctcattccacatgaattggatggggttgaaaaaaaatgtgaagaacttt

SEQ ID NO: 7313 - DNA, 3257 bp, Zea Mays
gtcccggtgccggggaggagagtgtgcttatgctccgctgccgccgacgatagcggctcggaagcggagtcctccgcggcggagggcgaagaggctgcgcgtggggaggaaggcgagggggaaaatgtctctgcgatcgtgcccgctgtcctccgccccgaggattgccacacggtcatagctttgcctttgctacagcgaccactatttccaggattttacatgccagtctatgtaaaggacgcaaagctgttgcgaactttagatgaaaatagcaaaaaatctacaccatatgctggggcttttcttgtcaagaatgaggaagataatagcattcatgaattgaaagggaaagaattgttgaattgtcttcatgatgttggcacgcttgcccagataacaagaattcaaggagatttggtggtgctacttggtcaccatcgtatacagatatctgagattgttgttgatgagccacttacagttaaagttgatcatctcaaggaactgccttatgataaggatgctgttgtcataaaggcgacatcttttgaagttatatccactttaaaggatgctctcaggacaaactccctttggaaggatcaagttcaagcctatacccagcatatgggtgacttcaactatccaagactagcagatcttggtgctgctatttcaggcgccaacaagttgctttgccaggaagttcttgaagagttagatgtatgcaaacggttgaagttgactcttgagttggtaaagagggagttagagattagtaagttgcaggaatccatagcaaaaacaattgaagagaaaattactcgagaacaacgccgctacttgttgaatgagctacttaaagcaattaagaaggagctaggattggagacagatgataaaacaactttgtcagaaaaatttaggggaaggattgaagcaaaaaaagacaggtgcccccctcatgtcttacaagtcatggacgaggagctcactaagcttcagctgctagaagctagctccagtgagttcagtgtaacccgcaattatttagactggctaaccgtattgccctggggagattatagtgatgaaaactttgatgtgcaccacgctcaacatattcttgatgaagatcactatggtctagctgatgtcaaagaaagaattttggaattcatagcagttggaaagttgagaggaagttcacaaggtaagatcatatgtctttctgggccacctggagttggaaaaactagtattggacgttcaattgcacgtgcactaaaccggaagttctacagattctctgttggaggtttggccgatgtagcagaaattaaggcggacatatgttggggcaatgccagggaagatcgttcagtgtttgagatcagtaggaacagcaaatcctctagttttgatagatgagattgacaagcttgggaaagggcattcaggtgatccagccagtgcactattggaactttttgatcctgaacagaatgctaactttcttgatcactatctagatgcccctgttgacttatccaaggttctttttgtttgcactgcaaatgtcattgagatgataccaagccctctactggacaggatggaaatcattgctattgccggttatataactgatgagaagatgcatattgctaggaattatttagaaaagaagacaagggaggcctgtggcatcaagcctgagcaggttgaggtcacaaatgatgctcttcttgctcttattgaaaactactgccgtgaagctggcgtacggaaccttcaacaacagatcgaaaaaatttatcgaaatatagctctgaaacttgtccgtcaaggggtatcaaatgagtcacctcaagatatcatggtagtagaagcagaaaaaaacccggttaattttgacgttgcgacaaaagtagaagataagaactcgaagaattctattgcagaagatgcttcagtggacgtgagcccaattgattcttctcttgataatattaatgtggtgcctttaacaacagagtcagaagtaggccacaatgagcattcaaatgaagcacctacaaaaacttttgcagaagagacagccaaactacctaatacttttaagacaccagaggccaacaatgaaagcacacatagaaatatggaagtgcttgtagacaagcctgaggagaaagttgttgtcaatgcgtctaatcttggtaattttgttgggaagcctgtgttccaagcagagcgcatatacaatcagactcctgtcggagtggtcatgggtttagcttggaatgctatgggtggttcgaccttgtacattgagacagcaaaagtagaggaaagcaaaggcaagggaacactttttgtgacaggccagcttggcgatgtcatgaaagagagcgcccaaatcgcacatacagtttgtagagctgtattactagagaaagaaccaaataatcccttttttgcaaagtcaaagctgcatttgcatgttcctgctggagccacaccaaaggatgggccaagcgctgggtgcaccatggtaacatcgatgttgtccttagccatagggaaatctgtgaagaaagacttggcaatgactggtgaagtaactctaacaggacgaattcttccaatcggtggggtgaaggagaaaaccatcgctgcaaggagaagcggggtaaagacgatcatattcccatcagcaaaccgaagggattttgatgagcttgcttctaatgtaaaagaaggtcttgaagttcactttgttgacaaatacagcgaaatatatgatttagtttttacaagtgacaccaagacgcaggaaagctagtgattaactgctcgaattcatttcccatttcaattgttggcaacaacatattcaaagcaatcgagtttcatcaaatatgatgataatggctggctttacagaaactttcaaaattcctcacaagtttttgggcgcaccttaccacatgagaactaaaagccaattcttgcaagagcgtactgctaatgccaagatagcttgacaagctgcccccactcccttcctgtaaattaattgttatgtgcaagctcagaaacaatgggaatgcacaagtgtaatcattgtctgacttgtcacataattccctggtggtgtatgcatataaaccgaccattccaggttagaacttgttcggttagtctcattccacatgaattggatggggttgaaaaaaaatgtgaagaacttt

SEQ ID NO: 7314 - DNA, 407 bp, Zea Mays
cacaaacctgagacccgccacacttctccagagtgccagcgccggccctagcacctccaccgcaactctgacgcttggaccactggatctgctgctggccgtcgaccgccatcagaagggacttgttgcaagctgaggacaccaggaaacccttgtttgctactgctcaagtggccaggtgatgtatatggcggtggtgatgcctgattcttttgcacgtcttcgaagttgatcaataaggcttaaggagatggatggtgctgctcatagctgaatgtgtgtgtgtatgtgtgtaatagcaactacctcagactgttttgaatctattttagacctattaatcacctgtaatgaacatgttgtggagctattatgaactgattattagcttatcatgcgcatgtgat

SEQ ID NO: 7315 - DNA, 1874 bp, Zea Mays
gtagcgtaagatgcaaggtaaccatctacagaagaactgtttcaaattttgcaataagatataatagataattattcatgtactcaactatgataatgtcgtgtttacattttagctgttggtacatacacacaacatggacatcctaggcctgggatctgaccaaaggtgcagaggtctcactaggattttggagcatgccgccacttcattgagcaatagcaaattctccatttgcagaccatatgcattctgtcagtaagcataaaaaacgatatcaatgttcataaatacatcccatgctaaccaaacatacaaaataatagaaggtcaaattctatgctaagattcaccaaaataattggagcgcagaaaggatgaattaaaacaagataaccagggtgtaaaaaaatcctattgttgtggtggtgtaccttgtccatcattctgaaaaacatagaaaattgattcaatgcatatccttaacactggaaactctaggacaactcatggacgatttatttgatatcggcaattttaatatgcatacatcagaatctagtttgccttctggatacatgggcagtgtatcacaaaaccaaatgttaaaaggcatgtcaaacctgcaagatcaacccaagtgtataataaaccagcggatgaagaaaactagaataacggttttgcaaaagaaatatataatcctatgcaaataggcaaactcaatagaaacatgcagctgtttactttaactacctaccagccacttttattagtccaatataagtactcatccaataaacatattaacggtaaagttgatacatcattcaacagtaccctgcctttcagccaaaaaggcaacccaatgaaccacgtcaattcaaggtgcaaacacataagggagtaggatccatctgccaaactgttgtttaaggatgtttaatgcttcgaaaggtaatcaaccacaacaagctaataggaaaggattaggaagaacattcctgaacttgttggcatatatgtttcatccatacataccaatcctctactctctatttgttatttatggaacccctccctccaatgccccaccccaaaaacatacaaacaaacacatggacatacacagagaggtcgcagtggatccatgtaaagcctagggggttcacagaatacacaattatatatatgctaatcatgtaatatttgtgttaattcatttaaaactaatgtgcttggttccacaggtagtcaggtattgaatcctggatcgtccactggtctacataactaacataacatcagcatcggcagaacgaattagctaccacaacaaataattaatacaccaaaacgaagaggccgtcgatcgggtatgcatgcttcctgcccctttcctcacctcctgggtggggtggtgatggccgcggacgacagtgcttcagagctcggcctgctcggcggcggcggatataccggggacggggcaaatacagccaggggagaggacgacgagaggcaacaggtcgaagcaggcgacgccagcatccgtcgtcgtcgtggacgcggtggctgccaccaaggaggcgacaccgttcttgctgccgtcaatgtgagcttgtgtgcctcctcacagagccactcaccattgcatcgtagatctaggcgagcggcgacggcacgaggaagctgaaggcgttgaggctgagctagaggacgagcttggacgaccaccacactgagtgccacgagttgcggcagtcgtgcacctctctggcgtccacgtcgggcggggttggatgcggcggcaggattggcatctatcgcggcggcggcgggttacgatggatggggttggggtagggtgcaag

SEQ ID NO: 7316 - DNA, 3174 bp, Zea Mays
ggagacggaagccaagcctccaagggggccgtcgcagaactcgcgccaccgcccgccatggcttcgtcatctaaggcctccgactcctcctcccaacgatccaagcggtcggatcaagggacgggcagggaagccgctcccgcctctgttgtcccgatccacgggaacctgacgcagttgatacgccaaatcaaatcgaggcgcctcttgtacatcaaggagaaattggaggcgaacaggaagacgctgcagaggcactcctgcgcgctgttcgacgtggcagcggcggcggaggtggcgtcgaggggcagcgatggcggcaacgctttgtcgcagcgagcggcggagggacagttcaggctcgctgggtcagacctggcacacgggataggggagagggacgtggtgtacatgcaggaggagaacctggcgtccgggacgctcgtgctctccagctcgggcgctgccgcgcagcggacagtcgtgcggttcgtgaagctgccgttggttgagaggatccctccgtacaccacttggatcttcctggacaaaatttactatgatccaatcggaaacgaggctctgatctgcagtgacagcgatgaagaaattccagaaccagaggaagagaaacactttttcacagagggagaagatcaattgatatggagagctactcaagagcatgggttaaaccgagaggttgttaatgtcctctgccagtttattgattcaactccatcagaaattgaggaaagatctgaagtcctatttgagaaaaatgagaaaaactctggatcttcagataagatagagaggcaactttctcttgacaaaactatggatgccgttctggattcttttgataatctcttctgccgcagatgcttggtttttgattgtcgcctccatggttgctcacagaatttggtattcccaagtgagaagcaaccctacagctttgagcctgatgaaaacaagaagccatgtggtcgtcagtgctaccttcgatttccacagtggagagaaggatttcaagagattcatgatgttggtcttagtggctgtgcaacatataatatggaatcaggaactgtctcacacaaagttgatgttagtattatgtctgaatcagaagattcaaaccgtgagaaaggcaacattaggtccatgacactagttggaaccagtggatcaaaaataatttcttctgttagtgctgaagaaagcactactccgccttcagcagatacctctgaaacagagaatgcatcctctgatatgcctcccagtagtttaaggaaatacaagatttcaaaacgtggacctaggtacagggagcgttctcctggcaaaaggcagaaggtttttacttatgacatttcttttgcaagcaatatactgaataaactttcgattccggagattcgcgacacaagactagagtctagagaacctggaggtgataaactacaaattcttgacgagtccactaagaaaacttcaagcaaagatatctgtggagaaagcccaattactactactgaaaatgtgggaagagagagtaaaaaagtatcttcaacaaagaatttcttggagcacactctttcatgttggagtgccttagagcgagatctatacttgaagggcatagagatatttggaaagaacagctgtctcattgccagaaacttactatctggtatgaagacctgcatggaagtggccaactacatgtataacaatggtgcagcaatggcgaagagacctctcttgaataaatccatctcaggcgactttgcagaaactgaacaagactacatggagcaagacatggttgccagaacaagaatctatcgtcggaggggccgcaatcgaaagctgaaatatacttggaagtctgcagggcatccaactgttagaaaaagaattggtgatgggaagcaatggtacacacaatataacccatgcgtgtgccagcaaatgtgtggtaaagattgcccctgtgtggaaaatggaacttgctgcgaaaagtactgtgggtgttcgaagagctgcaaaaacaagtttagaggctgtcattgtgcaaaaagtcaatgcagaagcagacagtgcccctgttttgcagccagtcgtgaatgtgatccagatgtttgtaggaattgttgggtgagctgtggagatggttcactaggtgagccacctgccagaggtgatggttatcagtgtggaaatatgaagctccttttgaaacaacaacaaaggattttgttaggaagatctgatgttgcaggttggggtgcattcatcaagaatcctgtaaataaaaatgattatcttggagaatatactggtgaattgatctctcacaaggaagcagacaaacgtggcaaaatttatgaccgggcaaactcatcatttctgtttgatttaaatgaccagtatgtgttggatgcttatcgcaagggggacaaattaaagtttgcaaatcactcatctaaccccaactgctatgcaaaggtgatgctggtggctggcgaccatcgggttggtatctatgcgaaggagcatattgaggctagtgaggaactcttctatgattatcgttatgggcctgaccaggctccagcttgggctaggagacccgaagggtcaaagaaggacgaagcatccgtctctcaccatcgagcacacaaagttgctcgatagctgaagagcagctccggatgatacaatatgcagtaaattatatatttaatacatgatttagtcctagttcattatacgaggacttcgttggtagataagcatattgtatattcattagtgaataaactcccatacatcaagttggggaataagtgcatataaatattttttaccttaggtcggaaggtgacaaactgacaaccttgttaggttgagtaaagttagtgcttacaggttttcaaactggtgtggccattgctagagtatcaaatagctgagatggctacaactatagccttgtttgtatttttttttggcaagagggatggaatttatttgccaaatgtacacattgttgcaggaagtatttaatgatttaggaggtgttcttcagtcaccctcctaaattttagaaattaaactttagtctctaaaatttctgtttaggaggtctcatttagtcat

SEQ ID NO: 7317 - DNA, 3319 bp, Zea Mays
ggagacggaagccaagcctccaagggggccgtcgcagaactcgcgccaccgcccgccatggcttcgtcatctaaggcctccgactcctcctcccaacgatccaagcggtcggatcaagggacgggcagggaagccgctcccgcctctgttgtcccgatccacgggaacctgacgcagttgatacgccaaatcaaatcgaggcgcctcttgtacatcaaggtgagcgaccgcgcccggcccgatcatgtcactgaaattccgggggagtagagcgtcgggtttagtttcctcaatcggatgtgacggtgggttgggtatttggctctctttgcaggagaaattggaggcgaacaggaagacgctgcagaggcactcctgcgcgctgttcgacgtggcagcggcggcggaggtggcgtcgaggggcagcgatggcggcaacgctttgtcgcagcgagcggcggagggacagttcaggctcgctgggtcagacctggcacacgggataggggagagggacgtggtgtacatgcaggaggagaacctggcgtccgggacgctcgtgctctccagctcgggcgctgccgcgcagcggacagtcgtgcggttcgtgaagctgccgttggttgagaggatccctccgtacaccacttggatcttcctggacaaaaatcaaagaatggctgatgatcagtcagttgttggtaggagaagaatttactatgatccaatcggaaacgaggctctgatctgcagtgacagcgatgaagaaattccagaaccagaggaagagaaacactttttcacagagggagaagatcaattgatatggagagctactcaagagcatgggttaaaccgagaggttgttaatgtcctctgccagtttattgattcaactccatcagaaattgaggaaagatctgaagtcctatttgagaaaaatgagaaaaactctggatcttcagataagatagagaggcaactttctcttgacaaaactatggatgccgttctggattcttttgataatctcttctgccgcagatgcttggtttttgattgtcgcctccatggttgctcacagaatttggtattcccaagtgagaagcaaccctacagctttgagcctgatgaaaacaagaagccatgtggtcgtcagtgctaccttcgatttccacagtggagagaaggatttcaagagattcatgatgttggtcttagtggctgtgcaacatataatatggaatcaggaactgtctcacacaaagttgatgttagtattatgtctgaatcagaagattcaaaccgtgagaaaggcaacattaggtccatgacactagttggaaccagtggatcaaaaataatttcttctgttagtgctgaagaaagcactactccgccttcagcagatacctctgaaacagagaatgcatcctctgatatgcctcccagtagtttaaggaaatacaagatttcaaaacgtggacctaggtacagggagcgttctcctggcaaaaggcagaaggtttttacttatgacatttcttttgcaagcaatatactgaataaactttcgattccggagattcgcgacacaagactagagtctagagaacctggaggtgataaactacaaattcttgacgagtccactaagaaaacttcaagcaaagatatctgtggagaaagcccaattactactactgaaaatgtgggaagagagagtaaaaaagtatcttcaacaaagaatttcttggagcacactctttcatgttggagtgccttagagcgagatctatacttgaagggcatagagatatttggaaagaacagaaacttactatctggtatgaagacctgcatggaagtggccaactacatgtataacaatggtgcagcaatggcgaagagacctctcttgaataaatccatctcaggcgactttgcagaaactgaacaagactacatggagcaagacatggttgccagaacaagaatctatcgtcggaggggccgcaatcgaaagctgaaatatacttggaagtctgcagggcatccaactgttagaaaaagaattggtgatgggaagcaatggtacacacaatataacccatgcgtgtgccagcaaatgtgtggtaaagattgcccctgtgtggaaaatggaacttgctgcgaaaagtactgtgggtgttcgaagagctgcaaaaacaagtttagaggctgtcattgtgcaaaaagtcaatgcagaagcagacagtgcccctgttttgcagccagtcgtgaatgtgatccagatgtttgtaggaattgttgggtgagctgtggagatggttcactaggtgagccacctgccagaggtgatggttatcagtgtggaaatatgaagctccttttgaaacaacaacaaaggattttgttaggaagatctgatgttgcaggttggggtgcattcatcaagaatcctgtaaataaaaatgattatcttggagaatatactggtgaattgatctctcacaaggaagcagacaaacgtggcaaaatttatgaccgggcaaactcatcatttctgtttgatttaaatgaccagtatgtgttggatgcttatcgcaagggggacaaattaaagtttgcaaatcactcatctaaccccaactgctatgcaaaggtgatgctggtggctggcgaccatcgggttggtatctatgcgaaggagcatattgaggctagtgaggaactcttctatgattatcgttatgggcctgaccaggctccagcttgggctaggagacccgaagggtcaaagaaggacgaagcatccgtctctcaccatcgagcacacaaagttgctcgatagctgaagagcagctccggatgatacaatatgcagtaaattatatatttaatacatgatttagtcctagttcattatacgaggacttcgttggtagataagcatattgtatattcattagtgaataaactcccatacatcaagttggggaataagtgcatataaatattttttaccttaggtcggaaggtgacaaactgacaaccttgttaggttgagtaaagttagtgcttacaggttttcaaactggtgtggccattgctagagtatcaaatagctgagatggctacaactatagccttgtttgtatttttttttggcaagagggatggaatttatttgccaaatgtacacattgttgcaggaagtatttaatgatttaggaggtgttcttcagtcaccctcctaaattttagaaattaaactttagtctctaaaatttctgtttaggaggtctcatttagtcat

SEQ ID NO: 7318 - DNA, 2806 bp, Zea Mays
tggagacggaagccaagcctccaagggggccgtcgcagaactcgcgccaccgcccgccatggcttcgtcatctaaggcctccgactcctcctcccaacgatccaagcggtcggatcaagggacgggcagggaagccgctcccgcctctgttgtcccgatccacgggaacctgacgcagttgatacgccaaatcaaatcgaggcgcctcttgtacatcaaggagaaattggaggcgaacaggaagacgctgcagaggcactcctgcgcgctgttcgacgtggcagcggcggcggaggtggcgtcgaggggcagcgatggcggcaacgctttgtcgcagcgagcggcggagggacagttcaggctcgctgggtcagacctggcacacgggataggggagagggacgtggtgtacatgcaggaggagaacctggcgtccgggacgctcgtgctctccagctcgggcgctgccgcgcagcggacagtcgtgcggttcgtgaagctgccgttggttgagaggatccctccgtacaccacttggatcttcctggacaaaaatcaaagaatggctgatgatcagtcagttgttggtaggagaagaatttactatgatccaatcggaaacgaggctctgatctgcagtgacagcgatgaagaaattccagaaccagaggaagagaaacactttttcacagagggagaagatcaattgatatggagagctactcaagagcatgggttaaaccgagaggttgttaatgtcctctgccagtttattgattcaactccatcagaaattgaggaaagatctgaagtcctatttgagaaaaatgagaaaaactctggatcttcagataagatagagaggcaactttctcttgacaaaactatggatgccgttctggattcttttgataatctcttctgccgcagatgcttggtttttgattgtcgcctccatggttgctcacagaatttggtattcccaagtgagaagcaaccctacagctttgagcctgatgaaaacaagaagccatgtggtcgtcagtgctaccttcgaattcgcgacacaagactagagtctagagaacctggaggtgataaactacaaattcttgacgagtccactaagaaaacttcaagcaaagatatctgtggagaaagcccaattactactactgaaaatgtgggaagagagagtaaaaaagtatcttcaacaaagaatttcttggagcacactctttcatgttggagtgccttagagcgagatctatacttgaagggcatagagatatttggaaagaacagctgtctcattgccagaaacttactatctggtatgaagacctgcatggaagtggccaactacatgtataacaatggtgcagcaatggcgaagagacctctcttgaataaatccatctcaggcgactttgcagaaactgaacaagactacatggagcaagacatggttgccagaacaagaatctatcgtcggaggggccgcaatcgaaagctgaaatatacttggaagtctgcagggcatccaactgttagaaaaagaattggtgatgggaagcaatggtacacacaatataacccatgcgtgtgccagcaaatgtgtggtaaagattgcccctgtgtggaaaatggaacttgctgcgaaaagtactgtgggtgttcgaagagctgcaaaaacaagtttagaggctgtcattgtgcaaaaagtcaatgcagaagcagacagtgcccctgttttgcagccagtcgtgaatgtgatccagatgtttgtaggaattgttgggtgagctgtggagatggttcactaggtgagccacctgccagaggtgatggttatcagtgtggaaatatgaagctccttttgaaacaacaacaaaggattttgttaggaagatctgatgttgcaggttggggtgcattcatcaagaatcctgtaaataaaaatgattatcttggagaatatactggtgaattgatctctcacaaggaagcagacaaacgtggcaaaatttatgaccgggcaaactcatcatttctgtttgatttaaatgaccagtatgtgttggatgcttatcgcaagggggacaaattaaagtttgcaaatcactcatctaaccccaactgctatgcaaaggtgatgctggtggctggcgaccatcgggttggtatctatgcgaaggagcatattgaggctagtgaggaactcttctatgattatcgttatgggcctgaccaggctccagcttgggctaggagacccgaagggtcaaagaaggacgaagcatccgtctctcaccatcgagcacacaaagttgctcgatagctgaagagcagctccggatgatacaatatgcagtaaattatatatttaatacatgatttagtcctagttcattatacgaggacttcgttggtagataagcatattgtatattcattagtgaataaactcccatacatcaagttggggaataagtgcatataaatattttttaccttaggtcggaaggtgacaaactgacaaccttgttaggttgagtaaagttagtgcttacaggttttcaaactggtgtggccattgctagagtatcaaatagctgagatggctacaactatagccttgtttgtatttttttttggcaagagggatggaatttatttgccaaatgtacacattgttgcaggaagtatttaatgatttaggaggtgttcttcagtcaccctcctaaattttagaaattaaactttagtctctaaaatttctgtttaggaggtctcatttagtcat

SEQ ID NO: 7319 - DNA, 3219 bp, Zea Mays
ggagactggagagtggagacggaagccaagcctccaagggggccgtcgcagaactcgcgccaccgcccgccatggcttcgtcatctaaggcctccgactcctcctcccaacgatccaagcggtcggatcaagggacgggcagggaagccgctcccgcctctgttgtcccgatccacgggaacctgacgcagttgatacgccaaatcaaatcgaggcgcctcttgtacatcaaggagaaattggaggcgaacaggaagacgctgcagaggcactcctgcgcgctgttcgacgtggcagcggcggcggaggtggcgtcgaggggcagcgatggcggcaacgctttgtcgcagcgagcggcggagggacagttcaggctcgctgggtcagacctggcacacgggataggggagagggacgtggtgtacatgcaggaggagaacctggcgtccgggacgctcgtgctctccagctcgggcgctgccgcgcagcggacagtcgtgcggttcgtgaagctgccgttggttgagaggatccctccgtacaccacttggatcttcctggacaaaaatcaaagaatggctgatgatcagtcagttgttggtaggagaagaatttactatgatccaatcggaaacgaggctctgatctgcagtgacagcgatgaagaaattccagaaccagaggaagagaaacactttttcacagagggagaagatcaattgatatggagagctactcaagagcatgggttaaaccgagaggttgttaatgtcctctgccagtttattgattcaactccatcagaaattgaggaaagatctgaagtcctatttgagaaaaatgagaaaaactctggatcttcagataagatagagaggcaactttctcttgacaaaactatggatgccgttctggattcttttgataatctcttctgccgcagatgcttggtttttgattgtcgcctccatggttgctcacagaatttggtattcccaagtgagaagcaaccctacagctttgagcctgatgaaaacaagaagccatgtggtcgtcagtgctaccttcgatggagagaaggatttcaagagattcatgatgttggtcttagtggctgtgcaacatataatatggaatcaggaactgtctcacacaaagttgatgttagtattatgtctgaatcagaagattcaaaccgtgagaaaggcaacattaggtccatgacactagttggaaccagtggatcaaaaataatttcttctgttagtgctgaagaaagcactactccgccttcagcagatacctctgaaacagagaatgcatcctctgatatgcctcccagtagtttaaggaaatacaagatttcaaaacgtggacctaggtacagggagcgttctcctggcaaaaggcagaaggtttttacttatgacatttcttttgcaagcaatatactgaataaactttcgattccggagattcgcgacacaagactagagtctagagaacctggaggtgataaactacaaattcttgacgagtccactaagaaaacttcaagcaaagatatctgtggagaaagcccaattactactactgaaaatgtgggaagagagagtaaaaaagtatcttcaacaaagaatttcttggagcacactctttcatgttggagtgccttagagcgagatctatacttgaagggcatagagatatttggaaagaacagctgtctcattgccagaaacttactatctggtatgaagacctgcatggaagtggccaactacatgtataacaatggtgcagcaatggcgaagagacctctcttgaataaatccatctcaggcgactttgcagaaactgaacaagactacatggagcaagacatggttgccagaacaagaatctatcgtcggaggggccgcaatcgaaagctgaaatatacttggaagtctgcagggcatccaactgttagaaaaagaattggtgatgggaagcaatggtacacacaatataacccatgcgtgtgccagcaaatgtgtggtaaagattgcccctgtgtggaaaatggaacttgctgcgaaaagtactgtgggtgttcgaagagctgcaaaaacaagtttagaggctgtcattgtgcaaaaagtcaatgcagaagcagacagtgcccctgttttgcagccagtcgtgaatgtgatccagatgtttgtaggaattgttggctgtggagatggttcactaggtgagccacctgccagaggtgatggttatcagtgtggaaatatgaagctccttttgaaacaacaacaaaggattttgttaggaagatctgatgttgcaggttggggtgcattcatcaagaatcctgtaaataaaaatgattatcttggagaatatactggtgaattgatctctcacaaggaagcagacaaacgtggcaaaatttatgaccgggcaaactcatcatttctgtttgatttaaatgaccagtatgtgttggatgcttatcgcaagggggacaaattaaagtttgcaaatcactcatctaaccccaactgctatgcaaaggtgatgctggtggctggcgaccatcgggttggtatctatgcgaaggagcatattgaggctagtgaggaactcttctatgattatcgttatgggcctgaccaggctccagcttgggctaggagacccgaagggtcaaagaaggacgaagcatccgtctctcaccatcgagcacacaaagttgctcgatagctgaagagcagctccggatgatacaatatgcagtaaattatatatttaatacatgatttagtcctagttcattatacgaggacttcgttggtagataagcatattgtatattcattagtgaataaactcccatacatcaagttggggaataagtgcatataaatattttttaccttaggtcggaaggtgacaaactgacaaccttgttaggttgagtaaagttagtgcttacaggttttcaaactggtgtggccattgctagagtatcaaatagctgagatggctacaactatagccttgtttgtatttttttttggcaagagggatggaatttatttgccaaatgtacacattgttgcaggaagtatttaatgatttaggaggtgttcttcagtcaccctcctaaattttagaaattaaactttagtctctaaaatttctgtttaggaggtctcatttagtcat

SEQ ID NO: 7320 - DNA, 3150 bp, Zea Mays
gtctttcgtagcggagtgtggagactggagagtggagacggaagccaagcctccaagggggccgtcgcagaactcgcgccaccgcccgccatggcttcgtcatctaaggcctccgactcctcctcccaacgatccaagcggtcggatcaagggacgggcagggaagccgctcccgcctctgttgtcccgatccacgggaacctgacgcagttgatacgccaaatcaaatcgaggcgcctcttgtacatcaaggagaaattggaggcgaacaggaagacgctgcagaggcactcctgcgcgctgttcgacgtggcagcggcggcggaggtggcgtcgaggggcagcgatggcggcaacgctttgtcgcagcgagcggcggagggacagttcaggctcgctgggtcagacctggcacacgggataggggagagggacgtggtgtacatgcaggaggagaacctggcgtccgggacgctcgtgctctccagctcgggcgctgccgcgcagcggacagtcgtgcggttcgtgaagctgccgttggttgagaggatccctccgtacaccacttggatcttcctggacaaaaatcaaagaatggctgatgatcagtcagttgttggtaggagaagaatttactatgatccaatcggaaacgaggctctgatctgcagtgacagcgatgaagaaattccagaaccagaggaagagaaacactttttcacagagggagaagatcaattgatatggagagctactcaagagcatgggttaaaccgagaggttgttaatgtcctctgccagtttattgattcaactccatcagaaattgaggaaagatctgaagtcctatttgagaaaaatgagaaaaactctggatcttcagataagatagagaggcaactttctcttgacaaaactatggatgccgttctggattcttttgataatctcttctgccgcagatgcttggtttttgattgtcgcctccatggttgctcacagaatttggtattcccaagtgagaagcaaccctacagctttgagcctgatgaaaacaagaagccatgtggtcgtcagtgctaccttcgatggagagaaggatttcaagagattcatgatgttggtcttagtggctgtgcaacatataatatggaatcaggaactgtctcacacaaagttgatgttagtattatgtctgaatcagaagattcaaaccgtgagaaaggcaacattaggtccatgacactagttggaaccagtggatcaaaaataatttcttctgttagtgctgaagaaagcactactccgccttcagcagatacctctgaaacagagaatgcatcctctgatatgcctcccagtagtttaaggaaatacaagatttcaaaacgtggacctaggtacagggagcgttctcctggcaaaaggcagaaggtttttacttatgacatttcttttgcaagcaatatactgaataaactttcgattccggagattcgcgacacaagactagagtctagagaacctggaggtgataaactacaaattcttgacgagtccactaagaaaacttcaagcaaagatatctgtggagaaagcccaattactactactgaaaatgtgggaagagagagtaaaaaagtatcttcaacaaagaatttcttggagcacactctttcatgttggagtgccttagagcgagatctatacttgaagggcatagagatatttggaaagaacagctgtctcattgccagaaacttactatctggtatgaagacctgcatggaagtggccaactacatgtataacaatggtgcagcaatggcgaagagacctctcttgaataaatccatctcaggcgactttgcagaaactgaacaagactacatggagcaagacatggttgccagaacaagaatctatcgtcggaggggccgcaatcgaaagctgaaatatacttggaagtctgcagggcatccaactgttagaaaaagaattggtgatgggaagcaatggtgttcgaagagctgcaaaaacaagtttagaggctgtcattgtgcaaaaagtcaatgcagaagcagacagtgcccctgttttgcagccagtcgtgaatgtgatccagatgtttgtaggaattgttgggtgagctgtggagatggttcactaggtgagccacctgccagaggtgatggttatcagtgtggaaatatgaagctccttttgaaacaacaacaaaggattttgttaggaagatctgatgttgcaggttggggtgcattcatcaagaatcctgtaaataaaaatgattatcttggagaatatactggtgaattgatctctcacaaggaagcagacaaacgtggcaaaatttatgaccgggcaaactcatcatttctgtttgatttaaatgaccagtatgtgttggatgcttatcgcaagggggacaaattaaagtttgcaaatcactcatctaaccccaactgctatgcaaaggtgatgctggtggctggcgaccatcgggttggtatctatgcgaaggagcatattgaggctagtgaggaactcttctatgattatcgttatgggcctgaccaggctccagcttgggctaggagacccgaagggtcaaagaaggacgaagcatccgtctctcaccatcgagcacacaaagttgctcgatagctgaagagcagctccggatgatacaatatgcagtaaattatatatttaatacatgatttagtcctagttcattatacgaggacttcgttggtagataagcatattgtatattcattagtgaataaactcccatacatcaagttggggaataagtgcatataaatattttttaccttaggtcggaaggtgacaaactgacaaccttgttaggttgagtaaagttagtgcttacaggttttcaaactggtgtggccattgctagagtatcaaatagctgagatggctacaactatagccttgtttgtatttttttttggcaagagggatggaatttatttgccaaatgtacacattgttgcaggaagtatttaatgatttaggaggtgttcttcagtcaccctcctaaattttagaaattaaactttagtctctaaaatttctgtttaggaggtctcatttagtcat

SEQ ID NO: 7321 - DNA, 3237 bp, Zea Mays
cagagctggacagaacagagaggagtctttcgtagcggagtgtggagactggagagtggagacggaagccaagcctccaagggggccgtcgcagaactcgcgccaccgcccgccatggcttcgtcatctaaggcctccgactcctcctcccaacgatccaagcggtcggatcaagggacgggcagggaagccgctcccgcctctgttgtcccgatccacgggaacctgacgcagttgatacgccaaatcaaatcgaggcgcctcttgtacatcaaggagaaattggaggcgaacaggaagacgctgcagaggcactcctgcgcgctgttcgacgtggcagcggcggcggaggtggcgtcgaggggcagcgatggcggcaacgctttgtcgcagcgagcggcggagggacagttcaggctcgctgggtcagacctggcacacgggataggggagagggacgtggtgtacatgcaggaggagaacctggcgtccgggacgctcgtgctctccagctcgggcgctgccgcgcagcggacagtcgtgcggttcgtgaagctgccgttggttgagaggatccctccgtacaccacttggatcttcctggacaagagaagaatttactatgatccaatcggaaacgaggctctgatctgcagtgacagcgatgaagaaattccagaaccagaggaagagaaacactttttcacagagggagaagatcaattgatatggagagctactcaagagcatgggttaaaccgagaggttgttaatgtcctctgccagtttattgattcaactccatcagaaattgaggaaagatctgaagtcctatttgagaaaaatgagaaaaactctggatcttcagataagatagagaggcaactttctcttgacaaaactatggatgccgttctggattcttttgataatctcttctgccgcagatgcttggtttttgattgtcgcctccatggttgctcacagaatttggtattcccaagtgagaagcaaccctacagctttgagcctgatgaaaacaagaagccatgtggtcgtcagtgctaccttcgatttccacagtggagagaaggatttcaagagattcatgatgttggtcttagtggctgtgcaacatataatatggaatcaggaactgtctcacacaaagttgatgttagtattatgtctgaatcagaagattcaaaccgtgagaaaggcaacattaggtccatgacactagttggaaccagtggatcaaaaataatttcttctgttagtgctgaagaaagcactactccgccttcagcagatacctctgaaacagagaatgcatcctctgatatgcctcccagtagtttaaggaaatacaagatttcaaaacgtggacctaggtacagggagcgttctcctggcaaaaggcagaaggtttttacttatgacatttcttttgcaagcaatatactgaataaactttcgattccggagattcgcgacacaagactagagtctagagaacctggaggtgataaactacaaattcttgacgagtccactaagaaaacttcaagcaaagatatctgtggagaaagcccaattactactactgaaaatgtgggaagagagagtaaaaaagtatcttcaacaaagaatttcttggagcacactctttcatgttggagtgccttagagcgagatctatacttgaagggcatagagatatttggaaagaacagctgtctcattgccagaaacttactatctggtatgaagacctgcatggaagtggccaactacatgtataacaatggtgcagcaatggcgaagagacctctcttgaataaatccatctcaggcgactttgcagaaactgaacaagactacatggagcaagacatggttgccagaacaagaatctatcgtcggaggggccgcaatcgaaagctgaaatatacttggaagtctgcagggcatccaactgttagaaaaagaattggtgatgggaagcaatggtacacacaatataacccatgcgtgtgccagcaaatgtgtggtaaagattgcccctgtgtggaaaatggaacttgctgcgaaaagtactgtgggtgttcgaagagctgcaaaaacaagtttagaggctgtcattgtgcaaaaagtcaatgcagaagcagacagtgcccctgttttgcagccagtcgtgaatgtgatccagatgtttgtaggaattgttgggtgagctgtggagatggttcactaggtgagccacctgccagaggtgatggttatcagtgtggaaatatgaagctccttttgaaacaacaacaaaggattttgttaggaagatctgatgttgcaggttggggtgcattcatcaagaatcctgtaaataaaaatgattatcttggagaatatactggtgaattgatctctcacaaggaagcagacaaacgtggcaaaatttatgaccgggcaaactcatcatttctgtttgatttaaatgaccagtatgtgttggatgcttatcgcaagggggacaaattaaagtttgcaaatcactcatctaaccccaactgctatgcaaaggtgatgctggtggctggcgaccatcgggttggtatctatgcgaaggagcatattgaggctagtgaggaactcttctatgattatcgttatgggcctgaccaggctccagcttgggctaggagacccgaagggtcaaagaaggacgaagcatccgtctctcaccatcgagcacacaaagttgctcgatagctgaagagcagctccggatgatacaatatgcagtaaattatatatttaatacatgatttagtcctagttcattatacgaggacttcgttggtagataagcatattgtatattcattagtgaataaactcccatacatcaagttggggaataagtgcatataaatattttttaccttaggtcggaaggtgacaaactgacaaccttgttaggttgagtaaagttagtgcttacaggttttcaaactggtgtggccattgctagagtatcaaatagctgagatggctacaactatagccttgtttgtatttttttttggcaagagggatggaatttatttgccaaatgtacacattgttgcaggaagtatttaatgatttaggaggtgttcttcagtcaccctcctaaattttagaaattaaactttagtctctaaaatttctgtttaggaggtctcatttagtcat

SEQ ID NO: 7322 - DNA, 3162 bp, Zea Mays
cccacttttactgcgacacagagctggacagaacagagaggagtctttcgtagcggagtgtggagactggagagtggagacggaagccaagcctccaagggggccgtcgcagaactcgcgccaccgcccgccatggcttcgtcatctaaggcctccgactcctcctcccaacgatccaagcggtcggatcaagggacgggcagggaagccgctcccgcctctgttgtcccgatccacgggaacctgacgcagttgatacgccaaatcaaatcgaggcgcctcttgtacatcaaggagaaattggaggcgaacaggaagacgctgcagaggcactcctgcgcgctgttcgacgtggcagcggcggcggaggtggcgtcgaggggcagcgatggcggcaacgctttgtcgcagcgagcggcggagggacagttcaggctcgctgggtcagacctggcacacgggataggggagagggacgtggtgtacatgcaggaggagaacctggcgtccgggacgctcgtgctctccagctcgggcgctgccgcgcagcggacagtcgtgcggttcgtgaagctgccgttggttgagaggatccctccgtacaccacttggatcttcctggacaaaaatcaaagaatggctgatgatcagtcagttgttggtaggagaagaatttactatgatccaatcggaaacgaggctctgatctgcagtgacagcgatgaagaaattccagaaccagaggaagagaaacactttttcacagagggagaagatcaattgatatggagagctactcaagagcatgggttaaaccgagaggttgttaatgtcctctgccagtttattgattcaactccatcagaaattgaggaaagatctgaagtcctatttgagaaaaatgagaaaaactctggatcttcagataagatagagaggcaactttctcttgacaaaactatggatgccgttctggattcttttgataatctcttctgccgcagatgcttggtttttgattgtcgcctccatggttgctcacagaatttggtattcccaagtgagaagcaaccctacagctttgagcctgatgaaaacaagaagccatgtggtcgtcagtgctaccttcgatttccacagtggagagaaggatttcaagagattcatgatgttggtcttagtggctgtgcaacatataatatggaatcaggaactgtctcacacaaagttgatgttagtattatgtctgaatcagaagattcaaaccgtgagaaaggcaacattaggtccatgacactagttggaaccagtggatcaaaaataatttcttctgttagtgctgaagaaagcactactccgccttcagcagatacctctgaaacagagaatgcatcctctgatatgcctcccagtagtttaaggaaatacaagatttcaaaacgtggacctaggtacagggagcgttctcctggcaaaaggcagaaggtttttacttatgacatttcttttgcaagcaatatactgaataaactttcgattccggagattcgcgacacaagactagagtctagagaacctggaggtgataaactacaaattcttgacgagtccactaagaaaacttcaagcaaagatatctgtggagaaagcccaattactactactgaaaatgtgggaagagagagtaaaaaagtatcttcaacaaagaatttcttggagcacactctttcatgttggagtgccttagagcgagatctatacttgaagggcatagagatatttggaaagaacagctgtctcattgccagaaacttactatctggtatgaagacctgcatggaagtggccaactacatgtataacaatggtgcagcaatggcgaagagacctctcttgaataaatccatctcaggcgactttgcagaaactgaacaagactacatggagcaagacatggttgccagaacaagaatctatcgtcggaggggccgcaatcgaaagctgaaatatacttggaagtctgcagggcatccaactgttagaaaaagaattggtgatgggaagcaatggtacacacaatataacccatgcgtgtgccagcaaatgtgtggtaaagattgcccctgtgtggaaaatggaacttgctgcgaaaagtactgtggctgtggagatggttcactaggtgagccacctgccagaggtgatggttatcagtgtggaaatatgaagctccttttgaaacaacaacaaaggattttgttaggaagatctgatgttgcaggttggggtgcattcatcaagaatcctgtaaataaaaatgattatcttggagaatatactggtgaattgatctctcacaaggaagcagacaaacgtggcaaaatttatgaccgggcaaactcatcatttctgtttgatttaaatgaccagtatgtgttggatgcttatcgcaagggggacaaattaaagtttgcaaatcactcatctaaccccaactgctatgcaaaggtgatgctggtggctggcgaccatcgggttggtatctatgcgaaggagcatattgaggctagtgaggaactcttctatgattatcgttatgggcctgaccaggctccagcttgggctaggagacccgaagggtcaaagaaggacgaagcatccgtctctcaccatcgagcacacaaagttgctcgatagctgaagagcagctccggatgatacaatatgcagtaaattatatatttaatacatgatttagtcctagttcattatacgaggacttcgttggtagataagcatattgtatattcattagtgaataaactcccatacatcaagttggggaataagtgcatataaatattttttaccttaggtcggaaggtgacaaactgacaaccttgttaggttgagtaaagttagtgcttacaggttttcaaactggtgtggccattgctagagtatcaaatagctgagatggctacaactatagccttgtttgtatttttttttggcaagagggatggaatttatttgccaaatgtacacattgttgcaggaagtatttaatgatttaggaggtgttcttcagtcaccctcctaaattttagaaattaaactttagtctctaaaatttctgtttaggaggtctcatttagtcat

SEQ ID NO: 7323 - DNA, 3246 bp, Zea Mays
cccacttttactgcgacacagagctggacagaacagagaggagtctttcgtagcggagtgtggagactggagagtggagacggaagccaagcctccaagggggccgtcgcagaactcgcgccaccgcccgccatggcttcgtcatctaaggcctccgactcctcctcccaacgatccaagcggtcggatcaagggacgggcagggaagccgctcccgcctctgttgtcccgatccacgggaacctgacgcagttgatacgccaaatcaaatcgaggcgcctcttgtacatcaaggagaaattggaggcgaacaggaagacgctgcagaggcactcctgcgcgctgttcgacgtggcagcggcggcggaggtggcgtcgaggggcagcgatggcggcaacgctttgtcgcagcgagcggcggagggacagttcaggctcgctgggtcagacctggcacacgggataggggagagggacgtggtgtacatgcaggaggagaacctggcgtccgggacgctcgtgctctccagctcgggcgctgccgcgcagcggacagtcgtgcggttcgtgaagctgccgttggttgagaggatccctccgtacaccacttggatcttcctggacaagagaagaatttactatgatccaatcggaaacgaggctctgatctgcagtgacagcgatgaagaaattccagaaccagaggaagagaaacactttttcacagagggagaagatcaattgatatggagagctactcaagagcatgggttaaaccgagaggttgttaatgtcctctgccagtttattgattcaactccatcagaaattgaggaaagatctgaagtcctatttgagaaaaatgagaaaaactctggatcttcagataagatagagaggcaactttctcttgacaaaactatggatgccgttctggattcttttgataatctcttctgccgcagatgcttggtttttgattgtcgcctccatggttgctcacagaatttggtattcccaagtgagaagcaaccctacagctttgagcctgatgaaaacaagaagccatgtggtcgtcagtgctaccttcgatggagagaaggatttcaagagattcatgatgttggtcttagtggctgtgcaacatataatatggaatcaggaactgtctcacacaaagttgatgttagtattatgtctgaatcagaagattcaaaccgtgagaaaggcaacattaggtccatgacactagttggaaccagtggatcaaaaataatttcttctgttagtgctgaagaaagcactactccgccttcagcagatacctctgaaacagagaatgcatcctctgatatgcctcccagtagtttaaggaaatacaagatttcaaaacgtggacctaggtacagggagcgttctcctggcaaaaggcagaaggtttttacttatgacatttcttttgcaagcaatatactgaataaactttcgattccggagattcgcgacacaagactagagtctagagaacctggaggtgataaactacaaattcttgacgagtccactaagaaaacttcaagcaaagatatctgtggagaaagcccaattactactactgaaaatgtgggaagagagagtaaaaaagtatcttcaacaaagaatttcttggagcacactctttcatgttggagtgccttagagcgagatctatacttgaagggcatagagatatttggaaagaacagctgtctcattgccagaaacttactatctggtatgaagacctgcatggaagtggccaactacatgtataacaatggtgcagcaatggcgaagagacctctcttgaataaatccatctcaggcgactttgcagaaactgaacaagactacatggagcaagacatggttgccagaacaagaatctatcgtcggaggggccgcaatcgaaagctgaaatatacttggaagtctgcagggcatccaactgttagaaaaagaattggtgatgggaagcaatggtacacacaatataacccatgcgtgtgccagcaaatgtgtggtaaagattgcccctgtgtggaaaatggaacttgctgcgaaaagtactgtgggtgttcgaagagctgcaaaaacaagtttagaggctgtcattgtgcaaaaagtcaatgcagaagcagacagtgcccctgttttgcagccagtcgtgaatgtgatccagatgtttgtaggaattgttgggtgagctgtggagatggttcactaggtgagccacctgccagaggtgatggttatcagtgtggaaatatgaagctccttttgaaacaacaacaaaggattttgttaggaagatctgatgttgcaggttggggtgcattcatcaagaatcctgtaaataaaaatgattatcttggagaatatactggtgaattgatctctcacaaggaagcagacaaacgtggcaaaatttatgaccgggcaaactcatcatttctgtttgatttaaatgaccagtatgtgttggatgcttatcgcaagggggacaaattaaagtttgcaaatcactcatctaaccccaactgctatgcaaaggtgatgctggtggctggcgaccatcgggttggtatctatgcgaaggagcatattgaggctagtgaggaactcttctatgattatcgttatgggcctgaccaggctccagcttgggctaggagacccgaagggtcaaagaaggacgaagcatccgtctctcaccatcgagcacacaaagttgctcgatagctgaagagcagctccggatgatacaatatgcagtaaattatatatttaatacatgatttagtcctagttcattatacgaggacttcgttggtagataagcatattgtatattcattagtgaataaactcccatacatcaagttggggaataagtgcatataaatattttttaccttaggtcggaaggtgacaaactgacaaccttgttaggttgagtaaagttagtgcttacaggttttcaaactggtgtggccattgctagagtatcaaatagctgagatggctacaactatagccttgtttgtatttttttttggcaagagggatggaatttatttgccaaatgtacacattgttgcaggaagtatttaatgatttaggaggtgttcttcagtcaccctcctaaattttagaaattaaactttagtctctaaaatttctgtttaggaggtctcatttagtcat

SEQ ID NO: 7324 - DNA, 3294 bp, Zea Mays
cgcccccacttttactgcgacacagagctggacagaacagagaggagtctttcgtagcggagtgtggagactggagagtggagacggaagccaagcctccaagggggccgtcgcagaactcgcgccaccgcccgccatggcttcgtcatctaaggcctccgactcctcctcccaacgatccaagcggtcggatcaagggacgggcagggaagccgctcccgcctctgttgtcccgatccacgggaacctgacgcagttgatacgccaaatcaaatcgaggcgcctcttgtacatcaaggagaaattggaggcgaacaggaagacgctgcagaggcactcctgcgcgctgttcgacgtggcagcggcggcggaggtggcgtcgaggggcagcgatggcggcaacgctttgtcgcagcgagcggcggagggacagttcaggctcgctgggtcagacctggcacacgggataggggagagggacgtggtgtacatgcaggaggagaacctggcgtccgggacgctcgtgctctccagctcgggcgctgccgcgcagcggacagtcgtgcggttcgtgaagctgccgttggttgagaggatccctccgtacaccacttggatcttcctggacaacgcagaaatcaaagaatggctgatgatcagtcagttgttggtaggagaagaatttactatgatccaatcggaaacgaggctctgatctgcagtgacagcgatgaagaaattccagaaccagaggaagagaaacactttttcacagagggagaagatcaattgatatggagagctactcaagagcatgggttaaaccgagaggttgttaatgtcctctgccagtttattgattcaactccatcagaaattgaggaaagatctgaagtcctatttgagaaaaatgagaaaaactctggatcttcagataagatagagaggcaactttctcttgacaaaactatggatgccgttctggattcttttgataatctcttctgccgcagatgcttggtttttgattgtcgcctccatggttgctcacagaatttggtattcccaagtgagaagcaaccctacagctttgagcctgatgaaaacaagaagccatgtggtcgtcagtgctaccttcgatggagagaaggatttcaagagattcatgatgttggtcttagtggctgtgcaacatataatatggaatcaggaactgtctcacacaaagttgatgttagtattatgtctgaatcagaagattcaaaccgtgagaaaggcaacattaggtccatgacactagttggaaccagtggatcaaaaataatttcttctgttagtgctgaagaaagcactactccgccttcagcagatacctctgaaacagagaatgcatcctctgatatgcctcccagtagtttaaggaaatacaagatttcaaaacgtggacctaggtacagggagcgttctcctggcaaaaggcagaaggtttttacttatgacatttcttttgcaagcaatatactgaataaactttcgattccggagattcgcgacacaagactagagtctagagaacctggaggtgataaactacaaattcttgacgagtccactaagaaaacttcaagcaaagatatctgtggagaaagcccaattactactactgaaaatgtgggaagagagagtaaaaaagtatcttcaacaaagaatttcttggagcacactctttcatgttggagtgccttagagcgagatctatacttgaagggcatagagatatttggaaagaacagctgtctcattgccagaaacttactatctggtatgaagacctgcatggaagtggccaactacatgtataacaatggtgcagcaatggcgaagagacctctcttgaataaatccatctcaggcgactttgcagaaactgaacaagactacatggagcaagacatggttgccagaacaagaatctatcgtcggaggggccgcaatcgaaagctgaaatatacttggaagtctgcagggcatccaactgttagaaaaagaattggtgatgggaagcaatggtacacacaatataacccatgcgtgtgccagcaaatgtgtggtaaagattgcccctgtgtggaaaatggaacttgctgcgaaaagtactgtgggtgttcgaagagctgcaaaaacaagtttagaggctgtcattgtgcaaaaagtcaatgcagaagcagacagtgcccctgttttgcagccagtcgtgaatgtgatccagatgtttgtaggaattgttgggtgagctgtggagatggttcactaggtgagccacctgccagaggtgatggttatcagtgtggaaatatgaagctccttttgaaacaacaacaaaggattttgttaggaagatctgatgttgcaggttggggtgcattcatcaagaatcctgtaaataaaaatgattatcttggagaatatactggtgaattgatctctcacaaggaagcagacaaacgtggcaaaatttatgaccgggcaaactcatcatttctgtttgatttaaatgaccagtatgtgttggatgcttatcgcaagggggacaaattaaagtttgcaaatcactcatctaaccccaactgctatgcaaaggtgatgctggtggctggcgaccatcgggttggtatctatgcgaaggagcatattgaggctagtgaggaactcttctatgattatcgttatgggcctgaccaggctccagcttgggctaggagacccgaagggtcaaagaaggacgaagcatccgtctctcaccatcgagcacacaaagttgctcgatagctgaagagcagctccggatgatacaatatgcagtaaattatatatttaatacatgatttagtcctagttcattatacgaggacttcgttggtagataagcatattgtatattcattagtgaataaactcccatacatcaagttggggaataagtgcatataaatattttttaccttaggtcggaaggtgacaaactgacaaccttgttaggttgagtaaagttagtgcttacaggttttcaaactggtgtggccattgctagagtatcaaatagctgagatggctacaactatagccttgtttgtatttttttttggcaagagggatggaatttatttgccaaatgtacacattgttgcaggaagtatttaatgatttaggaggtgttcttcagtcaccctcctaaattttagaaattaaactttagtctctaaaatttctgtttaggaggtctcatttagtcat

SEQ ID NO: 7325 - DNA, 3305 bp, Zea Mays
gtcgcccccacttttactgcgacacagagctggacagaacagagaggagtctttcgtagcggagtgtggagactggagagtggagacggaagccaagcctccaagggggccgtcgcagaactcgcgccaccgcccgccatggcttcgtcatctaaggcctccgactcctcctcccaacgatccaagcggtcggatcaagggacgggcagggaagccgctcccgcctctgttgtcccgatccacgggaacctgacgcagttgatacgccaaatcaaatcgaggcgcctcttgtacatcaaggagaaattggaggcgaacaggaagacgctgcagaggcactcctgcgcgctgttcgacgtggcagcggcggcggaggtggcgtcgaggggcagcgatggcggcaacgctttgtcgcagcgagcggcggagggacagttcaggctcgctgggtcagacctggcacacgggataggggagagggacgtggtgtacatgcaggaggagaacctggcgtccgggacgctcgtgctctccagctcgggcgctgccgcgcagcggacagtcgtgcggttcgtgaagctgccgttggttgagaggatccctccgtacaccacttggatcttcctggacaacgcagaaatcaaagaatggctgatgatcagtcagttgttggtaggagaagaatttactatgatccaatcggaaacgaggctctgatctgcagtgacagcgatgaagaaattccagaaccagaggaagagaaacactttttcacagagggagaagatcaattgatatggagagctactcaagagcatgggttaaaccgagaggttgttaatgtcctctgccagtttattgattcaactccatcagaaattgaggaaagatctgaagtcctatttgagaaaaatgagaaaaactctggatcttcagataagatagagaggcaactttctcttgacaaaactatggatgccgttctggattcttttgataatctcttctgccgcagatgcttggtttttgattgtcgcctccatggttgctcacagaatttggtattcccaagtgagaagcaaccctacagctttgagcctgatgaaaacaagaagccatgtggtcgtcagtgctaccttcgatttccacagtggagagaaggatttcaagagattcatgatgttggtcttagtggctgtgcaacatataatatggaatcaggaactgtctcacacaaagttgatgttagtattatgtctgaatcagaagattcaaaccgtgagaaaggcaacattaggtccatgacactagttggaaccagtggatcaaaaataatttcttctgttagtgctgaagaaagcactactccgccttcagcagatacctctgaaacagagaatgcatcctctgatatgcctcccagtagtttaaggaaatacaagatttcaaaacgtggacctaggtacagggagcgttctcctggcaaaaggcagaaggtttttacttatgacatttcttttgcaagcaatatactgaataaactttcgattccggagattcgcgacacaagactagagtctagagaacctggaggtgataaactacaaattcttgacgagtccactaagaaaacttcaagcaaagatatctgtggagaaagcccaattactactactgaaaatgtgggaagagagagtaaaaaagtatcttcaacaaagaatttcttggagcacactctttcatgttggagtgccttagagcgagatctatacttgaagggcatagagatatttggaaagaacagctgtctcattgccagaaacttactatctggtatgaagacctgcatggaagtggccaactacatgtataacaatggtgcagcaatggcgaagagacctctcttgaataaatccatctcaggcgactttgcagaaactgaacaagactacatggagcaagacatggttgccagaacaagaatctatcgtcggaggggccgcaatcgaaagctgaaatatacttggaagtctgcagggcatccaactgttagaaaaagaattggtgatgggaagcaatggtacacacaatataacccatgcgtgtgccagcaaatgtgtggtaaagattgcccctgtgtggaaaatggaacttgctgcgaaaagtactgtgggtgttcgaagagctgcaaaaacaagtttagaggctgtcattgtgcaaaaagtcaatgcagaagcagacagtgcccctgttttgcagccagtcgtgaatgtgatccagatgtttgtaggaattgttgggtgagctgtggagatggttcactaggtgagccacctgccagaggtgatggttatcagtgtggaaatatgaagctccttttgaaacaacaacaaaggattttgttaggaagatctgatgttgcaggttggggtgcattcatcaagaatcctgtaaataaaaatgattatcttggagaatatactggtgaattgatctctcacaaggaagcagacaaacgtggcaaaatttatgaccgggcaaactcatcatttctgtttgatttaaatgaccagtatgtgttggatgcttatcgcaagggggacaaattaaagtttgcaaatcactcatctaaccccaactgctatgcaaaggtgatgctggtggctggcgaccatcgggttggtatctatgcgaaggagcatattgaggctagtgaggaactcttctatgattatcgttatgggcctgaccaggctccagcttgggctaggagacccgaagggtcaaagaaggacgaagcatccgtctctcaccatcgagcacacaaagttgctcgatagctgaagagcagctccggatgatacaatatgcagtaaattatatatttaatacatgatttagtcctagttcattatacgaggacttcgttggtagataagcatattgtatattcattagtgaataaactcccatacatcaagttggggaataagtgcatataaatattttttaccttaggtcggaaggtgacaaactgacaaccttgttaggttgagtaaagttagtgcttacaggttttcaaactggtgtggccattgctagagtatcaaatagctgagatggctacaactatagccttgtttgtatttttttttggcaagagggatggaatttatttgccaaatgtacacattgttgcaggaagtatttaatgatttaggaggtgttcttcagtcaccctcctaaattttagaaattaaactttagtctctaaaatttctgtttaggaggtctcatttagtcat

SEQ ID NO: 7326 - DNA, 482 bp, Zea Mays
cccccttcggcctccgcccaaaaccccacgcgagctcccagtctcccactccatccatggcgatcgccaccactacctcttcctcctcgctgaccattcgtctcctccacccgaaccccaacactaaccccgctcccagatctctccagctcctcagtagcaggaggtgcgctcgtgccgccgtagccggaggcgcggtgccttacggggctgctccccggcgtgggatttggtcgatcagggatgacttggtggtgccgaggtctccctactttccagtggattccgcggcggggcaagagcgtgggccgtcgcccatggtgatggagcggttccagagcgtcgtcagtcagcttttccagcacgtacgatggcactatattttgtacaaaggattatccggtgcggtggtcctgttgaggatgatatggccaacatcattgtagcacagctgctctacctggacgctattgatcccacta

SEQ ID NO: 7327 - DNA, 3805 bp, Zea Mays
cccctcccaggctcccaccccaaattcccccctcccacccgtcggttctgtagccctctacatttctgggttttgggtcgtctccacgggctgggtttggggtcggtcggcggcggcggcggagctaggagtggaggcctgagatatactccaagcgggagtctgggcgctctctgcggtcggagaggcgcgggtgagatctacgagggccgctgcgtcgttctcgcagggccggcggaagacatgggtttcctctcggcgaagctgctgccgtcgtgcgagagcgtgtgcgtgtgctgccccgcgctgcgcccgagctcgcgccgccccgtcaagcgctacaagaagctgctcgccgagatattccccaagacgcccgatggtgctccgaatgagaggaaaatagtgaagttgtgcgagtatgctgcgaagaacccattgcgcataccaaagattgccaagtttctagagcagaggagtcacaaggagctgcgctctgcccatgtgaacttcgtcagaatcatcactgaagcttacagcaagctactcttcatttgtaaggagcagatggcatattttgccatcagcctagtgaatgtccttaccgagcttctagaaagcaagcaggagaatgttcacatccttggctgtcaaactttagcaaactttattaacagtcaggtagacaacacatatgcacgcaatattgaaagcttggtgcacaaagtatgtgcactttcacgtcgacaaggagaggatcacaggcttcttagggccgcaagcttgcagtgtctgtcagcaatgatctggttcatgaaggagcattcatacatatttgctgattttgatgagatagtgcattcagtgctggaaaattataggacagaggaatctaatggtggtggtgatgacagacatgcattgcagcataattgggttgatgaaatagcaaggtctgagggtagacctggtgtaggtggtggtaatgatgtgaatattaacactacaactattaggttgcggccagcaagaaattcgtcagctcttacaagggatgaacgtgactccccagaagtatggtcacatatttgtgtccaaaagcttgcagaactggccagagagagtacaaccatgcgtcgcattctagatccgatgctttcatactttgatatgaagaaacagtgggccccacgacatggcttggctttgcttgttttgtctgatatggcttatctggaaaagagttcaggcaatgaacagctgattctaaccaccatcatccggcacttggatcacaaaaatgttttacacgatcctcagacaaaatcagatattattcagacagcaacgtccttggcacgacaacttcgatctcgaggatttgctgttgaacttgtagtggcaggtgacttgtgcaagcacttaaggaaaacacttgaggccgtggaatcaggcaatgttgaagatcagaatttgaacgaaccccttcagattgtcttggaggactgtcttatggaagttgttagaggaattaatgacgtacggccactctatgatatgatggcaatcacattggagaatttgccttctatgccaactgttgccagagcaacccttggaagcttgctgatcatttcacacataatctcgttgacatcagtatcttccaacaatctgatggtatttccagaagcacttctccagcagatactgaagtccatgttacatactgatattgatactcgtgtgggagcacaccacatgttttctgctattattgtccgagggccaagccatctgcggagtgaatcagagtacctatatgaaacaaaaaagcagtctcggaatacatctgtatttgcttcagctactgctctactggagaagttaaggagagaaaaggagagtttgagttcagataagcctcgaaatatcatgcatgatgatgtgaaggaaatgaacatgcatgaagaggataaacgaaaaaacccagcttatttctctaagctggtttcctctttcattgaaagatgtgcaacacgaagttctgtagaggagaccaatattgccatgctaactgaagatcaaaccaaccaattgctgtcttcattctggattcaggcaaatcaaacagataataccccttttaattatgaggctattggacattcatacagcctaacagttctttcttcccgccttaagaattcaagcaatggcaatatcattcagtttttccaattgccattatctcttcgaagtgttgctttaaccccgagtgaagttctgccggcttattgccaacggtctatttttacattagcaatgagtatgctggcctttgctggaaaagtttgtcacgtcgctgaactgtcggacttgctaaggtgtttttcatcttccaaaattgacccttacctaagaataggtgaagacttgcaactctatgtaaggttgcaatcggatctaggcagctatggttctgaaagtgatcaagagattgccaaatccatgctttctgactgcaggacaaaagtagggattaacgatcatcgagtgcttgatgttattgcctctgcactttctaatttcattgagatgggcaaggatgtaatagtgaaggagctgactgagttgttcacgcctgaagagatgcctctgtttgggtcgaattcagcacttgactgggccaacttcaatgcacaagcattttctgatgaatccctttcttttgatgaggaatgttcaagaacctcttcagtagattgtggcttgcacgagtcaccaatcaccaacactgctagctctatctcaaagattactctaccacagtctgttccacatgttttaggtgtcggtcaattgttggaatcagcactacatgtggctggccaggttgcaggtgcatctgtttcaacctcacctcttccatatggtacaatgactagtcaatgtgaagcccttggattgggcaccaggaagaagctatcgagctggcttgtcaatggacacgaatcaaccccggacaatcctatgccaagccttcccactgcccatcattccatcattcccaaggtgcggagaaggcacatctgaaacatgtctcccagaatgctgttatcattaaagctcccacctgccagccccttcgataacttcctgaaggctgcctatcgcacccagcccgagctgtgatcgatttacctaagaacaaccctcttcacgagtgctaggctgcagtaccaaagcatagggtactagattatctaaaggaacttatctatgacgttgttttagttgtagtagcgtaactatgtgtatctatctactagatgtctgtaacgtttgcatatgtatcatcttacgactgtgcctctgtagttgtaagccgcgagttctgtgtcgcatgttcagactgagttgtatgagaatactgagtatgcttggcactcctgtatacagtatgcttgccaaaacgtttcttccgaggtcatccttttacacactccctacaattcagatgcctgaactttggtttcttcaggcgtctcctctccgtcacggcagtagacatggtggcggggttacggtttcgagattttggagatctccggtttatgactagagataaaagtgtgtttggttctggactataccagaatcgatttggtaatatttcttgtagatgttgcatctggtggctccttaaaactgaaactgaacctggtggcttgtgactagagataaaagtggatatcttaattgtttgaacaaatttaatattttaaaataaatatgtatgaaa

SEQ ID NO: 7328 - DNA, 3756 bp, Zea Mays
cccctcccaggctcccaccccaaattcccccctcccacccgtcggttctgtagccctctacatttctgggttttgggtcgtctccacgggctgggtttggggtcggtcggcggcggcggcggagctaggagtggaggcctgagatatactccaagcgggagtctgggcgctctctgcggtcggagaggcgcgggtgagatctacgagggccgctgcgtcgttctcgcagggccggcggaagacatgggtttcctctcggcgaagctgctgccgtcgtgcgagagcgtgtgcgtgtgctgccccgcgctgcgcccgagctcgcgccgccccgtcaagcgctacaagaagctgctcgccgagatattccccaagacgcccgatggtgctccgaatgagaggaaaatagtgaagttgtgcgagtatgctgcgaagaacccattgcgcataccaaagattgccaagtttctagagcagaggagtcacaaggagctgcgctctgcccatgtgaacttcgtcagaatcatcactgaagcttacagcaagctactcttcatttgtaaggagcagatggcatattttgccatcagcctagtgaatgtccttaccgagcttctagaaagcaagcaggagaatgttcacatccttggctgtcaaactttagcaaactttattaacagtcaggtagacaacacatatgcacgcaatattgaaagcttggtgcacaaagtatgtgcactttcacgtcgacaaggagaggatcacaggcttcttagggccgcaagcttgcagtgtctgtcagcaatgatctggttcatgaaggagcattcatacatatttgctgattttgatgagatagtgcattcagtgctggaaaattataggacagaggaatctaatggtggtggtgatgacagacatgcattgcagcataattgggttgatgaaatagcaaggtctgagggtagacctggtgtaggtggtggtaatgatgtgaatattaacactacaactattaggttgcggccagcaagaaattcgtcagctcttacaagggatgaacgtgactccccagaagtatggtcacatatttgtgtccaaaagcttgcagaactggccagagagagtacaaccatgcgtcgcattctagatccgatgctttcatactttgatatgaagaaacagtgggccccacgacatggcttggctttgcttgttttgtctgatatggcttatctggaaaagagttcaggcaatgaacagctgattctaaccaccatcatccggcacttggatcacaaaaatgttttacacgatcctcagacaaaatcagatattattcagacagcaacgtccttggcacgacaacttcgatctcgaggatttgctgttgaacttgtagtggcaggtgacttgtgcaagcacttaaggaaaacacttgaggccgtggaatcaggcaatgttgaagatcagaatttgaacgaaccccttcagattgtcttggaggactgtcttatggaagttgttagaggaattaatgacgtacggccactctatgatatgatggcaatcacattggagaatttgccttctatgccaactgttgccagagcaacccttggaagcttgctgatcatttcacacataatctcgttgacatcagtatcttccaacaatctgatggtatttccagaagcacttctccagcagatactgaagtccatgttacatactgatattgatactcgtgtgggagcacaccacatgttttctgctattattgtccgagggccaagccatctgcggagtgaatcagagtacctatatgaaacaaaaaagcagtctcggaatacatctgtatttgcttcagctactgctctactggagaagttaaggagagaaaaggagagtttgagttcagataagcctcgaaatatcatgcatgatgatgtgaaggaaatgaacatgcatgaagaggataaacgaaaaaacccagcttatttctctaagctggtttcctctttcattgaaagatgtgcaacacgaagttctgtagaggagaccaatattgccatgctaactgaagatcaaaccaaccaattgctgtcttcattctggattcaggcaaatcaaacagataataccccttttaattatgaggctattggacattcatacagcctaacagttctttcttcccgccttaagaattcaagcaatggcaatatcattcagtttttccaattgccattatctcttcgaagtgttgctttaaccccgagtgaagttctgccggcttattgccaacggtctatttttacattagcaatgagtatgctggcctttgctggaaaagtttgtcacgtcgctgaactgtcggacttgctaaggtgtttttcatcttccaaaattgacccttacctaagaataggtgaagacttgcaactctatgtaaggttgcaatcggatctaggcagctatggttctgaaagtgatcaagagattgccaaatccatgctttctgactgcaggacaaaagtagggattaacgatcatcgagtgcttgatgttattgcctctgcactttctaatttcattgagatgggcaaggatgtaatagtgaaggagctgactgagttgttcacgcctgaagagatgcctctgtttgggtcgaattcagcacttgactgggccaacttcaatgcacaagcattttctgatgaatccctttcttttgatgaggaatgttcaagaacctcttcagtagattgtggcttgcacgagtcaccaatcaccaacactgctagctctatctcaaagattactctaccacagtctgttccacatgttttaggtgtcggtcaattgttggaatcagcactacatgtggctggccaggttgcaggtgcatctgtttcaacctcacctcttccatatggtacaatgactagtcaatgtgaagcccttggattgggcaccaggaagaagctatcgagctggcttgtcaatggacacgaatcaaccccggacaatcctatgccaagccttcccactgcccatcattccatcattcccaagtaaagctcccacctgccagccccttcgataacttcctgaaggctgcctatcgcacccagcccgagctgtgatcgatttacctaagaacaaccctcttcacgagtgctaggctgcagtaccaaagcatagggtactagattatctaaaggaacttatctatgacgttgttttagttgtagtagcgtaactatgtgtatctatctactagatgtctgtaacgtttgcatatgtatcatcttacgactgtgcctctgtagttgtaagccgcgagttctgtgtcgcatgttcagactgagttgtatgagaatactgagtatgcttggcactcctgtatacagtatgcttgccaaaacgtttcttccgaggtcatccttttacacactccctacaattcagatgcctgaactttggtttcttcaggcgtctcctctccgtcacggcagtagacatggtggcggggttacggtttcgagattttggagatctccggtttatgactagagataaaagtgtgtttggttctggactataccagaatcgatttggtaatatttcttgtagatgttgcatctggtggctccttaaaactgaaactgaacctggtggcttgtgactagagataaaagtggatatcttaattgtttgaacaaatttaatattttaaaataaatatgtatgaaa

SEQ ID NO: 7329 - DNA, 2572 bp, Zea Mays
cgcgccgcagttgtggcagccgaatcggccgccgcaccttaggcgagatgtggcgttggagtttgagagggaaggtaatgagttaagacgtgtaattgaagataaccaaaagggaagccatcctgtggataaggatttgcacacttctagacataagcatgtacatcagaagctgtggaaacagaatctgagtcaccgtcactcaggcaatcaggatttggagaaatcagcagaccagaattgtctaaataaagatgtggagatcgaggaaggagaattgattgaagaggaccataataatatcatttataaaagcaagcttaagcaggaaaatgttgtactgaaatcagttattgaaacaagttcagcagagcagttacaggtgaataatgcaacgtcgaaggatgctacctgcaacaacagagctacaagagaatctgatgagaaacacattcttgaggctgctaaatgtttctctgtgtttatgtattcaagtttatctcttcatactctgaatgccatcatctccagagttctttttattattatgcagcaattgtgtttttccccgattaagtgtatctcattctggcctgaagacggacgtccttatgtggcgctggggaagctgtatagcaagcagtcaaggtatgacaaagctagagcggtgtacgaaagggggtgccaagcaacgcaaggcgaaaacccatacatttggcagtgctgggcagtcctagaaagcaagggtggaaatattcgaagggcacgcgagctatttgatgccgctactgtggctgatgcaaagcatattgctgcttggcacgggtgggcaattttagaaataaagcaaggaaacataaaaaaggcacggactttgttcgagcaagccagtcaatccaatccaaaaagttgtgcaagctggctagcttgggctcaggtagaaatgcgtgcaggaaacaataccatggcaagaaagctctttgagaaagctgtccaggctagtcctaaaaaccgattttcatggcatgtatgggcactatttgaggcaaatgaaggtaacattgacagggcaaggaagttgcttaagattggacatgctgtaaatcctagggaccctgtaattctacagtcactcgcgctactggaatacaacttttcatctgcgaatgttgctcgtgtgttattcagaaaagcgtctcagattgatccaagacatcagccagtttggatagcttgggggtggatggaatggaaagaaagaaatgcaagaacagcaagagctctctatcaaagagctttgtcagtcaattcaacaaatgaatgtgctgctcgttgtcttcaggcttggggagtcctagaacagcgtgctggtaactacacggccgctagacgattgttgaggtcttcactgagtataaactcccaaagtgaggtgacatggatgacatgggcagcacttgaggaggaacagggggatccagttcgagctgaagaaattcggaacctttactttcagcagcgtactgaagttgtggatgatgcatcctgggtcataggcttcctcgacatcatcgaccctgccctagacagcgtgaagaggctactaaacctggatcagccttctagaccggcgaggcaagatgatgttaaaagcacaacagaaccgtgtcctcccactgccaagtcttcagaaacttctgcgggcaatgatgctcgtaacaacgggagcgaagcaatggggactctaacaagtgatttcgatttggatgctttcatcaagaagaggctggccctcgacccatcggagctggatgccgtgctcgagggctctgacccgaggggtgttgtttctcagaggaggaaacagcggctgcccaggaagccactccctcttctccctgtcccgtaaattttccagatcggtctgtctcatttccattccaccggtaaaatccataagggctagtttgtttgagactccatttttttccaagtgttaaaaataaaaatcccttgaaaaaaatgaggttatcaaactagccctaaatccctaactgtagcagcctgcaatacgtgaatatgtgtgaggactaaggagatgacgtcccctgccgctgccatagcaatcaccacacctgttaattgtcattccagccacgtgtatgtaattctgccaccatttgttagtaaagtctagctctgtacataaattagactctttttgtctacataatatcgccggactaagttatcgagaagtattttgacaatggtagtgccattacttcaacaccttagagcatccaagaaaatatgtaaaaggttcccaaaaccatttttgacggcgaaacaccatcttcattcactccaacagtacctctttccgtccccgcaaattttggcgacccgcaaaccagggctggcgttccgtagatatgcgcgaggaaaatactcccccgatcgcctgcgcgcgaatcatggagagttctcatgtcctgctttctttatggttcccgcgtcttccttttggttcccgcgtccttcctacttcgtgagtttctgcgaggcggtg

SEQ ID NO: 7330 - DNA, 5880 bp, Zea Mays
atggggcaaatcgatcggcatgtgtttcggcgtgattataattttttcttgtcaagaaacagcacaattttcgacatagacattgaagcgtttcaactgaagccttggagacagcaaggagcggatcttactgactactttaattttagtctggatgaagaaggctggagaaagtattggtgtagcatgcttagtacaccactttttgtgcagaagcaattaaggttaggggctagatcacttgtaaatgaaacatcaggattggagcaggaatcatacaaattgaaatctgcgaaagcaatgtccaacgtagcaaatgattctggatctgaaggaagaaatgacattggcaagccaaaaggtagagcaatccatgttgaaggcagtgcgtgcgaacgtgttccttcagcagacttgtggcgtccaatacaaagggattcagatgttgtgattcaagtaaacatgacactttcaccatcaaatcagtccacttcggatgacagctcaaagttaaatcacaagggtgtggctactgaaagggtgtttgataaggaagtttatgatggaggttcctcagagggtgttgggagcaaactggacagaagagattcttattttgcacgtgaccaatctcctagccctgattattctgatgtactttctggagaatcaaaagaaaatcactattttaagagatccaatagacattcagatttcagggacttctttgaagccaccaaacttcaggatgagcatgtcaaatctgatttttattgctatccaagtaagccagacagagaaaatagtgaaagctgcagacgtggttataccccttctactgatgatagaaacatggcatctaaacttctgtggatgggtgaagctcctttcactgggcgaggcaagtctggtgatctttttttgggtcacaacagcgaccgtgacttcaaatctcgacataaagcaagaaaaggacagaggagacagagtttagatgacagaaggaatgctatatttgttgaaaaagaaaaaccaacagatagctatcatagtacgtgtgataggaagttcgtgaagagaagatctagctcatcttccctgaggaccaactatcacaattccgtttgcaatcaatcttatgagcagcgttattcacctcttgaaaaaaaagctctgaaaaacgatgagcattactttagcgatgagtctaattaccaccataggcagtctttgtcatgtgacatcaatgaaggagatattgacaagtgcttctcttcagcgaaggagtggcaacgagatggtgaccatatataccattcaatggtaaaaactgatatgcctgatgctaatgatggacgcatgtacagagataggtatagtccggaaaagaaaatagccagacatgaccatagcatggatgttgaattttcccattacactgattacagattttgcgagtggcggagtctggaggtaagaggcagatacagagataaaggaaaatttgccaaaagcaatgatgggcatttcagacatgctaaccatctcgagttgtattctggcctcaacaattttgagagggacaaacctgctactggcttccctgttatgagctcaagaaacagatgcatcgataacaaagaagtctgcaatgctaagatgacacaaaataattgccatgggtatcatcaaaagaacaagcaacatgattcatcattttgtattggcaacattcctcgatatgctttgcgcactgatacttatgctgaaaagggccattttgttctgccaattaagaggaagctttattctgatctgggttccatggaccaaaggactcttgctgatttgccacttctgaaaggaagattgatgcatggccaatccattgccagtgacaggaggatttatgctttgaagctgcataagtcgacaaagaaaattaatacagaagccatttgtagttccagtgatatgagaaatattaatactctttcaaacatttgtgttggcagaagacatgagctggataatgctgataacatccacttgaatgatagaaaaataaagtttgagagggaaggtaatgagttaagacgtgtaattgaagataaccaaaagggaagccatcctgtggataaggatttgcacacttctagacataagcatgtacatcagaagctgtggaaacagaatctgagtcaccgtcactcaggcaatcaggatttggagaaatcagcagaccagaattgtctaaataaagatgtggagatcgaggaaggagaattgattgaagaggaccataataatatcatttataaaagcaagcttaagcaggaaaatgttgtactgaaatcagttattgaaacaagttcagcagagcagttacaggtgaataatgcaacgtcgaaggatgctacctgcaacaacagagctacaagagaatctgatgagaaacacattcttgaggtaatggaaaagatgcaaaaaaggagggaaaggttcaaagaggctattgcaccaaaaaaagaagtcggtgacaagaaagacctatcggctttagcatgcagtacagatttcatccagaatcaacggcctgctaggaaacggcggtggggtggtaattgttggatgctggaaatgccttgagagtttgtccgtgatggtttcttcaacaaggtgttctgcttatgttgctcaaaacattttactgttatgtttacttattctgatggctgggttggggaaacaaaatatagaaagcatattcttcaggcacttttatagatatagtatcttgcatagtttaagagtaaaaaggttcgacttcaaatgtaacgtgtttgtggggttctttcaaaccactggagatgatttactatcccctaagatgagatttaaatggtttcctttctgcaggctgctaaatgtttctctgtgtttatgtattcaagtttatctcttcatactctgaatgccatcatctccagagttctttttattattatgcagcaattgtgtttttccccgattaagccagtcacatacaagttgcagtctgcagttagttgttgccttacccactctgtcaggctaatatatctgtctgagtcagagagaagaacggacatttgccctctcgtcagaaggcgaacacgcgagcagctccattgccaagagaatttggagaacgctgagacgacacgatcgtgcccactgcccacgagaggagttgccgcctgtcaaaggctggaagcggggacttgtggggaagatgggaagccgccttcaactcctgcagacagaataacagaaatatcgaacgacgtacacactccagctccgacaccgtcatccgtcaagtcgtcaactgacagtgcactcggcggtggttcgaacgccgaaccgacgtggcgcgctgacgacctccaaccgtgccctcatcccagcctcccgcttccgtccctgcaaggtccaagcccggtacggcaccgcatccgagagggcagacccgtcagtccaggcccctcgtccttcactcctccttcgcctctcaaaggcgcgcctcgctccaccattcccactggcgatttgcaacagacaagctccactagagctcggccggcatccatggcgatgcggctcctgtccccgtccacgccgcccccacgcttcccgagccccggccagaaggcacccgcctccatctccgcatcgtcttcctcgtacttctctgtccgcttgcgccgcgcgcgcgcggcggctgcagcggctgcaggcgcggccgcggcgggcgggtccgaccggcgcagcggacgcttcgagggggaggcgatgagcggggcattcgacaggggcctcgcggagatcgcgaggaaggtgccgctctttgagcccacagcggacggggagctcgccgctgcggctggcgagcggccgttgcctatcaatctcgagctctggctctaccgcgtcaaagtgcacaccagaaagttcgagttccctgaagcagaaaaacttctggacaagtgtatctcattctggcctgaagacggacgtccttatgtggcgctggggaagctgtatagcaagcagtcaaggtatgacaaagctagagcggtgtacgaaagggggtgccaagcaacgcaaggcgaaaacccatacatttggcaggcacggactttgttcgagcaagccagtcaatccaatccaaaaagttgtgcaagctggctagcttgggctcaggtagaaatgcgtgcaggaaacaataccatggcaagaaagctctttgagaaagctgtccaggctagtcctaaaaaccgattttcatggcatgtatgggcactatttgaggcaaatgaaggtaacattgacagggcaaggaagttgcttaagattggacatgctgtaaatcctagggaccctgtaattctacagtcactcgcgctactggaatacaacttttcatctgcgaatgttgctcgtgtgttattcagaaaagcgtctcagattgatccaagacatcagccagtttggatagcttgggggtggatggaatggaaagaaagaaatgcaagaacagcaagagctctctatcaaagagctttgtcagtcaattcaacaaatgaatgtgctgctcgttgtcttcaggcttggggagtcctagaacagcgtgctggtaactacacggccgctagacgattgttgaggtcttcactgagtataaactcccaaagtgaggtgacatggatgacatgggcagcacttgaggaggaacagggggatccagttcgagctgaagaaattcggaacctttactttcagcagcgtactgaagttgtggatgatgcatcctgggtcataggcttcctcgacatcatcgaccctgccctagacagcgtgaagaggctactaaacctggatcagccttctagaccggcgaggcaagatgatgttaaaagcacaacagaaccgtgtcctcccactgccaagtcttcagaaacttctgcgggcaatgatgctcgtaacaacgggagcgaagcaatggggactctaacaagtgatttcgatttggatgctttcatcaagaagaggctggccctcgacccatcggagctggatgccgtgctcgagggctctgacccgaggggtgttgtttctcagaggaggaaacagcggctgcccaggaagccactccctcttctccctgtcccgtaaattttccagatcggtctgtctcatttccattccaccggtaaaatccataagggctagtttgtttgagactccatttttttccaagtgttaaaaataaaaatcccttgaaaaaaatgaggttatcaaactagccctaaatccctaactgtagcagcctgcaatacgtgaatatgtgtgaggactaaggagatgacgtcccctgccgctgccatagcaatcaccacacctgttaattgtcattccagccacgtgtatgtaattctgccaccatttgttagtaaagtctagctctgtacataaattagactctttttgtctacataatatcgccggactaagttatcgagaagtattttgacaatggtagtgccattacttcaacaccttagagcatccaagaaaatatgtaaaaggttcccaaaaccatttttgacggcgaaacaccatcttcattcactccaacagtacctctttccgtccccgcaaattttggcgacccgcaaaccagggctggcgttccgtagatatgcgcgaggaaaatactcccccgatcgcctgcgcgcgaatcatggagagttctcatgtcctgctttctttatggttcccgcgtcttccttttggttcccgcgtccttcctacttcgtgagtttctgcgaggcggtg

SEQ ID NO: 7331 - DNA, 4951 bp, Zea Mays
atggggcaaatcgatcggcatgtgtttcggcgtgattataattttttcttgtcaagaaacagcacaattttcgacatagacattgaagcgtttcaactgaagccttggagacagcaaggagcggatcttactgactactttaattttagtctggatgaagaaggctggagaaagtattggtgtagcatgcttagtacaccactttttgtgcagaagcaattaaggttaggggctagatcacttgtaaatgaaacatcaggattggagcaggaatcatacaaattgaaatctgcgaaagcaatgtccaacgtagcaaatgattctggatctgaaggaagaaatgacattggcaagccaaaaggtagagcaatccatgttgaaggcagtgcgtgcgaacgtgttccttcagcagacttgtggcgtccaatacaaagggattcagatgttgtgattcaagtaaacatgacactttcaccatcaaatcagtccacttcggatgacagctcaaagttaaatcacaagggtgtggctactgaaagggtgtttgataaggaagtttatgatggaggttcctcagagggtgttgggagcaaactggacagaagagattcttattttgcacgtgaccaatctcctagccctgattattctgatgtactttctggagaatcaaaagaaaatcactattttaagagatccaatagacattcagatttcagggacttctttgaagccaccaaacttcaggatgagcatgtcaaatctgatttttattgctatccaagtaagccagacagagaaaatagtgaaagctgcagacgtggttataccccttctactgatgatagaaacatggcatctaaacttctgtggatgggtgaagctcctttcactgggcgaggcaagtctggtgatctttttttgggtcacaacagcgaccgtgacttcaaatctcgacataaagcaagaaaaggacagaggagacagagtttagatgacagaaggaatgctatatttgttgaaaaagaaaaaccaacagatagctatcatagtacgtgtgataggaagttcgtgaagagaagatctagctcatcttccctgaggaccaactatcacaattccgtttgcaatcaatcttatgagcagcgttattcacctcttgaaaaaaaagctctgaaaaacgatgagcattactttagcgatgagtctaattaccaccataggcagtctttgtcatgtgacatcaatgaaggagatattgacaagtgcttctcttcagcgaaggagtggcaacgagatggtgaccatatataccattcaatggtaaaaactgatatgcctgatgctaatgatggacgcatgtacagagatagaagacatgagctggataatgctgataacatccacttgaatgatagaaaaataaagtttgagagggaaggtaatgagttaagacgtgtaattgaagataaccaaaagggaagccatcctgtggataaggatttgcacacttctagacataagcatgtacatcagaagctgtggaaacagaatctgagtcaccgtcactcaggcaatcaggatttggagaaatcagcagaccagaattgtctaaataaagatgtggagatcgaggaaggagaattgattgaagaggaccataataatatcatttataaaagcaagcttaagcaggaaaatgttgtactgaaatcagttattgaaacaagttcagcagagcagttacaggtgaataatgcaacgtcgaaggatgctacctgcaacaacagagctacaagagaatctgatgagaaacacattcttgaggctgctaaatgtttctctgtgtttatgtattcaagtttatctcttcatactctgaatgccatcatctccagagttctttttattattatgcagcaattgtgtttttccccgattaagccagtcacatacaagttgcagtctgcagttagttgttgccttacccactctgtcaggctaatatatctgtctgagtcagagagaagaacggacatttgccctctcgtcagaaggcgaacacgcgagcagctccattgccaagagaatttggagaacgctgagacgacacgatcgtgcccactgcccacgagaggagttgccgcctgtcaaaggctggaagcggggacttgtggggaagatgggaagccgccttcaactcctgcagacagaataacagaaatatcgaacgacgtacacactccagctccgacaccgtcatccgtcaagtcgtcaactgacagtgcactcggcggtggttcgaacgccgaaccgacgtggcgcgctgacgacctccaaccgtgccctcatcccagcctcccgcttccgtccctgcaaggtccaagcccggtacggcaccgcatccgagagggcagacccgtcagtccaggcccctcgtccttcactcctccttcgcctctcaaaggcgcgcctcgctccaccattcccactggcgatttgcaacagacaagctccactagagctcggccggcatccatggcgatgcggctcctgtccccgtccacgccgcccccacgcttcccgagccccggccagaaggcacccgcctccatctccgcatcgtcttcctcgtacttctctgtccgcttgcgccgcgcgcgcgcggcggctgcagcggctgcaggcgcggccgcggcgggcgggtccgaccggcgcagcggacgcttcgagggggaggcgatgagcggggcattcgacaggggcctcgcggagatcgcgaggaaggtgccgctctttgagcccacagcggacggggagctcgccgctgcggctggcgagcggccgttgcctatcaatctcgagctctggctctaccgcgtcaaagtgcacaccagaaagttcgagttccctgaagcagaaaaacttctggacaagtgtatctcattctggcctgaagacggacgtccttatgtggcgctggggaagctgtatagcaagcagtcaaggtatgacaaagctagagcggtgtacgaaagggggtgccaagcaacgcaaggcgaaaacccatacatttggcagtgctgggcagtcctagaaagcaagggtggaaatattcgaagggcacgcgagctatttgatgccgctactgtggctgatgcaaagcatattgctgcttggcacgggtgggcaattttagaaataaagcaaggaaacataaaaaaggcacggaacctacttgggaaagccctgaaatattgtggaggaaatgagtatatttaccaaactcttgctttgcttgaagctaaagcagagcgctttgaacaggcacggactttgttcgagcaagccagtcaatccaatccaaaaagttgtgcaagctggctagcttgggctcaggtagaaatgcgtgcaggaaacaataccatggcaagaaagctctttgagaaagctgtccaggctagtcctaaaaaccgattttcatggcatggaccctgtaattctacagtcactcgcgctactggaatacaacttttcatctgcgaatgttgctcgtgtgttattcagaaaagcgtctcagattgatccaagacatcagccagtttggatagcttgggggtggatggaatggaaagaaagaaatgcaagaacagcaagagctctctatcaaagagctttgtcagtcaattcaacaaatgaatgtgctgctcgttgtcttcaggcttggggagtcctagaacagcgtgctggtaactacacggccgctagacgattgttgaggtcttcactgagtataaactcccaaagtgaggtgacatggatgacatgggcagcacttgaggaggaacagggggatccagttcgagctgaagaaattcggaacctttactttcagcagcgtactgaagttgtggatgatgcatcctgggtcataggcttcctcgacatcatcgaccctgccctagacagcgtgaagaggctactaaacctggatcagccttctagaccggcgaggcaagatgatgttaaaagcacaacagaaccgtgtcctcccactgccaagtcttcagaaacttctgcgggcaatgatgctcgtaacaacgggagcgaagcaatggggactctaacaagtgatttcgatttggatgctttcatcaagaagaggctggccctcgacccatcggagctggatgccgtgctcgagggctctgacccgaggggtgttgtttctcagaggaggaaacagcggctgcccaggaagccactccctcttctccctgtcccgtaaattttccagatcggtctgtctcatttccattccaccggtaaaatccataagggctagtttgtttgagactccatttttttccaagtgttaaaaataaaaatcccttgaaaaaaatgaggttatcaaactagccctaaatccctaactgtagcagcctgcaatacgtgaatatgtgtgaggactaaggagatgacgtcccctgccgctgccatagcaatcaccacacctgttaattgtcattccagccacgtgtatgtaattctgccaccatttgttagtaaagtctagctctgtacataaattagactctttttgtctacataatatcgccggactaagttatcgagaagtattttgacaatggtagtgccattacttcaacaccttagagcatccaagaaaatatgtaaaaggttcccaaaaccatttttgacggcgaaacaccatcttcattcactccaacagtacctctttccgtccccgcaaattttggcgacccgcaaaccagggctggcgttccgtagatatgcgcgaggaaaatactcccccgatcgcctgcgcgcgaatcatggagagttctcatgtcctgctttctttatggttcccgcgtcttccttttggttcccgcgtccttcctacttcgtgagtttctgcgaggcggtg

SEQ ID NO: 7332 - DNA, 4532 bp, Zea Mays
atggggcaaatcgatcggcatgtgtttcggcgtgattataattttttcttgtcaagaaacagcacaattttcgacatagacattgaagcgtttcaactgaagccttggagacagcaaggagcggatcttactgactactttaattttagtctggatgaagaaggctggagaaagtattggtgtagcatgcttagtacaccactttttgtgcagaagcaattaaggttaggggctagatcacttgtaaatgaaacatcaggattggagcaggaatcatacaaattgaaatctgcgaaagcaatgtccaacgtagcaaatgattctggatctgaaggaagaaatgacattggcaagccaaaaggtagagcaatccatgttgaaggcagtgcgtgcgaacgtgttccttcagcagacttgtggcgtccaatacaaagggattcagatgttgtgattcaagtaaacatgacactttcaccatcaaatcagtccacttcggatgacagctcaaagttaaatcacaagggtgtggctactgaaagggtgtttgataaggaagtttatgatggaggttcctcagagggtgttgggagcaaactggacagaagagattcttattttgcacgtgaccaatctcctagccctgattattctgatgtactttctggagaatcaaaagaaaatcactattttaagagatccaatagacattcagatttcagggacttctttgaagccaccaaacttcaggatgagcatgtcaaatctgatttttattgctatccaagtaagccagacagagaaaatagtgaaagctgcagacgtggttataccccttctactgatgatagaaacatggcatctaaacttctgtggatgggtgaagctcctttcactgggcgaggcaagtctggtgatctttttttgggtcacaacagcgaccgtgacttcaaatctcgacataaagcaagaaaaggacagaggagacagagtttagatgacagaaggaatgctatatttgttgaaaaagaaaaaccaacagatagctatcatagtacgtgtgataggaagttcgtgaagagaagatctagctcatcttccctgaggaccaactatcacaattccgtttgcaatcaatcttatgagcagcgttattcacctcttgaaaaaaaagctctgaaaaacgatgagcattactttagcgatgagtctaattaccaccataggcagtctttgtcatgtgacatcaatgaaggagatattgacaagtgcttctcttcagcgaaggagtggcaacgagatggtgaccatatataccattcaatggtaaaaactgatatgcctgatgctaatgatggacgcatgtacagagataggtatagtccggaaaagaaaatagccagacatgaccatagcatggatgttgaattttcccattacactgattacagattttgcgagtggcggagtctggaggtaagaggcagatacagagataaaggaaaatttgccaaaagcaatgatgggcatttcagacatgctaaccatctcgagttgtattctggcctcaacaattttgagagggacaaacctgctactggcttccctgttatgagctcaagaaacagatgcatcgataacaaagaagtctgcaatgctaagatgacacaaaataattgccatgggtatcatcaaaagaacaagcaacatgattcatcattttgtattggcaacattcctcgatatgctttgcgcactgatacttatgctgaaaagggccattttgttctgccaattaagaggaagctttattctgatctgggttccatggaccaaaggactcttgctgatttgccacttctgaaaggaagattgatgcatggccaatccattgccagtgacaggaggatttatgctttgaagctgcataagtcgacaaagaaaattaatacagaagccatttgtagttccagtgatatgagaaatattaatactctttcaaacatttgtgttggcagaagacatgagctggataatgctgataacatccacttgaatgatagaaaaataaagtttgagagggaaggtaatgagttaagacgtgtaattgaagataaccaaaagggaagccatcctgtggataaggatttgcacacttctagacataagcatgtacatcagaagctgtggaaacagaatctgagtcaccgtcactcaggcaatcaggatttggagaaatcagcagaccagaattgtctaaataaagatgtggagatcgaggaaggagaattgattgaagaggaccataataatatcatttataaaagcaagcttaagcaggaaaatgttgtactgaaatcagttattgaaacaagttcagcagagcagttacaggtgaataatgcaacgtcgaaggatgctacctgcaacaacagagctacaagagaatctgatgagaaacacattcttgaggtaatggaaaagatgcaaaaaaggagggaaaggttcaaagaggctattgcaccaaaaaaagaagtcggtgacaagaaagacctatcggctttagcatgcagtacagatttcatccagaatcaacggcctgctaggaaacggcggtggggtggtaattgttggatgctggaaatgccttgagagtttgtccgtgatggtttcttcaacaaggttgctgggcagtcctagaaagcaagggtggaaatattcgaagggcacgcgagctatttgatgccgctactgtggctgatgcaaagcatattgctgcttggcacgggtgggcaattttagaaataaagcaaggaaacataaaaaaggcacggactttgttcgagcaagccagtcaatccaatccaaaaagttgtgcaagctggctagcttgggctcaggtagaaatgcgtgcaggaaacaataccatggcaagaaagctctttgagaaagctgtccaggctagtcctaaaaaccgattttcatggcatgtatgggcactatttgaggcaaatgaaggtaacattgacagggcaaggaagttgcttaagattggacatgctgtaaatcctagggaccctgtaattctacagtcactcgcgctactggaatacaacttttcatctgcgaatgttgctcgtgtgttattcagaaaagcgtctcagattgatccaagacatcagccagtttggatagcttgggggtggatggaatggaaagaaagaaatgcaagaacagcaagagctctctatcaaagagctttgtcagtcaattcaacaaatgaatgtgctgctcgttgtcttcaggcttggggagtcctagaacagcgtgctggtaactacacggccgctagacgattgttgaggtcttcactgagtataaactcccaaagtgaggtgacatggatgacatgggcagcacttgaggaggaacagggggatccagttcgagctgaagaaattcggaacctttactttcagcagcgtactgaagttgtggatgatgcatcctgggtcataggcttcctcgacatcatcgaccctgccctagacagcgtgaagaggctactaaacctggatcagccttctagaccggcgaggcaagatgatgttaaaagcacaacagaaccgtgtcctcccactgccaagtcttcagaaacttctgcgggcaatgatgctcgtaacaacgggagcgaagcaatggggactctaacaagtgatttcgatttggatgctttcatcaagaagaggctggccctcgacccatcggagctggatgccgtgctcgagggctctgacccgaggggtgttgtttctcagaggaggaaacagcggctgcccaggaagccactccctcttctccctgtcccgtaaattttccagatcggtctgtctcatttccattccaccggtaaaatccataagggctagtttgtttgagactccatttttttccaagtgttaaaaataaaaatcccttgaaaaaaatgaggttatcaaactagccctaaatccctaactgtagcagcctgcaatacgtgaatatgtgtgaggactaaggagatgacgtcccctgccgctgccatagcaatcaccacacctgttaattgtcattccagccacgtgtatgtaattctgccaccatttgttagtaaagtctagctctgtacataaattagactctttttgtctacataatatcgccggactaagttatcgagaagtattttgacaatggtagtgccattacttcaacaccttagagcatccaagaaaatatgtaaaaggttcccaaaaccatttttgacggcgaaacaccatcttcattcactccaacagtacctctttccgtccccgcaaattttggcgacccgcaaaccagggctggcgttccgtagatatgcgcgaggaaaatactcccccgatcgcctgcgcgcgaatcatggagagttctcatgtcctgctttctttatggttcccgcgtcttccttttggttcccgcgtccttcctacttcgtgagtttctgcgaggcggtg

SEQ ID NO: 7333 - DNA, 6178 bp, Zea Mays
catcatggggcaaatcgatcggcatgtgtttcggcgtgattataattttttcttgtcaagaaacagcacaattttcgacatagacattgaagcgtttcaactgaagccttggagacagcaaggagcggatcttactgactactttaattttagtctggatgaagaaggctggagaaagtattggtgtagcatgcttagtacaccactttttgtgcagaagcaattaaggttaggggctagatcacttgtaaatgaaacatcaggattggagcaggaatcatacaaattgaaatctgcgaaagcaatgtccaacgtagcaaatgattctggatctgaaggaagaaatgacattggcaagccaaaaggtagagcaatccatgttgaaggcagtgcgtgcgaacgtgttccttcagcagacttgtggcgtccaatacaaagggattcagatgttgtgattcaagtaaacatgacactttcaccatcaaatcagtccacttcggatgacagctcaaagttaaatcacaagggtgtggctactgaaagggtgtttgataaggaagtttatgatggaggttcctcagagggtgttgggagcaaactggacagaagagattcttattttgcacgtgaccaatctcctagccctgattattctgatgtactttctggagaatcaaaagaaaatcactattttaagagatccaatagacattcagatttcagggacttctttgaagccaccaaacttcaggatgagcatgtcaaatctgatttttattgctatccaagtaagccagacagagaaaatagtgaaagctgcagacgtggttataccccttctactgatgatagaaacatggcatctaaacttctgtggatgggtgaagctcctttcactgggcgaggcaagtctggtgatctttttttgggtcacaacagcgaccgtgacttcaaatctcgacataaagcaagaaaaggacagaggagacagagtttagatgacagaaggaatgctatatttgttgaaaaagaaaaaccaacagatagctatcatagtacgtgtgataggaagttcgtgaagagaagatctagctcatcttccctgaggaccaactatcacaattccgtttgcaatcaatcttatgagcagcgttattcacctcttgaaaaaaaagctctgaaaaacgatgagcattactttagcgatgagtctaattaccaccataggcagtctttgtcatgtgacatcaatgaaggagatattgacaagtgcttctcttcagcgaaggagtggcaacgagatggtgaccatatataccattcaatggtaaaaactgatatgcctgatgctaatgatggacgcatgtacagagataggtatagtccggaaaagaaaatagccagacatgaccatagcatggatgttgaattttcccattacactgattacagattttgcgagtggcggagtctggaggtaagaggcagatacagagataaaggaaaatttgccaaaagcaatgatgggcatttcagacatgctaaccatctcgagttgtattctggcctcaacaattttgagagggacaaacctgctactggcttccctgttatgagctcaagaaacagatgcatcgataacaaagaagtctgcaatgctaagatgacacaaaataattgccatgggtatcatcaaaagaacaagcaacatgattcatcattttgtattggcaacattcctcgatatgctttgcgcactgatacttatgctgaaaagggccattttgttctgccaattaagaggaagctttattctgatctgggttccatggaccaaaggactcttgctgatttgccacttctgaaaggaagattgatgcatggccaatccattgccagtgacaggaggatttatgctttgaagctgcataagtcgacaaagaaaattaatacagaagccatttgtagttccagtgatatgagaaatattaatactctttcaaacatttgtgttggcagaagacatgagctggataatgctgataacatccacttgaatgatagaaaaataaagtttgagagggaaggtaatgagttaagacgtgtaattgaagataaccaaaagggaagccatcctgtggataaggatttgcacacttctagacataagcatgtacatcagaagctgtggaaacagaatctgagtcaccgtcactcaggcaatcaggatttggagaaatcagcagaccagaattgtctaaataaagatgtggagatcgaggaaggagaattgattgaagaggaccataataatatcatttataaaagcaagcttaagcaggaaaatgttgtactgaaatcagttattgaaacaagttcagcagagcagttacaggtgaataatgcaacgtcgaaggatgctacctgcaacaacagagctacaagagaatctgatgagaaacacattcttgaggtaatggaaaagatgcaaaaaaggagggaaaggttcaaagaggctattgcaccaaaaaaagaagtcggtgacaagaaagacctatcggctttagcatgcagtacagatttcatccagaatcaacggcctgctaggaaacggcggtggggtggtaattgttggatgctggaaatgccttgagagtttgtccgtgatggtttcttcaacaaggtgttctgcttatgttgctcaaaacattttactgttatgtttacttattctgatggctgggttggggaaacaaaatatagaaagcatattcttcaggcacttttatagatatagtatcttgcatagtttaagagtaaaaaggttcgacttcaaatgtaacgtgtttgtggggttctttcaaaccactggagatgatttactatcccctaagatgagatttaaatggtttcctttctgcaggctgctaaatgtttctctgtgtttatgtattcaagtttatctcttcatactctgaatgccatcatctccagagttctttttattattatgcagcaattgtgtttttccccgattaagttgcgtgtttgcagtatggttttattgctaccctaccgatatcttcagccagtcacatacaagttgcagtctgcagttagttgttgccttacccactctgtcaggctaatatatctgtctgagtcagagagaagaacggacatttgccctctcgtcagaaggcgaacacgcgagcagctccattgccaagagaatttggagaacgctgagacgacacgatcgtgcccactgcccacgagaggagttgccgcctgtcaaaggctggaagcggggacttgtggggaagatgggaagccgccttcaactcctgcagacagaataacagaaatatcgaacgacgtacacactccagctccgacaccgtcatccgtcaagtcgtcaactgacagtgcactcggcggtggttcgaacgccgaaccgacgtggcgcgctgacgacctccaaccgtgccctcatcccagcctcccgcttccgtccctgcaaggtccaagcccggtacggcaccgcatccgagagggcagacccgtcagtccaggcccctcgtccttcactcctccttcgcctctcaaaggcgcgcctcgctccaccattcccactggcgatttgcaacagacaagctccactagagctcggccggcatccatggcgatgcggctcctgtccccgtccacgccgcccccacgcttcccgagccccggccagaaggcacccgcctccatctccgcatcgtcttcctcgtacttctctgtccgcttgcgccgcgcgcgcgcggcggctgcagcggctgcaggcgcggccgcggcgggcgggtccgaccggcgcagcggacgcttcgagggggaggcgatgagcggggcattcgacaggggcctcgcggagatcgcgaggaaggtgccgctctttgagcccacagcggacggggagctcgccgctgcggctggcgagcggccgttgcctatcaatctcgagctctggctctaccgcgtcaaagtgcacaccagaaagttcgagttccctgaagcagaaaaacttctggacaagtgtatctcattctggcctgaagacggacgtccttatgtggcgctggggaagctgtatagcaagcagtcaaggtatgacaaagctagagcggtgtacgaaagggggtgccaagcaacgcaaggcgaaaacccatacatttggcagtgctgggcagtcctagaaagcaagggtggaaatattcgaagggcacgcgagctatttgatgccgctactgtggctgatgcaaagcatattgctgcttggcacgggtgggcaattttagaaataaagcaaggaaacataaaaaaggcacggaacctacttgggaaagccctgaaatattgtggaggaaatgagtatatttaccaaactcttgctttgcttgaagctaaagcagagcgctttgaacaggcacggactttgttcgagcaagccagtcaatccaatccaaaaagttgtgcaagctggctagcttgggctcaggtagaaatgcgtgcaggaaacaataccatggcaagaaagctctttgagaaagctgtccaggctagtcctaaaaaccgattttcatggcatgtatgggcactatttgaggcaaatgaaggtaacattgacagggcaaggaagttgcttaagattggacatgctgtaaatcctagggaccctgtaattctacagtcactcgcgctactggaatacaacttttcatctgcgaatgttgctcgtgtgttattcagaaaagcgtctcagattgatccaagacatcagccagtttggatagcttgggggtggatggaatggaaagaaagaaatgcaagaacagcaagagctctctatcaaagagctttgtcagtcaattcaacaaatgaatgtgctgctcgttgtcttcaggcttggggagtcctagaacagcgtgctggtaactacacggccgctagacgattgttgaggtcttcactgagtataaactcccaaagtgaggtgacatggatgacatgggcagcacttgaggaggaacagggggatccagttcgagctgaagaaattcggaacctttactttcagcagcgtactgaagttgtggatgatgcatcctgggtcataggcttcctcgacatcatcgaccctgccctagacagcgtgaagaggctactaaacctggatcagccttctagaccggcgaggcaagatgatgttaaaagcacaacagaaccgtgtcctcccactgccaagtcttcagaaacttctgcgggcaatgatgctcgtaacaacgggagcgaagcaatggggactctaacaagtgatttcgatttggatgctttcatcaagaagaggctggccctcgacccatcggagctggatgccgtgctcgagggctctgacccgaggggtgttgtttctcagaggaggaaacagcggctgcccaggaagccactccctcttctccctgtcccgtaaattttccagatcggtctgtctcatttccattccaccggtaaaatccataagggctagtttgtttgagactccatttttttccaagtgttaaaaataaaaatcccttgaaaaaaatgaggttatcaaactagccctaaatccctaactgtagcagcctgcaatacgtgaatatgtgtgaggactaaggagatgacgtcccctgccgctgccatagcaatcaccacacctgttaattgtcattccagccacgtgtatgtaattctgccaccatttgttagtaaagtctagctctgtacataaattagactctttttgtctacataatatcgccggactaagttatcgagaagtattttgacaatggtagtgccattacttcaacaccttagagcatccaagaaaatatgtaaaaggttcccaaaaccatttttgacggcgaaacaccatcttcattcactccaacagtacctctttccgtccccgcaaattttggcgacccgcaaaccagggctggcgttccgtagatatgcgcgaggaaaatactcccccgatcgcctgcgcgcgaatcatggagagttctcatgtcctgctttctttatggttcccgcgtcttccttttggttcccgcgtccttcctacttcgtgagtttctgcgaggcggtg

SEQ ID NO: 7334 - DNA, 6021 bp, Zea Mays
cccatcatggggcaaatcgatcggcatgtgtttcggcgtgattataattttttcttgtcaagaaacagcacaattttcgacatagacattgaagcgtttcaactgaagccttggagacagcaaggagcggatcttactgactactttaattttagtctggatgaagaaggctggagaaagtattggtgtagcatgcttagtacaccactttttgtgcagaagcaattaaggttaggggctagatcacttgtaaatgaaacatcaggattggagcaggaatcatacaaattgaaatctgcgaaagcaatgtccaacgtagcaaatgattctggatctgaaggaagaaatgacattggcaagccaaaaggtagagcaatccatgttgaaggcagtgcgtgcgaacgtgttccttcagcagacttgtggcgtccaatacaaagggattcagatgttgtgattcaagtaaacatgacactttcaccatcaaatcagtccacttcggatgacagctcaaagttaaatcacaagggtgtggctactgaaagggtgtttgataaggaagtttatgatggaggttcctcagagggtgttgggagcaaactggacagaagagattcttattttgcacgtgaccaatctcctagccctgattattctgatgtactttctggagaatcaaaagaaaatcactattttaagagatccaatagacattcagatttcagggacttctttgaagccaccaaacttcaggatgagcatgtcaaatctgatttttattgctatccaagtaagccagacagagaaaatagtgaaagctgcagacgtggttataccccttctactgatgatagaaacatggcatctaaacttctgtggatgggtgaagctcctttcactgggcgaggcaagtctggtgatctttttttgggtcacaacagcgaccgtgacttcaaatctcgacataaagcaagaaaaggacagaggagacagagtttagatgacagaaggaatgctatatttgttgaaaaagaaaaaccaacagatagctatcatagtacgtgtgataggaagttcgtgaagagaagatctagctcatcttccctgaggaccaactatcacaattccgtttgcaatcaatcttatgagcagcgttattcacctcttgaaaaaaaagctctgaaaaacgatgagcattactttagcgatgagtctaattaccaccataggcagtctttgtcatgtgacatcaatgaaggagatattgacaagtgcttctcttcagcgaaggagtggcaacgagatggtgaccatatataccattcaatggtaaaaactgatatgcctgatgctaatgatggacgcatgtacagagataggtatagtccggaaaagaaaatagccagacatgaccatagcatggatgttgaattttcccattacactgattacagattttgcgagtggcggagtctggaggtaagaggcagatacagagataaaggaaaatttgccaaaagcaatgatgggcatttcagacatgctaaccatctcgagttgtattctggcctcaacaattttgagagggacaaacctgctactggcttccctgttatgagctcaagaaacagatgcatcgataacaaagaagtctgcaatgctaagatgacacaaaataattgccatgggtatcatcaaaagaacaagcaacatgattcatcattttgtattggcaacattcctcgatatgctttgcgcactgatacttatgctgaaaagggccattttgttctgccaattaagaggaagctttattctgatctgggttccatggaccaaaggactcttgctgatttgccacttctgaaaggaagattgatgcatggccaatccattgccagtgacaggaggatttatgctttgaagctgcataagtcgacaaagaaaattaatacagaagccatttgtagttccagtgatatgagaaatattaatactctttcaaacatttgtgttggcagaagacatgagctggataatgctgataacatccacttgaatgatagaaaaataaagtttgagagggaaggtaatgagttaagacgtgtaattgaagataaccaaaagggaagccatcctgtggataaggatttgcacacttctagacataagcatgtacatcagaagctgtggaaacagaatctgagtcaccgtcactcaggcaatcaggatttggagaaatcagcagaccagaattgtctaaataaagatgtggagatcgaggaaggagaattgattgaagaggaccataataatatcatttataaaagcaagcttaagcaggaaaatgttgtactgaaatcagttattgaaacaagttcagcagagcagttacaggtgaataatgcaacgtcgaaggatgctacctgcaacaacagagctacaagagaatctgatgagaaacacattcttgaggtaatggaaaagatgcaaaaaaggagggaaaggttcaaagaggctattgcaccaaaaaaagaagtcggtgacaagaaagacctatcggctttagcatgcagtacagatttcatccagaatcaacggcctgctaggaaacggcggtggggtggtaattgttggatgctggaaatgccttgagagtttgtccgtgatggtttcttcaacaaggtgttctgcttatgttgctcaaaacattttactgttatgtttacttattctgatggctgggttggggaaacaaaatatagaaagcatattcttcaggcacttttatagatatagtatcttgcatagtttaagagtaaaaaggttcgacttcaaatgtaacgtgtttgtggggttctttcaaaccactggagatgatttactatcccctaagatgagatttaaatggtttcctttctgcaggctgctaaatgtttctctgtgtttatgtattcaagtttatctcttcatactctgaatgccatcatctccagagttctttttattattatgcagcaattgtgtttttccccgattaagccagtcacatacaagttgcagtctgcagttagttgttgccttacccactctgtcaggctaatatatctgtctgagtcagagagaagaacggacatttgccctctcgtcagaaggcgaacacgcgagcagctccattgccaagagaatttggagaacgctgagacgacacgatcgtgcccactgcccacgagaggagttgccgcctgtcaaaggctggaagcggggacttgtggggaagatgggaagccgccttcaactcctgcagacagaataacagaaatatcgaacgacgtacacactccagctccgacaccgtcatccgtcaagtcgtcaactgacagtgcactcggcggtggttcgaacgccgaaccgacgtggcgcgctgacgacctccaaccgtgccctcatcccagcctcccgcttccgtccctgcaaggtccaagcccggtacggcaccgcatccgagagggcagacccgtcagtccaggcccctcgtccttcactcctccttcgcctctcaaaggcgcgcctcgctccaccattcccactggcgatttgcaacagacaagctccactagagctcggccggcatccatggcgatgcggctcctgtccccgtccacgccgcccccacgcttcccgagccccggccagaaggcacccgcctccatctccgcatcgtcttcctcgtacttctctgtccgcttgcgccgcgcgcgcgcggcggctgcagcggctgcaggcgcggccgcggcgggcgggtccgaccggcgcagcggacgcttcgagggggaggcgatgagcggggcattcgacaggggcctcgcggagatcgcgaggaaggtgccgctctttgagcccacagcggacggggagctcgccgctgcggctggcgagcggccgttgcctatcaatctcgagctctggctctaccgcgtcaaagtgcacaccagaaagttcgagttccctgaagcagaaaaacttctggacaagtgtatctcattctggcctgaagacggacgtccttatgtggcgctggggaagctgtatagcaagcagtcaaggtatgacaaagctagagcggtgtacgaaagggggtgccaagcaacgcaaggcgaaaacccatacatttggcagtgctgggcagtcctagaaagcaagggtggaaatattcgaagggcacgcgagctatttgatgccgctactgtggctgatgcaaagcatattgctgcttggcacgggtgggcaattttagaaataaagcaaggaaacataaaaaaggcacggaacctacttgggaaagccctgaaatattgtggaggaaatgagtatatttaccaaactcttgctttgcttgaagctaaagcagagcgctttgaacaggcacggactttgttcgagcaagccagtcaatccaatccaaaaagttgtgcaagctggctagcttgggctcaggtagaaatgcgtgcaggaaacaataccatggcaagaaagctctttgagaaagctgtccaggctagtcctaaaaaccgattttcatggcatgtatgggcactatttgaggcaaatgaaggtaacattgacagggcaaggaagttgcttaagattggacatgctgtaaatcctagggaccctgtaattctacagtcactcgcgctactggaatacaacttttcatctgcgaatgttgctcgtgtgttattcagaaaagcgtctcagattgatccaagacatcagccagtttggatagcttggggagtcctagaacagcgtgctggtaactacacggccgctagacgattgttgaggtcttcactgagtataaactcccaaagtgaggtgacatggatgacatgggcagcacttgaggaggaacagggggatccagttcgagctgaagaaattcggaacctttactttcagcagcgtactgaagttgtggatgatgcatcctgggtcataggcttcctcgacatcatcgaccctgccctagacagcgtgaagaggctactaaacctggatcagccttctagaccggcgaggcaagatgatgttaaaagcacaacagaaccgtgtcctcccactgccaagtcttcagaaacttctgcgggcaatgatgctcgtaacaacgggagcgaagcaatggggactctaacaagtgatttcgatttggatgctttcatcaagaagaggctggccctcgacccatcggagctggatgccgtgctcgagggctctgacccgaggggtgttgtttctcagaggaggaaacagcggctgcccaggaagccactccctcttctccctgtcccgtaaattttccagatcggtctgtctcatttccattccaccggtaaaatccataagggctagtttgtttgagactccatttttttccaagtgttaaaaataaaaatcccttgaaaaaaatgaggttatcaaactagccctaaatccctaactgtagcagcctgcaatacgtgaatatgtgtgaggactaaggagatgacgtcccctgccgctgccatagcaatcaccacacctgttaattgtcattccagccacgtgtatgtaattctgccaccatttgttagtaaagtctagctctgtacataaattagactctttttgtctacataatatcgccggactaagttatcgagaagtattttgacaatggtagtgccattacttcaacaccttagagcatccaagaaaatatgtaaaaggttcccaaaaccatttttgacggcgaaacaccatcttcattcactccaacagtacctctttccgtccccgcaaattttggcgacccgcaaaccagggctggcgttccgtagatatgcgcgaggaaaatactcccccgatcgcctgcgcgcgaatcatggagagttctcatgtcctgctttctttatggttcccgcgtcttccttttggttcccgcgtccttcctacttcgtgagtttctgcgaggcggtg

SEQ ID NO: 7335 - DNA, 4665 bp, Zea Mays
ctccagtgcaaggggtttgttgagaaaacgacattacccatcatggggcaaatcgatcggcatgtgtttcggcgtgattataattttttcttgtcaagaaacagcacaattttcgacatagacattgaagcgtttcaactgaagccttggagacagcaaggagcggatcttactgactactttaattttagtctggatgaagaaggctggagaaagtattggtgtagcatgaagcaattaaggttaggggctagatcacttgtaaatgaaacatcaggattggagcaggaatcatacaaattgaaatctgcgaaagcaatgtccaacgtagcaaatgattctggatctgaaggaagaaatgacattggcaagccaaaaggtagagcaatccatgttgaaggcagtgcgtgcgaacgtgttccttcagcagacttgtggcgtccaatacaaagggattcagatgttgtgattcaagtaaacatgacactttcaccatcaaatcagtccacttcggatgacagctcaaagttaaatcacaagggtgtggctactgaaagggtgtttgataaggaagtttatgatggaggttcctcagagggtgttgggagcaaactggacagaagagattcttattttgcacgtgaccaatctcctagccctgattattctgatgtactttctggagaatcaaaagaaaatcactattttaagagatccaatagacattcagatttcagggacttctttgaagccaccaaacttcaggatgagcatgtcaaatctgatttttattgctatccaagtaagccagacagagaaaatagtgaaagctgcagacgtggttataccccttctactgatgatagaaacatggcatctaaacttctgtggatgggtgaagctcctttcactgggcgaggcaagtctggtgatctttttttgggtcacaacagcgaccgtgacttcaaatctcgacataaagcaagaaaaggacagaggagacagagtttagatgacagaaggaatgctatatttgttgaaaaagaaaaaccaacagatagctatcatagtacgtgtgataggaagttcgtgaagagaagatctagctcatcttccctgaggaccaactatcacaattccgtttgcaatcaatcttatgagcagcgttattcacctcttgaaaaaaaagctctgaaaaacgatgagcattactttagcgatgagtctaattaccaccataggcagtctttgtcatgtgacatcaatgaaggagatattgacaagtgcttctcttcagcgaaggagtggcaacgagatggtgaccatatataccattcaatggtaaaaactgatatgcctgatgctaatgatggacgcatgtacagagataggtatagtccggaaaagaaaatagccagacatgaccatagcatggatgttgaattttcccattacactgattacagattttgcgagtggcggagtctggaggtaagaggcagatacagagataaaggaaaatttgccaaaagcaatgatgggcatttcagacatgctaaccatctcgagttgtattctggcctcaacaattttgagagggacaaacctgctactggcttccctgttatgagctcaagaaacagatgcatcgataacaaagaagtctgcaatgctaagatgacacaaaataattgccatgggtatcatcaaaagaacaagcaacatgattcatcattttgtattggcaacattcctcgatatgctttgcgcactgatacttatgctgaaaagggccattttgttctgccaattaagaggaagctttattctgatctgggttccatggaccaaaggactcttgctgatttgccacttctgaaaggaagattgatgcatggccaatccattgccagtgacaggaggatttatgctttgaagctgcataagtcgacaaagaaaattaatacagaagccatttgtagttccagtgatatgagaaatattaatactctttcaaacatttgtgttggcagaagacatgagctggataatgctgataacatccacttgaatgatagaaaaataaagtttgagagggaaggtaatgagttaagacgtgtaattgaagataaccaaaagggaagccatcctgtggataaggatttgcacacttctagacataagcatgtacatcagaagctgtggaaacagaatctgagtcaccgtcactcaggcaatcaggatttggagaaatcagcagaccagaattgtctaaataaagatgtggagatcgaggaaggagaattgattgaagaggaccataataatatcatttataaaagcaagcttaagcaggaaaatgttgtactgaaatcagttattgaaacaagttcagcagagcagttacaggtgaataatgcaacgtcgaaggatgctacctgcaacaacagagctacaagagaatctgatgagaaacacattcttgaggtaatggaaaagatgcaaaaaaggagggaaaggttcaaagaggctattgcaccaaaaaaagaagtcggtgacaagaaagacctatcggctttagcatgcagtacagatttcatccagaatcaacggcctgctaggaaacggcggtggggtggtaattgttggatgctggaaatgccttgagagtttgtccgtgatggtttcttcaacaaggctgctaaatgtttctctgtgtttatgtattcaagtttatctcttcatactctgaatgccatcatctccagagttctttttattattatgcagcaattgtgtttttccccgattaagtgctgggcagtcctagaaagcaagggtggaaatattcgaagggcacgcgagctatttgatgccgctactgtggctgatgcaaagcatattgctgcttggcacgggtgggcaattttagaaataaagcaaggaaacataaaaaaggcacggactttgttcgagcaagccagtcaatccaatccaaaaagttgtgcaagctggctagcttgggctcaggtagaaatgcgtgcaggaaacaataccatggcaagaaagctctttgagaaagctgtccaggctagtcctaaaaaccgattttcatggcatgtatgggcactatttgaggcaaatgaaggtaacattgacagggcaaggaagttgcttaagattggacatgctgtaaatcctagggaccctgtaattctacagtcactcgcgctactggaatacaacttttcatctgcgaatgttgctcgtgtgttattcagaaaagcgtctcagattgatccaagacatcagccagtttggatagcttgggggtggatggaatggaaagaaagaaatgcaagaacagcaagagctctctatcaaagagctttgtcagtcaattcaacaaatgaatgtgctgctcgttgtcttcaggcttggggagtcctagaacagcgtgctggtaactacacggccgctagacgattgttgaggtcttcactgagtataaactcccaaagtgaggtgacatggatgacatgggcagcacttgaggaggaacagggggatccagttcgagctgaagaaattcggaacctttactttcagcagcgtactgaagttgtggatgatgcatcctgggtcataggcttcctcgacatcatcgaccctgccctagacagcgtgaagaggctactaaacctggatcagccttctagaccggcgaggcaagatgatgttaaaagcacaacagaaccgtgtcctcccactgccaagtcttcagaaacttctgcgggcaatgatgctcgtaacaacgggagcgaagcaatggggactctaacaagtgatttcgatttggatgctttcatcaagaagaggctggccctcgacccatcggagctggatgccgtgctcgagggctctgacccgaggggtgttgtttctcagaggaggaaacagcggctgcccaggaagccactccctcttctccctgtcccgtaaattttccagatcggtctgtctcatttccattccaccggtaaaatccataagggctagtttgtttgagactccatttttttccaagtgttaaaaataaaaatcccttgaaaaaaatgaggttatcaaactagccctaaatccctaactgtagcagcctgcaatacgtgaatatgtgtgaggactaaggagatgacgtcccctgccgctgccatagcaatcaccacacctgttaattgtcattccagccacgtgtatgtaattctgccaccatttgttagtaaagtctagctctgtacataaattagactctttttgtctacataatatcgccggactaagttatcgagaagtattttgacaatggtagtgccattacttcaacaccttagagcatccaagaaaatatgtaaaaggttcccaaaaccatttttgacggcgaaacaccatcttcattcactccaacagtacctctttccgtccccgcaaattttggcgacccgcaaaccagggctggcgttccgtagatatgcgcgaggaaaatactcccccgatcgcctgcgcgcgaatcatggagagttctcatgtcctgctttctttatggttcccgcgtcttccttttggttcccgcgtccttcctacttcgtgagtttctgcgaggcggtg

SEQ ID NO: 7336 - DNA, 5898 bp, Zea Mays
ctccagtgcaaggggtttgttgagaaaacgacattacccatcatggggcaaatcgatcggcatgtgtttcggcgtgattataattttttcttgtcaagaaacagcacaattttcgacatagacattgaagcgtttcaactgaagccttggagacagcaaggagcggatcttactgactactttaattttagtctggatgaagaaggctggagaaagtattggtgtagcatgaagcaattaaggttaggggctagatcacttgtaaatgaaacatcaggattggagcaggaatcatacaaattgaaatctgcgaaagcaatgtccaacgtagcaaatgattctggatctgaaggaagaaatgacattggcaagccaaaaggtagagcaatccatgttgaaggcagtgcgtgcgaacgtgttccttcagcagacttgtggcgtccaatacaaagggattcagatgttgtgattcaagtaaacatgacactttcaccatcaaatcagtccacttcggatgacagctcaaagttaaatcacaagggtgtggctactgaaagggtgtttgataaggaagtttatgatggaggttcctcagagggtgttgggagcaaactggacagaagagattcttattttgcacgtgaccaatctcctagccctgattattctgatgtactttctggagaatcaaaagaaaatcactattttaagagatccaatagacattcagatttcagggacttctttgaagccaccaaacttcaggatgagcatgtcaaatctgatttttattgctatccaagtaagccagacagagaaaatagtgaaagctgcagacgtggttataccccttctactgatgatagaaacatggcatctaaacttctgtggatgggtgaagctcctttcactgggcgaggcaagtctggtgatctttttttgggtcacaacagcgaccgtgacttcaaatctcgacataaagcaagaaaaggacagaggagacagagtttagatgacagaaggaatgctatatttgttgaaaaagaaaaaccaacagatagctatcatagtacgtgtgataggaagttcgtgaagagaagatctagctcatcttccctgaggaccaactatcacaattccgtttgcaatcaatcttatgagcagcgttattcacctcttgaaaaaaaagctctgaaaaacgatgagcattactttagcgatgagtctaattaccaccataggcagtctttgtcatgtgacatcaatgaaggagatattgacaagtgcttctcttcagcgaaggagtggcaacgagatggtgaccatatataccattcaatggtaaaaactgatatgcctgatgctaatgatggacgcatgtacagagataggtatagtccggaaaagaaaatagccagacatgaccatagcatggatgttgaattttcccattacactgattacagattttgcgagtggcggagtctggaggtaagaggcagatacagagataaaggaaaatttgccaaaagcaatgatgggcatttcagacatgctaaccatctcgagttgtattctggcctcaacaattttgagagggacaaacctgctactggcttccctgttatgagctcaagaaacagatgcatcgataacaaagaagtctgcaatgctaagatgacacaaaataattgccatgggtatcatcaaaagaacaagcaacatgattcatcattttgtattggcaacattcctcgatatgctttgcgcactgatacttatgctgaaaagggccattttgttctgccaattaagaggaagctttattctgatctgggttccatggaccaaaggactcttgctgatttgccacttctgaaaggaagattgatgcatggccaatccattgccagtgacaggaggatttatgctttgaagctgcataagtcgacaaagaaaattaatacagaagccatttgtagttccagtgatatgagaaatattaatactctttcaaacatttgtgttggcagaagacatgagctggataatgctgataacatccacttgaatgatagaaaaataaagtttgagagggaaggtaatgagttaagacgtgtaattgaagataaccaaaagggaagccatcctgtggataaggatttgcacacttctagacataagcatgtacatcagaagctgtggaaacagaatctgagtcaccgtcactcaggcaatcaggatttggagaaatcagcagaccagaattgtctaaataaagatgtggagatcgaggaaggagaattgattgaagaggaccataataatatcatttataaaagcaagcttaagcaggaaaatgttgtactgaaatcagttattgaaacaagttcagcagagcagttacaggtgaataatgcaacgtcgaaggatgctacctgcaacaacagagctacaagagaatctgatgagaaacacattcttgaggtaatggaaaagatgcaaaaaaggagggaaaggttcaaagaggctattgcaccaaaaaaagaagtcggtgacaagaaagacctatcggctttagcatgcagtacagatttcatccagaatcaacggcctgctaggaaacggcggtggggtggtaattgttggatgctggaaatgccttgagagtttgtccgtgatggtttcttcaacaaggtgttctgcttatgttgctcaaaacattttactgttatgtttacttattctgatggctgggttggggaaacaaaatatagaaagcatattcttcaggcacttttatagatatagtatcttgcatagtttaagagtaaaaaggttcgacttcaaatgtaacgtgtttgtggggttctttcaaaccactggagatgatttactatcccctaagatgagatttaaatggtttcctttctgcaggctgctaaatgtttctctgtgtttatgtattcaagtttatctcttcatactctgaatgccatcatctccagagttctttttattattatgcagcaattgtgtttttccccgattaagccagtcacatacaagttgcagtctgcagttagttgttgccttacccactctgtcaggctaatatatctgtctgagtcagagagaagaacggacatttgccctctcgtcagaaggcgaacacgcgagcagctccattgccaagagaatttggagaacgctgagacgacacgatcgtgcccactgcccacgagaggagttgccgcctgtcaaaggctggaagcggggacttgtggggaagatgggaagccgccttcaactcctgcagacagaataacagaaatatcgaacgacgtacacactccagctccgacaccgtcatccgtcaagtcgtcaactgacagtgcactcggcggtggttcgaacgccgaaccgacgtggcgcgctgacgacctccaaccgtgccctcatcccagcctcccgcttccgtccctgcaaggtccaagcccggtacggcaccgcatccgagagggcagacccgtcagtccaggcccctcgtccttcactcctccttcgcctctcaaaggcgcgcctcgctccaccattcccactggcgatttgcaacagacaagctccactagagctcggccggcatccatggcgatgcggctcctgtccccgtccacgccgcccccacgcttcccgagccccggccagaaggcacccgcctccatctccgcatcgtcttcctcgtacttctctgtccgcttgcgccgcgcgcgcgcggcggctgcagcggctgcaggcgcggccgcggcgggcgggtccgaccggcgcagcggacgcttcgagggggaggcgatgagcggggcattcgacaggggcctcgcggagatcgcgaggaaggtgccgctctttgagcccacagcggacggggagctcgccgctgcggctggcgagcggccgttgcctatcaatctcgagctctggctctaccgcgtcaaagtgcacaccagaaagttcgagttccctgaagcagaaaaacttctggacaagtgtatctcattctggcctgaagacggacgtccttatgtggcgctggggaagctgtatagcaagcagtcaaggtatgacaaagctagagcggtgtacgaaagggggtgccaagcaacgcaaggcgaaaacccatacatttggcaggcacggactttgttcgagcaagccagtcaatccaatccaaaaagttgtgcaagctggctagcttgggctcaggtagaaatgcgtgcaggaaacaataccatggcaagaaagctctttgagaaagctgtccaggctagtcctaaaaaccgattttcatggcatgtatgggcactatttgaggcaaatgaaggtaacattgacagggcaaggaagttgcttaagattggacatgctgtaaatcctagggaccctgtaattctacagtcactcgcgctactggaatacaacttttcatctgcgaatgttgctcgtgtgttattcagaaaagcgtctcagattgatccaagacatcagccagtttggatagcttgggggtggatggaatggaaagaaagaaatgcaagaacagcaagagctctctatcaaagagctttgtcagtcaattcaacaaatgaatgtgctgctcgttgtcttcaggcttggggagtcctagaacagcgtgctggtaactacacggccgctagacgattgttgaggtcttcactgagtataaactcccaaagtgaggtgacatggatgacatgggcagcacttgaggaggaacagggggatccagttcgagctgaagaaattcggaacctttactttcagcagcgtactgaagttgtggatgatgcatcctgggtcataggcttcctcgacatcatcgaccctgccctagacagcgtgaagaggctactaaacctggatcagccttctagaccggcgaggcaagatgatgttaaaagcacaacagaaccgtgtcctcccactgccaagtcttcagaaacttctgcgggcaatgatgctcgtaacaacgggagcgaagcaatggggactctaacaagtgatttcgatttggatgctttcatcaagaagaggctggccctcgacccatcggagctggatgccgtgctcgagggctctgacccgaggggtgttgtttctcagaggaggaaacagcggctgcccaggaagccactccctcttctccctgtcccgtaaattttccagatcggtctgtctcatttccattccaccggtaaaatccataagggctagtttgtttgagactccatttttttccaagtgttaaaaataaaaatcccttgaaaaaaatgaggttatcaaactagccctaaatccctaactgtagcagcctgcaatacgtgaatatgtgtgaggactaaggagatgacgtcccctgccgctgccatagcaatcaccacacctgttaattgtcattccagccacgtgtatgtaattctgccaccatttgttagtaaagtctagctctgtacataaattagactctttttgtctacataatatcgccggactaagttatcgagaagtattttgacaatggtagtgccattacttcaacaccttagagcatccaagaaaatatgtaaaaggttcccaaaaccatttttgacggcgaaacaccatcttcattcactccaacagtacctctttccgtccccgcaaattttggcgacccgcaaaccagggctggcgttccgtagatatgcgcgaggaaaatactcccccgatcgcctgcgcgcgaatcatggagagttctcatgtcctgctttctttatggttcccgcgtcttccttttggttcccgcgtccttcctacttcgtgagtttctgcgaggcggtg

SEQ ID NO: 7337 - DNA, 6298 bp, Zea Mays
ctctcttctgcatatgtttggcatgttgcttttgtttgttatcttcccaagtgcatagtgtgaatgattactttacgtagacaacgagcagtctgtgtttcccgaggaggttgagaggaagtcccggatcagcagtttggtgaaggttggtgggctccagtgcaaggggtttgttgagaaaacgacattacccatcatggggcaaatcgatcggcatgtgtttcggcgtgattataattttttcttgtcaagaaacagcacaattttcgacatagacattgaagcgtttcaactgaagccttggagacagcaaggagcggatcttactgactactttaattttagtctggatgaagaaggctggagaaagtattggtgtagcatgaagcaattaaggttaggggctagatcacttgtaaatgaaacatcaggattggagcaggaatcatacaaattgaaatctgcgaaagcaatgtccaacgtagcaaatgattctggatctgaaggaagaaatgacattggcaagccaaaaggtagagcaatccatgttgaaggcagtgcgtgcgaacgtgttccttcagcagacttgtggcgtccaatacaaagggattcagatgttgtgattcaagtaaacatgacactttcaccatcaaatcagtccacttcggatgacagctcaaagttaaatcacaagggtgtggctactgaaagggtgtttgataaggaagtttatgatggaggttcctcagagggtgttgggagcaaactggacagaagagattcttattttgcacgtgaccaatctcctagccctgattattctgatgtactttctggagaatcaaaagaaaatcactattttaagagatccaatagacattcagatttcagggacttctttgaagccaccaaacttcaggatgagcatgtcaaatctgatttttattgctatccaagtaagccagacagagaaaatagtgaaagctgcagacgtggttataccccttctactgatgatagaaacatggcatctaaacttctgtggatgggtgaagctcctttcactgggcgaggcaagtctggtgatctttttttgggtcacaacagcgaccgtgacttcaaatctcgacataaagcaagaaaaggacagaggagacagagtttagatgacagaaggaatgctatatttgttgaaaaagaaaaaccaacagatagctatcatagtacgtgtgataggaagttcgtgaagagaagatctagctcatcttccctgaggaccaactatcacaattccgtttgcaatcaatcttatgagcagcgttattcacctcttgaaaaaaaagctctgaaaaacgatgagcattactttagcgatgagtctaattaccaccataggcagtctttgtcatgtgacatcaatgaaggagatattgacaagtgcttctcttcagcgaaggagtggcaacgagatggtgaccatatataccattcaatggtaaaaactgatatgcctgatgctaatgatggacgcatgtacagagataggtatagtccggaaaagaaaatagccagacatgaccatagcatggatgttgaattttcccattacactgattacagattttgcgagtggcggagtctggaggtaagaggcagatacagagataaaggaaaatttgccaaaagcaatgatgggcatttcagacatgctaaccatctcgagttgtattctggcctcaacaattttgagagggacaaacctgctactggcttccctgttatgagctcaagaaacagatgcatcgataacaaagaagtctgcaatgctaagatgacacaaaataattgccatgggtatcatcaaaagaacaagcaacatgattcatcattttgtattggcaacattcctcgatatgctttgcgcactgatacttatgctgaaaagggccattttgttctgccaattaagaggaagctttattctgatctgggttccatggaccaaaggactcttgctgatttgccacttctgaaaggaagattgatgcatggccaatccattgccagtgacaggaggatttatgctttgaagctgcataagtcgacaaagaaaattaatacagaagccatttgtagttccagtgatatgagaaatattaatactctttcaaacatttgtgttggcagaagacatgagctggataatgctgataacatccacttgaatgatagaaaaataaagtttgagagggaaggtaatgagttaagacgtgtaattgaagataaccaaaagggaagccatcctgtggataaggatttgcacacttctagacataagcatgtacatcagaagctgtggaaacagaatctgagtcaccgtcactcaggcaatcaggatttggagaaatcagcagaccagaattgtctaaataaagatgtggagatcgaggaaggagaattgattgaagaggaccataataatatcatttataaaagcaagcttaagcaggaaaatgttgtactgaaatcagttattgaaacaagttcagcagagcagttacaggtgaataatgcaacgtcgaaggatgctacctgcaacaacagagctacaagagaatctgatgagaaacacattcttgaggtaatggaaaagatgcaaaaaaggagggaaaggttcaaagaggctattgcaccaaaaaaagaagtcggtgacaagaaagacctatcggctttagcatgcagtacagatttcatccagaatcaacggcctgctaggaaacggcggtggggtggtaattgttggatgctggaaatgccttgagagtttgtccgtgatggtttcttcaacaaggtgttctgcttatgttgctcaaaacattttactgttatgtttacttattctgatggctgggttggggaaacaaaatatagaaagcatattcttcaggcacttttatagatatagtatcttgcatagtttaagagtaaaaaggttcgacttcaaatgtaacgtgtttgtggggttctttcaaaccactggagatgatttactatcccctaagatgagatttaaatggtttcctttctgcaggctgctaaatgtttctctgtgtttatgtattcaagtttatctcttcatactctgaatgccatcatctccagagttctttttattattatgcagcaattgtgtttttccccgattaagccagtcacatacaagttgcagtctgcagttagttgttgccttacccactctgtcaggctaatatatctgtctgagtcagagagaagaacggacatttgccctctcgtcagaaggcgaacacgcgagcagctccattgccaagagaatttggagaacgctgagacgacacgatcgtgcccactgcccacgagaggagttgccgcctgtcaaaggctggaagcggggacttgtggggaagatgggaagccgccttcaactcctgcagacagaataacagaaatatcgaacgacgtacacactccagctccgacaccgtcatccgtcaagtcgtcaactgacagtgcactcggcggtggttcgaacgccgaaccgacgtggcgcgctgacgacctccaaccgtgccctcatcccagcctcccgcttccgtccctgcaaggtccaagcccggtacggcaccgcatccgagagggcagacccgtcagtccaggcccctcgtccttcactcctccttcgcctctcaaaggcgcgcctcgctccaccattcccactggcgatttgcaacagacaagctccactagagctcggccggcatccatggcgatgcggctcctgtccccgtccacgccgcccccacgcttcccgagccccggccagaaggcacccgcctccatctccgcatcgtcttcctcgtacttctctgtccgcttgcgccgcgcgcgcgcggcggctgcagcggctgcaggcgcggccgcggcgggcgggtccgaccggcgcagcggacgcttcgagggggaggcgatgagcggggcattcgacaggggcctcgcggagatcgcgaggaaggtgccgctctttgagcccacagcggacggggagctcgccgctgcggctggcgagcggccgttgcctatcaatctcgagctctggctctaccgcgtcaaagtgcacaccagaaagttcgagttccctgaagcagaaaaacttctggacaagtgtatctcattctggcctgaagacggacgtccttatgtggcgctggggaagctgtatagcaagcagtcaaggtatgacaaagctagagcggtgtacgaaagggggtgccaagcaacgcaaggcgaaaacccatacatttggcagtgctgggcagtcctagaaagcaagggtggaaatattcgaagggcacgcgagctatttgatgccgctactgtggctgatgcaaagcatattgctgcttggcacgggtgggcaattttagaaataaagcaaggaaacataaaaaaggcacggaacctacttgggaaagccctgaaatattgtggaggaaatgagtatatttaccaaactcttgctttgcttgaagctaaagcagagcgctttgaacaggcacggactttgttcgagcaagccagtcaatccaatccaaaaagttgtgcaagctggctagcttgggctcaggtagaaatgcgtgcaggaaacaataccatggcaagaaagctctttgagaaagctgtccaggctagtcctaaaaaccgattttcatggcatgtatgggcactatttgaggcaaatgaaggtaacattgacagggcaaggaagttgcttaagattggacatgctgtaaatcctagggaccctgtaattctacagtcactcgcgctactggaatacaacttttcatctgcgaatgttgctcgtgtgttattcagaaaagcgtctcagattgatccaagacatcagccagtttggatagcttgggggtggatggaatggaaagaaagaaatgcaagaacagcaagagctctctatcaaagagctttgtcagtcaattcaacaaatgaatgtgctgctcgttgtcttcaggcttggggagtcctagaacagcgtgctggtaactacacggccgctagacgattgttgaggtcttcactgagtataaactcccaaagtgaggtgacatggatgacatgggcagcacttgaggaggaacagggggatccagttcgagctgaagaaattcggaacctttactttcagcagcgtactgaagttgtggatgatgcatcctgggtcataggcttcctcgacatcatcgaccctgccctagacagcgtgaagaggctactaaacctggatcagccttctagaccggcgaggcaagatgatgttaaaagcacaacagaaccgtgtcctcccactgccaagtcttcagaaacttctgcgggcaatgatgctcgtaacaacgggagcgaagcaatggggactctaacaagtgatttcgatttggatgctttcatcaagaagaggctggccctcgacccatcggagctggatgccgtgctcgagggctctgacccgaggggtgttgtttctcagaggaggaaacagcggctgcccaggaagccactccctcttctccctgtcccgtaaattttccagatcggtctgtctcatttccattccaccggtaaaatccataagggctagtttgtttgagactccatttttttccaagtgttaaaaataaaaatcccttgaaaaaaatgaggttatcaaactagccctaaatccctaactgtagcagcctgcaatacgtgaatatgtgtgaggactaaggagatgacgtcccctgccgctgccatagcaatcaccacacctgttaattgtcattccagccacgtgtatgtaattctgccaccatttgttagtaaagtctagctctgtacataaattagactctttttgtctacataatatcgccggactaagttatcgagaagtattttgacaatggtagtgccattacttcaacaccttagagcatccaagaaaatatgtaaaaggttcccaaaaccatttttgacggcgaaacaccatcttcattcactccaacagtacctctttccgtccccgcaaattttggcgacccgcaaaccagggctggcgttccgtagatatgcgcgaggaaaatactcccccgatcgcctgcgcgcgaatcatggagagttctcatgtcctgctttctttatggttcccgcgtcttccttttggttcccgcgtccttcctacttcgtgagtttctgcgaggcggtg

SEQ ID NO: 7338 - DNA, 6369 bp, Zea Mays
atgcccccacaagttctagggttttaggtccaaggtttttgtgcaaccttcgtccgcgcgccaccaatttcttagcaattagtacctcacacgtgctccctctgctgctgcgccgctctatggctgacccattggacgcggccgccgccttcggtgtatccaccaacgacaacaatgtcgacgacgtcgaggacctttacgcggacctcgacgagcaggtcgccgccgcgctcgctgccgcaggggagagtggcggctcaaacgcgagggattccgaccccctcaccgacggcgagggggagttcccggagcccgacgagaacgaggcggtggatttgggcgacgggaccgagggctacagcagcagcgatgatgagagcgatgatggccttcgcatcgtgctgaacgaggacaccagcgcgccactgccgccgccccctgtggggcgcggcgagggatgcgtggctgaggatgaggagggagatgatacgagcaaccgtgtgaaggtttcatctgttaacgatggcgggtgggcaacggttggtgggctccagtgcaaggggtttgttgagaaaacgacattacccatcatggggcaaatcgatcggcatgtgtttcggcgtgattataattttttcttgtcaagaaacagcacaattttcgacatagacattgaagcgtttcaactgaagccttggagacagcaaggagcggatcttactgactactttaattttagtctggatgaagaaggctggagaaagtattggtgtagcatgaagcaattaaggttaggggctagatcacttgtaaatgaaacatcaggattggagcaggaatcatacaaattgaaatctgcgaaagcaatgtccaacgtagcaaatgattctggatctgaaggaagaaatgacattggcaagccaaaaggtagagcaatccatgttgaaggcagtgcgtgcgaacgtgttccttcagcagacttgtggcgtccaatacaaagggattcagatgttgtgattcaagtaaacatgacactttcaccatcaaatcagtccacttcggatgacagctcaaagttaaatcacaagggtgtggctactgaaagggtgtttgataaggaagtttatgatggaggttcctcagagggtgttgggagcaaactggacagaagagattcttattttgcacgtgaccaatctcctagccctgattattctgatgtactttctggagaatcaaaagaaaatcactattttaagagatccaatagacattcagatttcagggacttctttgaagccaccaaacttcaggatgagcatgtcaaatctgatttttattgctatccaagtaagccagacagagaaaatagtgaaagctgcagacgtggttataccccttctactgatgatagaaacatggcatctaaacttctgtggatgggtgaagctcctttcactgggcgaggcaagtctggtgatctttttttgggtcacaacagcgaccgtgacttcaaatctcgacataaagcaagaaaaggacagaggagacagagtttagatgacagaaggaatgctatatttgttgaaaaagaaaaaccaacagatagctatcatagtacgtgtgataggaagttcgtgaagagaagatctagctcatcttccctgaggaccaactatcacaattccgtttgcaatcaatcttatgagcagcgttattcacctcttgaaaaaaaagctctgaaaaacgatgagcattactttagcgatgagtctaattaccaccataggcagtctttgtcatgtgacatcaatgaaggagatattgacaagtgcttctcttcagcgaaggagtggcaacgagatggtgaccatatataccattcaatggtaaaaactgatatgcctgatgctaatgatggacgcatgtacagagataggtatagtccggaaaagaaaatagccagacatgaccatagcatggatgttgaattttcccattacactgattacagattttgcgagtggcggagtctggaggtaagaggcagatacagagataaaggaaaatttgccaaaagcaatgatgggcatttcagacatgctaaccatctcgagttgtattctggcctcaacaattttgagagggacaaacctgctactggcttccctgttatgagctcaagaaacagatgcatcgataacaaagaagtctgcaatgctaagatgacacaaaataattgccatgggtatcatcaaaagaacaagcaacatgattcatcattttgtattggcaacattcctcgatatgctttgcgcactgatacttatgctgaaaagggccattttgttctgccaattaagaggaagctttattctgatctgggttccatggaccaaaggactcttgctgatttgccacttctgaaaggaagattgatgcatggccaatccattgccagtgacaggaggatttatgctttgaagctgcataagtcgacaaagaaaattaatacagaagccatttgtagttccagtgatatgagaaatattaatactctttcaaacatttgtgttggcagaagacatgagctggataatgctgataacatccacttgaatgatagaaaaataaagtttgagagggaaggtaatgagttaagacgtgtaattgaagataaccaaaagggaagccatcctgtggataaggatttgcacacttctagacataagcatgtacatcagaagctgtggaaacagaatctgagtcaccgtcactcaggcaatcaggatttggagaaatcagcagaccagaattgtctaaataaagatgtggagatcgaggaaggagaattgattgaagaggaccataataatatcatttataaaagcaagcttaagcaggaaaatgttgtactgaaatcagttattgaaacaagttcagcagagcagttacaggtgaataatgcaacgtcgaaggatgctacctgcaacaacagagctacaagagaatctgatgagaaacacattcttgaggtaatggaaaagatgcaaaaaaggagggaaaggttcaaagaggctattgcaccaaaaaaagaagtcggtgacaagaaagacctatcggctttagcatgcagtacagatttcatccagaatcaacggcctgctaggaaacggcggtggggtggtaattgttggatgctggaaatgccttgagagtttgtccgtgatggtttcttcaacaaggctgctaaatgtttctctgtgtttatgtattcaagtttatctcttcatactctgaatgccatcatctccagagttctttttattattatgcagcaattgtgtttttccccgattaagccagtcacatacaagttgcagtctgcagttagttgttgccttacccactctgtcaggctaatatatctgtctgagtcagagagaagaacggacatttgccctctcgtcagaaggcgaacacgcgagcagctccattgccaagagaatttggagaacgctgagacgacacgatcgtgcccactgcccacgagaggagttgccgcctgtcaaaggctggaagcggggacttgtggggaagatgggaagccgccttcaactcctgcagacagaataacagaaatatcgaacgacgtacacactccagctccgacaccgtcatccgtcaagtcgtcaactgacagtgcactcggcggtggttcgaacgccgaaccgacgtggcgcgctgacgacctccaaccgtgccctcatcccagcctcccgcttccgtccctgcaaggtccaagcccggtacggcaccgcatccgagagggcagacccgtcagtccaggcccctcgtccttcactcctccttcgcctctcaaaggcgcgcctcgctccaccattcccactggcgatttgcaacagacaagctccactagagctcggccggcatccatggcgatgcggctcctgtccccgtccacgccgcccccacgcttcccgagccccggccagaaggcacccgcctccatctccgcatcgtcttcctcgtacttctctgtccgcttgcgccgcgcgcgcgcggcggctgcagcggctgcaggcgcggccgcggcgggcgggtccgaccggcgcagcggacgcttcgagggggaggcgatgagcggggcattcgacaggggcctcgcggagatcgcgaggaaggtgccgctctttgagcccacagcggacggggagctcgccgctgcggctggcgagcggccgttgcctatcaatctcgagctctggctctaccgcgtcaaagtgcacaccagaaagttcgagttccctgaagcagaaaaacttctggacaagtgtatctcattctggcctgaagacggacgtccttatgtggcgctggggaagctgtatagcaagcagtcaaggtatgacaaagctagagcggtgtacgaaagggggtgccaagcaacgcaaggcgaaaacccatacatttggcagtgctgggcagtcctagaaagcaagggtggaaatattcgaagggcacgcgagctatttgatgccgctactgtggctgatgcaaagcatattgctgcttggcacgggtgggcaattttagaaataaagcaaggaaacataaaaaaggcacggaacctacttgggaaagccctgaaatattgtggaggaaatgagtatatttaccaaactcttgctttgcttgaagctaaagcagagcgctttgaacaggcacggactttgttcgagcaagccagtcaatccaatccaaaaagttgtgcaagctggctagcttgggctcaggtagaaatgcgtgcaggaaacaataccatggcaagaaagctctttgagaaagctgtccaggctagtcctaaaaaccgattttcatggcatggaccctgtaattctacagtcactcgcgctactggaatacaacttttcatctgcgaatgttgctcgtgtgttattcagaaaagcgtctcagattgatccaagacatcagccagtttggatagcttgggggtggatggaatggaaagaaagaaatgcaagaacagcaagagctctctatcaaagagctttgtcagtcaattcaacaaatgaatgtgctgctcgttgtcttcaggcttggggagtcctagaacagcgtgctggtaactacacggccgctagacgattgttgaggtcttcactgagtataaactcccaaagtgaggtgacatggatgacatgggcagcacttgaggaggaacagggggatccagttcgagctgaagaaattcggaacctttactttcagcagcgtactgaagttgtggatgatgcatcctgggtcataggcttcctcgacatcatcgaccctgccctagacagcgtgaagaggctactaaacctggatcagccttctagaccggcgaggcaagatgatgttaaaagcacaacagaaccgtgtcctcccactgccaagtcttcagaaacttctgcgggcaatgatgctcgtaacaacgggagcgaagcaatggggactctaacaagtgatttcgatttggatgctttcatcaagaagaggctggccctcgacccatcggagctggatgccgtgctcgagggctctgacccgaggggtgttgtttctcagaggaggaaacagcggctgcccaggaagccactccctcttctccctgtcccgtaaattttccagatcggtctgtctcatttccattccaccggtaaaatccataagggctagtttgtttgagactccatttttttccaagtgttaaaaataaaaatcccttgaaaaaaatgaggttatcaaactagccctaaatccctaactgtagcagcctgcaatacgtgaatatgtgtgaggactaaggagatgacgtcccctgccgctgccatagcaatcaccacacctgttaattgtcattccagccacgtgtatgtaattctgccaccatttgttagtaaagtctagctctgtacataaattagactctttttgtctacataatatcgccggactaagttatcgagaagtattttgacaatggtagtgccattacttcaacaccttagagcatccaagaaaatatgtaaaaggttcccaaaaccatttttgacggcgaaacaccatcttcattcactccaacagtacctctttccgtccccgcaaattttggcgacccgcaaaccagggctggcgttccgtagatatgcgcgaggaaaatactcccccgatcgcctgcgcgcgaatcatggagagttctcatgtcctgctttctttatggttcccgcgtcttccttttggttcccgcgtccttcctacttcgtgagtttctgcgaggcggtg

SEQ ID NO: 7339 - DNA, 5225 bp, Zea Mays
atgcccccacaagttctagggttttaggtccaaggtttttgtgcaaccttcgtccgcgcgccaccaatttcttagcaattagtacctcacacgtgctccctctgctgctgcgccgctctatggctgacccattggacgcggccgccgccttcggtgtatccaccaacgacaacaatgtcgacgacgtcgaggacctttacgcggacctcgacgagcaggtcgccgccgcgctcgctgccgcaggggagagtggcggctcaaacgcgagggattccgaccccctcaccgacggcgagggggagttcccggagcccgacgagaacgaggcggtggatttgggcgacgggaccgagggctacagcagcagcgatgatgagagcgatgatggccttcgcatcgtgctgaacgaggacaccagcgcgccactgccgccgccccctgtggggcgcggcgagggatgcgtggctgaggatgaggagggagatgatacgagcaaccgtgtgaaggtttcatctgttaacgatggcgggtgggcaacggttggtgggctccagtgcaaggggtttgttgagaaaacgacattacccatcatggggcaaatcgatcggcatgtgtttcggcgtgattataattttttcttgtcaagaaacagcacaattttcgacatagacattgaagcgtttcaactgaagccttggagacagcaaggagcggatcttactgactactttaattttagtctggatgaagaaggctggagaaagtattggtgtagcatgcttagtacaccactttttgtgcagaagcaattaaggttaggggctagatcacttgtaaatgaaacatcaggattggagcaggaatcatacaaattgaaatctgcgaaagcaatgtccaacgtagcaaatgattctggatctgaaggaagaaatgacattggcaagccaaaaggtagagcaatccatgttgaaggcagtgcgtgcgaacgtgttccttcagcagacttgtggcgtccaatacaaagggattcagatgttgtgattcaagtaaacatgacactttcaccatcaaatcagtccacttcggatgacagctcaaagttaaatcacaagggtgtggctactgaaagggtgtttgataaggaagtttatgatggaggttcctcagagggtgttgggagcaaactggacagaagagattcttattttgcacgtgaccaatctcctagccctgattattctgatgtactttctggagaatcaaaagaaaatcactattttaagagatccaatagacattcagatttcagggacttctttgaagccaccaaacttcaggatgagcatgtcaaatctgatttttattgctatccaagtaagccagacagagaaaatagtgaaagctgcagacgtggttataccccttctactgatgatagaaacatggcatctaaacttctgtggatgggtgaagctcctttcactgggcgaggcaagtctggtgatctttttttgggtcacaacagcgaccgtgacttcaaatctcgacataaagcaagaaaaggacagaggagacagagtttagatgacagaaggaatgctatatttgttgaaaaagaaaaaccaacagatagctatcatagtacgtgtgataggaagttcgtgaagagaagatctagctcatcttccctgaggaccaactatcacaattccgtttgcaatcaatcttatgagcagcgttattcacctcttgaaaaaaaagctctgaaaaacgatgagcattactttagcgatgagtctaattaccaccataggcagtctttgtcatgtgacatcaatgaaggagatattgacaagtgcttctcttcagcgaaggagtggcaacgagatggtgaccatatataccattcaatggtaaaaactgatatgcctgatgctaatgatggacgcatgtacagagataggtatagtccggaaaagaaaatagccagacatgaccatagcatggatgttgaattttcccattacactgattacagattttgcgagtggcggagtctggaggtaagaggcagatacagagataaaggaaaatttgccaaaagcaatgatgggcatttcagacatgctaaccatctcgagttgtattctggcctcaacaattttgagagggacaaacctgctactggcttccctgttatgagctcaagaaacagatgcatcgataacaaagaagtctgcaatgctaagatgacacaaaataattgccatgggtatcatcaaaagaacaagcaacatgattcatcattttgtattggcaacattcctcgatatgctttgcgcactgatacttatgctgaaaagggccattttgttctgccaattaagaggaagctttattctgatctgggttccatggaccaaaggactcttgctgatttgccacttctgaaaggaagattgatgcatggccaatccattgccagtgacaggaggatttatgctttgaagctgcataagtcgacaaagaaaattaatacagaagccatttgtagttccagtgatatgagaaatattaatactctttcaaacatttgtgttggcagaagacatgagctggataatgctgataacatccacttgaatgatagaaaaataaagtttgagagggaaggtaatgagttaagacgtgtaattgaagataaccaaaagggaagccatcctgtggataaggatttgcacacttctagacataagcatgtacatcagaagctgtggaaacagaatctgagtcaccgtcactcaggcaatcaggatttggagaaatcagcagaccagaattgtctaaataaagatgtggagatcgaggaaggagaattgattgaagaggaccataataatatcatttataaaagcaagcttaagcaggaaaatgttgtactgaaatcagttattgaaacaagttcagcagagcagttacaggtgaataatgcaacgtcgaaggatgctacctgcaacaacagagctacaagagaatctgatgagaaacacattcttgaggtaatggaaaagatgcaaaaaaggagggaaaggttcaaagaggctattgcaccaaaaaaagaagtcggtgacaagaaagacctatcggctttagcatgcagtacagatttcatccagaatcaacggcctgctaggaaacggcggtggggtggtaattgttggatgctggaaatgccttgagagtttgtccgtgatggtttcttcaacaagtgctgggcagtcctagaaagcaagggtggaaatattcgaagggcacgcgagctatttgatgccgctactgtggctgatgcaaagcatattgctgcttggcacgggtgggcaattttagaaataaagcaaggaaacataaaaaaggcacggaacctacttgggaaagccctgaaatattgtggaggaaatgagtatatttaccaaactcttgctttgcttgaagctaaagcagagcgctttgaacaggcacggactttgttcgagcaagccagtcaatccaatccaaaaagttgtgcaagctggctataggcttgggctcaggtagaaatgcgtgcaggaaacaataccatggcaagaaagctctttgagaaagctgtccaggctagtcctaaaaaccgattttcatggcatgtatgggcactatttgaggcaaatgaaggtaacattgacagggcaaggaagttgcttaagattggacatgctgtaaatcctagggaccctgtaattctacagtcactcgcgctactggaatacaacttttcatctgcgaatgttgctcgtgtgttattcagaaaagcgtctcagattgatccaagacatcagccagtttggatagcttgggggtggatggaatggaaagaaagaaatgcaagaacagcaagagctctctatcaaagagctttgtcagtcaattcaacaaatgaatgtgctgctcgttgtcttcaggcttggggagtcctagaacagcgtgctggtaactacacggccgctagacgattgttgaggtcttcactgagtataaactcccaaagtgaggtgacatggatgacatgggcagcacttgaggaggaacagggggatccagttcgagctgaagaaattcggaacctttactttcagcagcgtactgaagttgtggatgatgcatcctgggtcataggcttcctcgacatcatcgaccctgccctagacagcgtgaagaggctactaaacctggatcagccttctagaccggcgaggcaagatgatgttaaaagcacaacagaaccgtgtcctcccactgccaagtcttcagaaacttctgcgggcaatgatgctcgtaacaacgggagcgaagcaatggggactctaacaagtgatttcgatttggatgctttcatcaagaagaggctggccctcgacccatcggagctggatgccgtgctcgagggctctgacccgaggggtgttgtttctcagaggaggaaacagcggctgcccaggaagccactccctcttctccctgtcccgtaaattttccagatcggtctgtctcatttccattccaccggtaaaatccataagggctagtttgtttgagactccatttttttccaagtgttaaaaataaaaatcccttgaaaaaaatgaggttatcaaactagccctaaatccctaactgtagcagcctgcaatacgtgaatatgtgtgaggactaaggagatgacgtcccctgccgctgccatagcaatcaccacacctgttaattgtcattccagccacgtgtatgtaattctgccaccatttgttagtaaagtctagctctgtacataaattagactctttttgtctacataatatcgccggactaagttatcgagaagtattttgacaatggtagtgccattacttcaacaccttagagcatccaagaaaatatgtaaaaggttcccaaaaccatttttgacggcgaaacaccatcttcattcactccaacagtacctctttccgtccccgcaaattttggcgacccgcaaaccagggctggcgttccgtagatatgcgcgaggaaaatactcccccgatcgcctgcgcgcgaatcatggagagttctcatgtcctgctttctttatggttcccgcgtcttccttttggttcccgcgtccttcctacttcgtgagtttctgcgaggcggtg

SEQ ID NO: 7340 - DNA, 6346 bp, Zea Mays
ccaaaatatccgtatgaatgcggcccgtcacccttgagaagtttgagacaacgccgcacttcaggtcctatcggcaatctgggcacccactgccactagcctgaatgcccccacaagttctagggttttaggtccaaggtttttgtgcaaccttcgtccgcgcgccaccaatttcttagcaattagtacctcacacgtgctccctctgctgctgcgccgctctatggctgacccattggacgcggccgccgccttcggtgtatccaccaacgacaacaatgtcgacgacgtcgaggacctttacgcggacctcgacgagcaggtcgccgccgcgctcgctgccgcaggggagagtggcggctcaaacgcgagggattccgaccccctcaccgacggcgagggggagttcccggagcccgacgagaacgaggcggtggatttgggcgacgggaccgagggctacagcagcagcgatgatgagagcgatgatggccttcgcatcgtgctgaacgaggacaccagcgcgccactgccgccgccccctgtggggcgcggcgagggatgcgtggctgaggatgaggagggagatgatacgagcaaccgtgtgaaggtttcatctgttaacgatggcgggtgggcaacggttggtgggctccagtgcaaggggtttgttgagaaaacgacattacccatcatggggcaaatcgatcggcatgtgtttcggcgtgattataattttttcttgtcaagaaacagcacaattttcgacatagacattgaagcgtttcaactgaagccttggagacagcaaggagcggatcttactgactactttaattttagtctggatgaagaaggctggagaaagtattggtgtagcatgaagcaattaaggttaggggctagatcacttgtaaatgaaacatcaggattggagcaggaatcatacaaattgaaatctgcgaaagcaatgtccaacgtagcaaatgattctggatctgaaggaagaaatgacattggcaagccaaaaggtagagcaatccatgttgaaggcagtgcgtgcgaacgtgttccttcagcagacttgtggcgtccaatacaaagggattcagatgttgtgattcaagtaaacatgacactttcaccatcaaatcagtccacttcggatgacagctcaaagttaaatcacaagggtgtggctactgaaagggtgtttgataaggaagtttatgatggaggttcctcagagggtgttgggagcaaactggacagaagagattcttattttgcacgtgaccaatctcctagccctgattattctgatgtactttctggagaatcaaaagaaaatcactattttaagagatccaatagacattcagatttcagggacttctttgaagccaccaaacttcaggatgagcatgtcaaatctgatttttattgctatccaagtaagccagacagagaaaatagtgaaagctgcagacgtggttataccccttctactgatgatagaaacatggcatctaaacttctgtggatgggtgaagctcctttcactgggcgaggcaagtctggtgatctttttttgggtcacaacagcgaccgtgacttcaaatctcgacataaagcaagaaaaggacagaggagacagagtttagatgacagaaggaatgctatatttgttgaaaaagaaaaaccaacagatagctatcatagtacgtgtgataggaagttcgtgaagagaagatctagctcatcttccctgaggaccaactatcacaattccgtttgcaatcaatcttatgagcagcgttattcacctcttgaaaaaaaagctctgaaaaacgatgagcattactttagcgatgagtctaattaccaccataggcagtctttgtcatgtgacatcaatgaaggagatattgacaagtgcttctcttcagcgaaggagtggcaacgagatggtgaccatatataccattcaatggtaaaaactgatatgcctgatgctaatgatggacgcatgtacagagataggtatagtccggaaaagaaaatagccagacatgaccatagcatggatgttgaattttcccattacactgattacagattttgcgagtggcggagtctggaggtaagaggcagatacagagataaaggaaaatttgccaaaagcaatgatgggcatttcagacatgctaaccatctcgagttgtattctggcctcaacaattttgagagggacaaacctgctactggcttccctgttatgagctcaagaaacagatgcatcgataacaaagaagtctgcaatgctaagatgacacaaaataattgccatgggtatcatcaaaagaacaagcaacatgattcatcattttgtattggcaacattcctcgatatgctttgcgcactgatacttatgctgaaaagggccattttgttctgccaattaagaggaagctttattctgatctgggttccatggaccaaaggactcttgctgatttgccacttctgaaaggaagattgatgcatggccaatccattgccagtgacaggaggatttatgctttgaagctgcataagtcgacaaagaaaattaatacagaagccatttgtagttccagtgatatgagaaatattaatactctttcaaacatttgtgttggcagaagacatgagctggataatgctgataacatccacttgaatgatagaaaaataaagtttgagagggaaggtaatgagttaagacgtgtaattgaagataaccaaaagggaagccatcctgtggataaggatttgcacacttctagacataagcatgtacatcagaagctgtggaaacagaatctgagtcaccgtcactcaggcaatcaggatttggagaaatcagcagaccagaattgtctaaataaagatgtggagatcgaggaaggagaattgattgaagaggaccataataatatcatttataaaagcaagcttaagcaggaaaatgttgtactgaaatcagttattgaaacaagttcagcagagcagttacaggtgaataatgcaacgtcgaaggatgctacctgcaacaacagagctacaagagaatctgatgagaaacacattcttgaggctgctaaatgtttctctgtgtttatgtattcaagtttatctcttcatactctgaatgccatcatctccagagttctttttattattatgcagcaattgtgtttttccccgattaagccagtcacatacaagttgcagtctgcagttagttgttgccttacccactctgtcaggctaatatatctgtctgagtcagagagaagaacggacatttgccctctcgtcagaaggcgaacacgcgagcagctccattgccaagagaatttggagaacgctgagacgacacgatcgtgcccactgcccacgagaggagttgccgcctgtcaaaggctggaagcggggacttgtggggaagatgggaagccgccttcaactcctgcagacagaataacagaaatatcgaacgacgtacacactccagctccgacaccgtcatccgtcaagtcgtcaactgacagtgcactcggcggtggttcgaacgccgaaccgacgtggcgcgctgacgacctccaaccgtgccctcatcccagcctcccgcttccgtccctgcaaggtccaagcccggtacggcaccgcatccgagagggcagacccgtcagtccaggcccctcgtccttcactcctccttcgcctctcaaaggcgcgcctcgctccaccattcccactggcgatttgcaacagacaagctccactagagctcggccggcatccatggcgatgcggctcctgtccccgtccacgccgcccccacgcttcccgagccccggccagaaggcacccgcctccatctccgcatcgtcttcctcgtacttctctgtccgcttgcgccgcgcgcgcgcggcggctgcagcggctgcaggcgcggccgcggcgggcgggtccgaccggcgcagcggacgcttcgagggggaggcgatgagcggggcattcgacaggggcctcgcggagatcgcgaggaaggtgccgctctttgagcccacagcggacggggagctcgccgctgcggctggcgagcggccgttgcctatcaatctcgagctctggctctaccgcgtcaaagtgcacaccagaaagttcgagttccctgaagcagaaaaacttctggacaagtgtatctcattctggcctgaagacggacgtccttatgtggcgctggggaagctgtatagcaagcagtcaaggtatgacaaagctagagcggtgtacgaaagggggtgccaagcaacgcaaggcgaaaacccatacatttggcagtgctgggcagtcctagaaagcaagggtggaaatattcgaagggcacgcgagctatttgatgccgctactgtggctgatgcaaagcatattgctgcttggcacgggtgggcaattttagaaataaagcaaggaaacataaaaaaggcacggaacctacttgggaaagccctgaaatattgtggaggaaatgagtatatttaccaaactcttgctttgcttgaagctaaagcagagcgctttgaacaggcacggactttgttcgagcaagccagtcaatccaatccaaaaagttgtgcaagctggctagcttgggctcaggtagaaatgcgtgcaggaaacaataccatggcaagaaagctctttgagaaagctgtccaggctagtcctaaaaaccgattttcatggcatgtatgggcactatttgaggcaaatgaaggtaacattgacagggcaaggaagttgcttaagattggacatgctgtaaatcctagggaccctgtaattctacagtcactcgcgctactggaatacaacttttcatctgcgaatgttgctcgtgtgttattcagaaaagcgtctcagattgatccaagacatcagccagtttggatagcttgggggtggatggaatggaaagaaagaaatgcaagaacagcaagagctctctatcaaagagctttgtcagtcaattcaacaaatgaatgtgctgctcgttgtcttcaggcttggggagtcctagaacagcgtgctggtaactacacggccgctagacgattgttgaggtcttcactgagtataaactcccaaagtgaggtgacatggatgacatgggcagcacttgaggaggaacagggggatccagttcgagctgaagaaattcggaacctttactttcagcagcgtactgaagttgtggatgatgcatcctgggtcataggcttcctcgacatcatcgaccctgccctagacagcgtgaagaggctactaaacctggatcagccttctagaccggcgaggcaagatgatgttaaaagcacaacagaaccgtgtcctcccactgccaagtcttcagaaacttctgcgggcaatgatgctcgtaacaacgggagcgaagcaatggggactctaacaagtgatttcgatttggatgctttcatcaagaagaggctggccctcgacccatcggagctggatgccgtgctcgagggctctgacccgaggggtgttgtttctcagaggaggaaacagcggctgcccaggaagccactccctcttctccctgtcccgtaaattttccagatcggtctgtctcatttccattccaccggtaaaatccataagggctagtttgtttgagactccatttttttccaagtgttaaaaataaaaatcccttgaaaaaaatgaggttatcaaactagccctaaatccctaactgtagcagcctgcaatacgtgaatatgtgtgaggactaaggagatgacgtcccctgccgctgccatagcaatcaccacacctgttaattgtcattccagccacgtgtatgtaattctgccaccatttgttagtaaagtctagctctgtacataaattagactctttttgtctacataatatcgccggactaagttatcgagaagtattttgacaatggtagtgccattacttcaacaccttagagcatccaagaaaatatgtaaaaggttcccaaaaccatttttgacggcgaaacaccatcttcattcactccaacagtacctctttccgtccccgcaaattttggcgacccgcaaaccagggctggcgttccgtagatatgcgcgaggaaaatactcccccgatcgcctgcgcgcgaatcatggagagttctcatgtcctgctttctttatggttcccgcgtcttccttttggttcccgcgtccttcctacttcgtgagtttctgcgaggcggtg

SEQ ID NO: 7341 - DNA, 2817 bp, Zea Mays
atggggcaaatcgatcggcatgtgtttcggcgtgattataattttttcttgtcaagaaacagcacaattttcgacatagacattgaagcgtttcaactgaagccttggagacagcaaggagcggatcttactgactactttaattttagtctggatgaagaaggctggagaaagtattggtgtagcatgcttagtacaccactttttgtgcagaagcaattaaggttaggggctagatcacttgtaaatgaaacatcaggattggagcaggaatcatacaaattgaaatctgcgaaagcaatgtccaacgtagcaaatgattctggatctgaaggaagaaatgacattggcaagccaaaaggtagagcaatccatgttgaaggcagtgcgtgcgaacgtgttccttcagcagacttgtggcgtccaatacaaagggattcagatgttgtgattcaagtaaacatgacactttcaccatcaaatcagtccacttcggatgacagctcaaagttaaatcacaagggtgtggctactgaaagggtgtttgataaggaagtttatgatggaggttcctcagagggtgttgggagcaaactggacagaagagattcttattttgcacgtgaccaatctcctagccctgattattctgatgtactttctggagaatcaaaagaaaatcactattttaagagatccaatagacattcagatttcagggacttctttgaagccaccaaacttcaggatgagcatgtcaaatctgatttttattgctatccaagtaagccagacagagaaaatagtgaaagctgcagacgtggttataccccttctactgatgatagaaacatggcatctaaacttctgtggatgggtgaagctcctttcactgggcgaggcaagtctggtgatctttttttgggtcacaacagcgaccgtgacttcaaatctcgacataaagcaagaaaaggacagaggagacagagtttagatgacagaaggaatgctatatttgttgaaaaagaaaaaccaacagatagctatcatagtacgtgtgataggaagttcgtgaagagaagatctagctcatcttccctgaggaccaactatcacaattccgtttgcaatcaatcttatgagcagcgttattcacctcttgaaaaaaaagctctgaaaaacgatgagcattactttagcgatgagtctaattaccaccataggcagtctttgtcatgtgacatcaatgaaggagatattgacaagtgcttctcttcagcgaaggagtggcaacgagatggtgaccatatataccattcaatggtaaaaactgatatgcctgatgctaatgatggacgcatgtacagagataggtatagtccggaaaagaaaatagccagacatgaccatagcatggatgttgaattttcccattacactgattacagattttgcgagtggcggagtctggaggtaagaggcagatacagagataaaggaaaatttgccaaaagcaatgatgggcatttcagacatgctaaccatctcgagttgtattctggcctcaacaattttgagagggacaaacctgctactggcttccctgttatgagctcaagaaacagatgcatcgataacaaagaagtctgcaatgctaagatgacacaaaataattgccatgggtatcatcaaaagaacaagcaacatgattcatcattttgtattggcaacattcctcgatatgctttgcgcactgatacttatgctgaaaagggccattttgttctgccaattaagaggaagctttattctgatctgggttccatggaccaaaggactcttgctgatttgccacttctgaaaggaagattgatgcatggccaatccattgccagtgacaggaggatttatgctttgaagctgcataagtcgacaaagaaaattaatacagaagccatttgtagttccagtgatatgagaaatattaatactctttcaaacatttgtgttggcagaagacatgagctggataatgctgataacatccacttgaatgatagaaaaataaagtttgagagggaaggtaatgagttaagacgtgtaattgaagataaccaaaagggaagccatcctgtggataaggatttgcacacttctagacataagcatgtacatcagaagctgtggaaacagaatctgagtcaccgtcactcaggcaatcaggatttggagaaatcagcagaccagaattgtctaaataaagatgtggagatcgaggaaggagaattgattgaagaggaccataataatatcatttataaaagcaagcttaagcaggaaaatgttgtactgaaatcagttattgaaacaagttcagcagagcagttacaggtgaataatgcaacgtcgaaggatgctacctgcaacaacagagctacaagagaatctgatgagaaacacattcttgaggtaatggaaaagatgcaaaaaaggagggaaaggttcaaagaggctattgcaccaaaaaaagaagtcggtgacaagaaagacctatcggctttagcatgcagtacagatttcatccagaatcaacggcctgctaggaaacggcggtggggtggtaattgttggatgctggaaatgccttgagagtttgtccgtgatggtttcttcaacaaggctgctaaatgtttctctgtgtttatgtattcaagtttatctcttcatactctgaatgccatcatctccagagttctttttattattatgcagcaattgtgtttttccccgattaagttgcgtgtttgcagtatggtt

SEQ ID NO: 7342 - DNA, 2594 bp, Zea Mays
gttgggctcgtcctctcattcctcctcaccaaattcggtgattcctcgagcagctgctgggtgttgtccatcgcaacatcaatagcttgttgggcacctgccggcgtgcttggtgctcttgtggagattgtacaggatctcgggtagactgcacagcgccaactttcttcaccacggacatttttttagtaccagcacagacaccttgctgcctccacaatcaacgaattgagagtgcaggaggacatcagctccagcacgtgcagggcagcacaggtgacggtgccttcatgcttcgtgggaagaggcattggggcaacgaatggaggagcaggcgaggaggtgcacacatggcagaggtggccccggaggttccaagagaaggtggcgggggcttgtaaaatgtggcacaatgagcatgaggtgctttgcccttcgatttgatatggacgaccaagattgtgagactgctacagttgcagtctctagctactgcaccagatccagggatcaaatgtgcggtgatagagaagaatgtggagttcactaggcacccacgagcgcacttcatcaacaaccgcacaatggagatcttccgcaagttggatggcttggccagggacattgagaggtcccagccaccagtagatttgtggaggaagttcgtatactgtacttcactctccggttctgtccttggatcggttgatcacatgaaacaggaagattttgacaaggtcattagtcctgtatccgttgcacatttctcacagtacaagttagttgatttgctactcaagaagcttgaaggtattggtttccagacatgctttcccagtgagattggtaactcaacacaagatttggtactggaaagcaagatattgatgggacacaagtgcacatcccttgatcagactgatgagggcattctggttggagcatcagttaacaatggagggatgataatagagagaaagctacactgtggtcttcttatagggacagatggcgcaagaagtacagtgcgtgaattggcaggtatatctatggaaggtgaaagggatttgcagaaactggtcagtgtgcattttcttagcagagatctaggcaggtatttgtccagtcagaggccagggatgctgttcttcatttttaatccaggtgcaattggtgtactagttgcacatgacctagagaatggggaatttgtattgcaggttccattttatcctcctcagcagatgtttgaagattttagtgctaagttgcagagaagtacatctgctgcaataatcgagtaatcctctctggtgatgccgcacaccggtttcctcctgctggtggttttggaatgaacaccggtgtccaggatgtacataatttggcttggaaattgggcttactgctgaatggtgtcgcctcaccatcaatattacaaacttatgagtcagagcgccggcctgttgcaattttcaataccgaacttagcgtggagaatttcaaggcagctatgtctattcctacaacccttggccttgatccaactgttgcaaactcagtgcatcaagttataaatagaagcctcggatcaatcattccaagaaatgtgcagaaggcagttctagaaggattgttttctcttggtagggcacaagtctcagactatatcctgaatgagaaaaatcccattgggtcgttgagactagcaagattgagaagtattctcgatgaaggcaaaagtcttcagctgcagttccctgcagaggatcttggcttccactatgcagaaggtgctctagttgttgaagctagttgtgagaagactcatgaaggagaaaaactacagcattctaagagggcatcaagagagtacatcccatctgctaaggttggttcgcggcttccccacatgctagtaagagaagtgcctgcttcgagtgagggcgcgttctcaacactggacctagtgagtggggataaactcgagtttgttctcatcattgcaccagtgaaagagtcatatgagattgcccgtgccaccctcaagatagcagatgagcttacgctatcagccagagtatgtgtaatgtggccacgaggttcgactgatgctgaagtggaagagagcagatccgagttgacaccctggacaaactacatcgatgtcgaggaagtgcctagggtgtcgggtggttcatggtgggagatgtgtcgtattagtaggaagagtgtccttttggttaggcctgatgagcacatagcatggctaacagaactggacagggtgagggatgctgagtcagaaattaggagggtcttctctcatgttctgtgcctaaatagccaccgggtgtaagaatttataaatttccttccatttaggctttgtttagatactttggtattcactttaatccacatgtatggaagcggattaggttataaattaaattaatttacatcctaatccacctcactccaaaccgcacaagaggacgttaacagaagatcttcgcacaagaggactttttttagtttcatcgtgttatttaggtactcgataaaatcaaatttggattgaattccttgac

SEQ ID NO: 7343 - DNA, 3047 bp, Zea Mays
cggagcgacgcgccacatctgcccgtactcatcgtcggagctggccctgttgggctcgtcctctcattcctcctcaccaaattcgcactatagccctgatttgaacaaacagatctactcaatgttaccaatccatcaagagcactcgggtttgagtaacactttcaaacatcaaaacccatccggccaccatatgtaacccaaaagttccaagcttcatcggaactgctaaatgtcataccaatttgtggaattcaaaaaggaattgcagcaactatgcggttgtaaataatgcattcagaacacgaccaactggatgttctcatcatttaaagtagaacttcaaccatgcagaaacgaataactaagtaggagtagagcacaaaccttgcaggtgattcctcgagcagctgctgggtgttgtccatcgcaacatcaatagcttgttgggcacctgccggcgtgcttggtgctcttgtggagattgtacaggatctcgggtagactgcacagcgccaactttcttcaccacggacatttttttagtaccagcacagacaccttgctgcctccacaatcaacgaattgagagtgcaggaggacatcagctccagcacgtgcagggcagcacaggtgacggtgccttcatgcttcgtgggaagaggcattggggcaacgaatggaggagcaggcgaggaggtgcacacatggcagaggtggccccggaggttccaaggtgatgcagctctccagcctccctccactccgagcaaagcgaaaagtggtgccaaagcttgtgtttttttgcctccaaaggagcagagaaggtggcgggggcttgtaaaatgtggcacaatgagcatgaggtgctttgcccttcgatttgatatggacgaccaagattgtgagactgctacagttgcagtctctagctactgcaccagatccagggatcaaatgtgcggtgatagagaagaatgtggagttcactaggcacccacgagcgcacttcatcaacaaccgcacaatggagatcttccgcaagttggatggcttggccagggacattgagaggtcccagccaccagtagatttgtggaggaagttcgtatactgtacttcactctccggttctgtccttggatcggttgatcacatgaaacaggaagattttgacaaggtcattagtcctgtatccgttgcacatttctcacagtacaagttagttgatttgctactcaagaagcttgaaggtattggtttccagacatgctttcccagtgagattggtaactcaacacaagatttggtactggaaagcaagatattgatgggacacaagtgcacatcccttgatcagactgatgagggcattctggttggagcatcagttaacaatggagggatgataatagagagaaagctacactgtggtcttcttatagggacagatggcgcaagaagtacagtgcgtgaattggcaggtatatctatggaaggtgaaagggatttgcagaaactggtcagtgtgcattttcttagcagagatctaggcaggtatttgtccagtcagaggccagggatgctgttcttcatttttaatccaggtgcaattggtgtactagttgcacatgacctagagaatggggaatttgtattgcaggttccattttatcctcctcagcagatgtttgaagattttagtgctaagttgcagagaagtacatctgctgcaataatcgagtaatcctctctggtgatgccgcacaccggtttcctcctgctggtggttttggaatgaacaccggtgtccaggatgtacataatttggcttggaaattgggcttactgctgaatggtgtcgcctcaccatcaatattacaaacttatgagtcagagcgccggcctgttagaatcttctcacacgctttctgttcatccaatcgtggagaatttcaaggcagctatgtctattcctacaacccttggccttgatccaactgttgcaaactcagtgcatcaagttataaatagaagcctcggatcaatcattccaagaaatgtgcagaaggcagttctagaaggattgttttctcttggtagggcacaagtctcagactatatcctgaatgagaaaaatcccattgggtcgttgagactagcaagattgagaagtattctcgatgaaggcaaaagtcttcagctgcagttccctgcagaggatcttggcttccactatgcagaaggtgctctagttgttgaagctagttgtgagaagactcatgaaggagaaaaactacagcattctaagagggcatcaagagagtacatcccatctgctaaggttggttcgcggcttccccacatgctagtaagagaagtgcctgcttcgagtgagggcgcgttctcaacactggacctagtgagtggggataaactcgagtttgttctcatcattgcaccagtgaaagagtcatatgagattgcccgtgccaccctcaagatagcagatgagcttacgctatcagccagagtatgtgtaatgtggccacgaggttcgactgatgctgaagtggaagagagcagatccgagttgacaccctggacaaactacatcgatgtcgaggaagtgcctagggtgtcgggtggttcatggtgggagatgtgtcgtattagtaggaagagtgtccttttggttaggcctgatgagcacatagcatggctaacagaactggacagggtgagggatgctgagtcagaaattaggagggtcttctctcatgttctgtgcctaaatagccaccgggtgtaagaatttataaatttccttccatttaggctttgtttagatactttggtattcactttaatccacatgtatggaagcggattaggttataaattaaattaatttacatcctaatccacctcactccaaaccgcacaagaggacgttaacagaagatcttcgcacaagaggactttttttagtttcatcgtgttatttaggtactcgataaaatcaaatttggattgaattccttgac

SEQ ID NO: 7344 - DNA, 3325 bp, Zea Mays
gttgcgttctgacgctgcgtgagcgcgacatgcggggagggcgagccccacaaggttgcagcctattccaccaccgacgctgaaggccatacgcccccaatcgaatcgatcacatctatgccgtcgatcaccagaggtgggcgtggggggctcttctccacgcaccggggcgcgctcttgtggctccgccgttgccaaagcccactcttgtcgacactagccggcggcggaggccggagcgacgcgccacatctgcccgtactcatcgtcggagctggccctgttgggctcgtcctctcattcctcctcaccaaattcggtgattcctcgagcagctgctgggtgttgtccatcgcaacatcaatagcttgttgggcacctgccggcgtgcttggtgctcttgtggagattgtacaggatctcgggtagactgcacagcgccaactttcttcaccacggacatttttttagtaccagcacagacaccttgctgcctccacaatcaacgaattgagagtgcaggaggacatcagctccagcacgtgcagggcagcacaggtgacggtgccttcatgcttcgtgggaagaggcattggggcaacgaatggaggagcaggcgaggaggtgcacacatggcagaggtggccccggaggttccaaggagcagagaaggtggcgggggcttgtaaaatgtggcacaatgagcatgaggtgctttgcccttcgatttgatatggacgaccaagattgtgagactgctacagttgcagtctctagctactgcaccagatccagggatcaaatgtgcggtgatagagaagaatgtggagttcactaggcacccacgagcgcacttcatcaacaaccgcacaatggaggtgtgtatgtttactaatgcactctaactttgccattttgactagtgcatgttgtttgggtggtgctttcacggatggctggcgtttttagatcttccgcaagttggatggcttggccagggacattgagaggtcccagccaccagtagatttgtggaggaagttcgtatactgtacttcactctccggttctgtccttggatcggttgatcacatgaaacaggaagattttgacaaggtcattagtcctgtatccgttgcacatttctcacagtacaagttagttgatttgctactcaagaagcttgaaggtattggtttccagacatgctttcccagtgagattggtaactcaacacaagatttggtactggaaagcaagatattgatgggacacaagtgcacatcccttgatcagactgatgagggcattctggttggagcatcagttaacaatggagggatgataatagagagaaagctacactgtggtcttcttatagggacagatggcgcaagaagtacagtgcgtgaattggcaggtatatctatggaaggtgaaagggatttgcagaaactggtcagtgtgcattttcttagcagagatctaggcaggtatttgtccagtcagaggccagggatgctgttcttcatttttaatccaggtgcaattggtgtactagttgcacatgacctagagaatggggaatttgtattgcaggttccattttatcctcctcagcagatgtttgaagattttagtgctaaggtatgcgagcaaattattttcaaattagtcggatgggagccagcagatgttcatgttttagacataaaaccatgggcaatgcatgctgaagttgcagagaagtacatctgctgcaataatcgagtaatcctctctggtgatgccgcacaccggtttcctcctgctggtggttttggaatgaacaccggtgtccaggatgtacataatttggcttggaaattgggcttactgctgaatggtgtcgcctcaccatcaatattacaaacttatgagtcagagcgccggcctgttagaatcttctcacacgctttctgttcatccaatgtatatttctccactattaaattacaaaattagcttagtgtgatacaattgcttgcttattgcaggttgcaattttcaataccgaacttagcgtggagaatttcaaggcagctatgtctattcctacaacccttggccttgatccaactgttgcaaactcagtgcatcaagttataaatagaagcctcggatcaatcattccaagaaatgtgcagaaggcagttctagaaggattgttttctcttggtagggcacaagtctcagactatatcctgaatgagaaaaatcccattgggtcgttgagactagcaagattgagaagtattctcgatgaaggcaaaagtcttcagctgcagttccctgcagaggatcttggcttccagtaagaccctttacaaccagaatgttcctcaaaaacaaccttttctttatttctttcagcttagttgatgggacatgagcagacttcattaatctgaccatcttatcagaatggtgaaaattatgcaaatttttcttgtctctttcacttcttccttcagctatgcagaaggtgctctagttgttgaagctagttgtgagaagactcatgaaggagaaaaactacagcattctaagagggcatcaagagagtacatcccatctgctaaggttggttcgcggcttccccacatgctagtaagagaagtgcctgcttcgagtgagggcgcgttctcaacactggacctagtgagtggggataaactcgagtttgttctcatcattgcaccagtgaaagagtcatatgagattgcccgtgccaccctcaagatagcagatgagcttacgctatcagccagagtatgtgtaatgtggccacgaggttcgactgatgctgaagtggaagagagcagatccgagttgacaccctggacaaactacatcgatgtcgaggaagtgcctagggtgtcgggtggttcatggtgggagatgtgtcgtattagtaggaagagtgtccttttggttaggcctgatgagcacatagcatggctaacagaactggacagggtgagggatgctgagtcagaaattaggagggtcttctctcatgttctgtgcctaaatagccaccgggtgtaagaatttataaatttccttccatttaggctttgtttagatactttggtattcactttaatccacatgtatggaagcggattaggttataaattaaattaatttacatcctaatccacctcactccaaaccgcacaagaggacgttaacagaagatcttcgcacaagaggactttttttagtttcatcgtgttatttaggtactcgataaaatcaaatttggattgaattccttgac

SEQ ID NO: 7345 - DNA, 3620 bp, Zea Mays
gttgcgttctgacgctgcgtgagcgcgacatgcggggagggcgagccccacaaggttgcagcctattccaccaccgacgctgaaggccatacgcccccaatcgaatcgatcacatctatgccgtcgatcaccagaggtgggcgtggggggctcttctccacgcaccggggcgcgctcttgtggctccgccgttgccaaagcccactcttgtcgacactagccggcggcggaggccggagcgacgcgccacatctgcccgtactcatcgtcggagctggccctgttgggctcgtcctctcattcctcctcaccaaattcgcactatagccctgatttgaacaaacagatctactcaatgttaccaatccatcaagagcactcgggtttgagtaacactttcaaacatcaaaacccatccggccaccatatgtaacccaaaagttccaagcttcatcggaactgctaaatgtcataccaatttgtggaattcaaaaaggaattgcagcaactatgcggttgtaaataatgcattcagaacacgaccaactggatgttctcatcatttaaagtagaacttcaaccatgcagaaacgaataactaagtaggagtagagcacaaaccttgcaggtgattcctcgagcagctgctgggtgttgtccatcgcaacatcaatagcttgttgggcacctgccggcgtgcttggtgctcttgtggagattgtacaggatctcgggtagactgcacagcgccaactttcttcaccacggacatttttttagtaccagcacagacaccttgctgcctccacaatcaacgaattgagagtgcaggaggacatcagctccagcacgtgcagggcagcacaggtgacggtgccttcatgcttcgtgggaagaggcattggggcaacgaatggaggagcaggcgaggaggtgcacacatggcagaggtggccccggaggttccaagagaaggtggcgggggcttgtaaaatgtggcacaatgagcatgaggtgctttgcccttcgatttgatatggacgaccaagattgtgagactgctacagttgcagtctctagctactgcaccagatccagggatcaaatgtgcggtgatagagaagaatgtggagttcactaggcacccacgagcgcacttcatcaacaaccgcacaatggagatcttccgcaagttggatggcttggccagggacattgagaggtcccagccaccagtagatttgtggaggaagttcgtatactgtacttcactctccggttctgtccttggatcggttgatcacatgaaacaggaaggccaattttgacaaggtcattagtcctgtatccgttgcacatttctcacagtacaagttagttgatttgctactcaagaagcttgaaggtattggtttccagacatgctttcccagtgagattggtaactcaacacaagatttggtactggaaagcaagatattgatgggacacaagtgcacatcccttgatcagactgatgagggcattctggttggagcatcagttaacaatggagggatgataatagagagaaagctacactgtggtcttcttatagggacagatggcgcaagaagtacagtgcgtgaattggcaggtatatctatggaaggtgaaagggatttgcagaaactggtcagtgtgcattttcttagcagagatctaggcaggtatttgtccagtcagaggccagggatgctgttcttcatttttaatccaggtgcaattggtgtactagttgcacatgacctagagaatggggaatttgtattgcaggttccattttatcctcctcagcagatgtttgaagattttagtgctaaggtatgcgagcaaattattttcaaattagtcggatgggagccagcagatgttcatgttttagacataaaaccatgggcaatgcatgctgaagttgcagagaagtacatctgctgcaataatcgagtaatcctctctggtgatgccgcacaccggtttcctcctgctggtggttttggttagtggtttgttaattttctttactatgggtacgaagtccaaaaatcagaaacatgcatattctgatttctttgcaggaatgaacaccggtgtccaggatgtacataatttggcttggaaattgggcttactgctgaatggtgtcgcctcaccatcaatattacaaacttatgagtcagagcgccggcctgttagaatcttctcacacgctttctgttcatccaatgtatatttctccactattaaattacaaaattagcttagtgtgatacaattgcttgcttattgcaggttgcaattttcaataccgaacttagcgtggagaatttcaaggcagctatgtctattcctacaacccttggccttgatccaactgttgcaaactcagtgcatcaagttataaatagaagcctcggatcaatcattccaagaaatgtgcagaaggcagttctagaaggattgttttctcttggtagggcacaagtctcagactatatcctgaatgagaaaaatcccattgggtcgttgagactagcaagattgagaagtattctcgatgaaggcaaaagtcttcagctgcagttccctgcagaggatcttggcttccagtaagaccctttacaaccagaatgttcctcaaaaacaaccttttctttatttctttcagcttagttgatgggacatgagcagacttcattaatctgaccatcttatcagaatggtgaaaattatgcaaatttttcttgtctctttcacttcttccttcagctatgcagaaggtgctctagttgttgaagctagttgtgagaagactcatgaaggagaaaaactacagcattctaagagggcatcaagagagtacatcccatctgctaaggttggttcgcggcttccccacatgctagtaagagaagtgcctgcttcgagtgagggcgcgttctcaacactggacctagtgagtggggataaactcgagtttgttctcatcattgcaccagtgaaagagtcatatgagattgcccgtgccaccctcaagatagcagatgagcttacgctatcagccagagtatgtgtaatgtggccacgaggttcgactgatgctgaagtggaagagagcagatccgagttgacaccctggacaaactacatcgatgtcgaggaagtgcctagggtgtcgggtggttcatggtgggagatgtgtcgtattagtaggaagagtgtccttttggttaggcctgatgagcacatagcatggctaacagaactggacagggtgagggatgctgagtcagaaattaggagggtcttctctcatgttctgtgcctaaatagccaccgggtgtaagaatttataaatttccttccatttaggctttgtttagatactttggtattcactttaatccacatgtatggaagcggattaggttataaattaaattaatttacatcctaatccacctcactccaaaccgcacaagaggacgttaacagaagatcttcgcacaagaggactttttttagtttcatcgtgttatttaggtactcgataaaatcaaatttggattgaattccttgac

SEQ ID NO: 7346 - DNA, 3509 bp, Zea Mays
cgtccctgcaagctctaagacttccgaagaattgaaactggggttcttgggggcgcgacatgtggttgcgttctgacgctgcgtgagcgcgacatgcggggagggcgagccccacaaggttgcagcctattccaccaccgacgctgaaggccatacgcccccaatcgaatcgatcacatctatgccgtcgatcaccagaggtgggcgtggggggctcttctccacgcaccggggcgcgctcttgtggctccgccgttgccaaagcccactcttgtcgacactagccggcggcggaggccggagcgacgcgccacatctgcccgtactcatcgtcggagctggccctgttgggctcgtcctctcattcctcctcaccaaattcgcactatagccctgatttgaacaaacagatctactcaatgttaccaatccatcaagagcactcgggtttgagtaacactttcaaacatcaaaacccatccggccaccatatgtaacccaaaagttccaagcttcatcggaactgctaaatgtcataccaatttgtggaattcaaaaaggaattgcagcaactatgcggttgtaaataatgcattcagaacacgaccaactggatgttctcatcatttaaagtagaacttcaaccatgcagaaacgaataactaagtaggagtagagcacaaaccttgcaggtgattcctcgagcagctgctgggtgttgtccatcgcaacatcaatagcttgttgggcacctgccggcgtgcttggtgctcttgtggagattgtacaggatctcgggtagactgcacagcgccaactttcttcaccacggacatttttttagtaccagcacagacaccttgctgcctccacaatcaacgaattgagagtgcaggaggacatcagctccagcacgtgcagggcagcacaggtgacggtgccttcatgcttcgtgggaagaggcattggggcaacgaatggaggagcaggcgaggaggtgcacacatggcagaggtggccccggaggttccaaggtgatgcagctctccagcctccctccactccgagcaaagcgaaaagtggtgccaaagcttgtgtttttttgcctccaaaggagcagagaaggtggcgggggcttgtaaaatgtggcacaatgagcatgaggtgctttgcccttcgatttgatatggacgaccaagattgtgagactgctacagttgcagtctctagctactgcaccagatccagggatcaaatgtgcggtgatagagaagaatgtggagttcactaggcacccacgagcgcacttcatcaacaaccgcacaatggaggtgtgtatgtttactaatgcactctaactttgccattttgactagtgcatgttgtttgggtggtgctttcacggatggctggcgtttttagatcttccgcaagttggatggcttggccagggacattgagaggtcccagccaccagtagatttgtggaggaagttcgtatactgtacttcactctccggttctgtccttggatcggttgatcacatgaaacaggaagattttgacaaggtcattagtcctgtatccgttgcacatttctcacagtacaagttagttgatttgctactcaagaagcttgaaggtattggtttccagacatgctttcccagtgagattggtaactcaacacaagatttggtactggaaagcaagatattgatgggacacaagtgcacatcccttgatcagactgatgagggcattctggttggagcatcagttaacaatggagggatgataatagagagaaagctacactgtggtcttcttatagggacagatggcgcaagaagtacagtgcgtgaattggcaggtatatctatggaaggtgaaagggatttgcagaaactggtcagtgtgcattttcttagcagagatctaggcaggtatttgtccagtcagaggccagggatgctgttcttcatttttaatccaggtgcaattggtgtactagttgcacatgacctagagaatggggaatttgtattgcaggttccattttatcctcctcagcagatgtttgaagattttagtgctaaggtatgcgagcaaattattttcaaattagtcggatgggagccagcagatgttcatgttttagacataaaaccatgggcaatgcatgctgaagttgcagagaagtacatctgctgcaataatcgagtaatcctctctggtgatgccgcacaccggtttcctcctgctggtggttttggaatgaacaccggtgtccaggatgtacataatttggcttggaaattgggcttactgctgaatggtgtcgcctcaccatcaatattacaaacttatgagtcagagcgccggcctgttgcaattttcaataccgaacttagcgtggagaatttcaaggcagctatgtctattcctacaacccttggccttgatccaactgttgcaaactcagtgcatcaagttataaatagaagcctcggatcaatcattccaagaaatgtgcagaaggcagttctagaaggattgttttctcttggtagggcacaagtctcagactatatcctgaatgagaaaaatcccattgggtcgttgagactagcaagattgagaagtattctcgatgaaggcaaaagtcttcagctgcagttccctgcagaggatcttggcttccaaaggtgctctagttgttgaagctagttgtgagaagactcatgaaggagaaaaactacagcattctaagagggcatcaagagagtacatcccatctgctaaggttggttcgcggcttccccacatgctagtaagagaagtgcctgcttcgagtgagggcgcgttctcaacactggacctagtgagtggggataaactcgagtttgttctcatcattgcaccagtgaaagagtcatatgagattgcccgtgccaccctcaagatagcagatgagcttacgctatcagccagagtatgtgtaatgtggccacgaggttcgactgatgctgaagtggaagagagcagatccgagttgacaccctggacaaactacatcgatgtcgaggaagtgcctagggtgtcgggtggttcatggtgggagatgtgtcgtattagtaggaagagtgtccttttggttaggcctgatgagcacatagcatggctaacagaactggacagggtgagggatgctgagtcagaaattaggagggtcttctctcatgttctgtgcctaaatagccaccgggtgtaagaatttataaatttccttccatttaggctttgtttagatactttggtattcactttaatccacatgtatggaagcggattaggttataaattaaattaatttacatcctaatccacctcactccaaaccgcacaagaggacgttaacagaagatcttcgcacaagaggactttttttagtttcatcgtgttatttaggtactcgataaaatcaaatttggattgaattccttgac

SEQ ID NO: 7347 - DNA, 2563 bp, Zea Mays
cccgtccctgcaagctctaagacttccgaagaattgaaactggggttcttgggggcgcgacatgtggttgcgttctgacgctgcgtgagcgcgacatgcggggagggcgagccccacaaggttgcagcctattccaccaccgacgctgaaggccatacgcccccaatcgaatcgatcacatctatgccgtcgatcaccagaggtgggcgtggggggctcttctccacgcaccggggcgcgctcttgtggctccgccgttgccaaagcccactcttgtcgacactagccggcggcggaggccggagcgacgcgccacatctgcccgtactcatcgtcggagctggccctgttgggctcgtcctctcattcctcctcaccaaattcgggatcaaatgtgcggtgatagagaagaatgtggagttcactaggcacccacgagcgcacttcatcaacaaccgcacaatggagatcttccgcaagttggatggcttggccagggacattgagaggtcccagccaccagtagatttgtggaggaagttcgtatactgtacttcactctccggttctgtccttggatcggttgatcacatgaaacaggaagattttgacaaggtcattagtcctgtatccgttgcacatttctcacagtacaagttagttgatttgctactcaagaagcttgaaggtattggtttccagacatgctttcccagtgagattggtaactcaacacaagatttggtactggaaagcaagatattgatgggacacaagtgcacatcccttgatcagactgatgagggcattctggttggagcatcagttaacaatggagggatgataatagagagaaagctacactgtggtcttcttatagggacagatggcgcaagaagtacagtgcgtgaattggcaggtatatctatggaaggtgaaagggatttgcagaaactggtcagtgtgcattttcttagcagagatctaggcaggtatttgtccagtcagaggccagggatgctgttcttcatttttaatccaggtgcaattggtgtactagttgcacatgacctagagaatggggaatttgtattgcaggttccattttatcctcctcagcagatgtttgaagattttagtgctaaggtatgcgagcaaattattttcaaattagtcggatgggagccagcagatgttcatgttttagacataaaaccatgggcaatgcatgctgaagttgcagagaagtacatctgctgcaataatcgagtaatcctctctggtgatgccgcacaccggtttcctcctgctggtggttttggaatgaacaccggtgtccaggatgtacataatttggcttggaaattgggcttactgctgaatggtgtcgcctcaccatcaatattacaaacttatgagtcagagcgccggcctgttgcaattttcaataccgaacttagcgtggagaatttcaaggcagctatgtctattcctacaacccttggccttgatccaactgttgcaaactcagtgcatcaagttataaatagaagcctcggatcaatcattccaagaaatgtgcagaaggcagttctagaaggattgttttctcttggtagggcacaagtctcagactatatcctgaatgagaaaaatcccattgggtcgttgagactagcaagattgagaagtattctcgatgaaggcaaaagtcttcagctgcagttccctgcagaggatcttggcttccactatgcagaaggtgctctagttgttgaagctagttgtgagaagactcatgaaggagaaaaactacagcattctaagagggcatcaagagagtacatcccatctgctaaggttggttcgcggcttccccacatgctagtaagagaagtgcctgcttcgagtgagggcgcgttctcaacactggacctagtgagtggggataaactcgagtttgttctcatcattgcaccagtgaaagagtcatatgagattgcccgtgccaccctcaagatagcagatgagcttacgctatcagccagagtatgtgtaatgtggccacgaggttcgactgatgctgaagtggaagagagcagatccgagttgacaccctggacaaactacatcgatgtcgaggaagtgcctagggtgtcgggtggttcatggtgggagatgtgtcgtattagtaggaagagtgtccttttggttaggcctgatgagcacatagcatggctaacagaactggacagggtgagggatgctgagtcagaaattaggagggtcttctctcatgttctgtgcctaaatagccaccgggtgtaagaatttataaatttccttccatttaggctttgtttagatactttggtattcactttaatccacatgtatggaagcggattaggttataaattaaattaatttacatcctaatccacctcactccaaaccgcacaagaggacgttaacagaagatcttcgcacaagaggactttttttagtttcatcgtgttatttaggtactcgataaaatcaaatttggattgaattccttgac

SEQ ID NO: 7348 - DNA, 3350 bp, Zea Mays
gtcccgtccctgcaagctctaagacttccgaagaattgaaactggggttcttgggggcgcgacatgtggttgcgttctgacgctgcgtgagcgcgacatgcggggagggcgagccccacaaggttgcagcctattccaccaccgacgctgaaggccatacgcccccaatcgaatcgatcacatctatgccgtcgatcaccagaggtgggcgtggggggctcttctccacgcaccggggcgcgctcttgtggctccgccgttgccaaagcccactcttgtcgacactagccggcggcggaggccggagcgacgcgccacatctgcccgtactcatcgtcggagctggccctgttgggctcgtcctctcattcctcctcaccaaattcgcactatagccctgatttgaacaaacagatctactcaatgttaccaatccatcaagagcactcgggtttgagtaacactttcaaacatcaaaacccatccggccaccatatgtaacccaaaagttccaagcttcatcggaactgctaaatgtcataccaatttgtggaattcaaaaaggaattgcagcaactatgcggttgtaaataatgcattcagaacacgaccaactggatgttctcatcatttaaagtagaacttcaaccatgcagaaacgaataactaagtaggagtagagcacaaaccttgcaggtgattcctcgagcagctgctgggtgttgtccatcgcaacatcaatagcttgttgggcacctgccggcgtgcttggtgctcttgtggagattgtacaggatctcgggtagactgcacagcgccaactttcttcaccacggacatttttttagtaccagcacagacaccttgctgcctccacaatcaacgaattgagagtgcaggaggacatcagctccagcacgtgcagggcagcacaggtgacggtgccttcatgcttcgtgggaagaggcattggggcaacgaatggaggagcaggcgaggaggtgcacacatggcagaggtggccccggaggttccaaggagcagagaaggtggcgggggcttgtaaaatgtggcacaatgagcatgaggtgctttgcccttcgatttgatatggacgaccaagattgtgagactgctacagttgcagtctctagctactgcaccagatccagggatcaaatgtgcggtgatagagaagaatgtggagttcactaggcacccacgagcgcacttcatcaacaaccgcacaatggagatcttccgcaagttggatggcttggccagggacattgagaggtcccagccaccagtagatttgtggaggaagttcgtatactgtacttcactctccggttctgtccttggatcggttgatcacatgaaacaggaagattttgacaaggtcattagtcctgtatccgttgcacatttctcacagtacaagttagttgatttgctactcaagaagcttgaaggtattggtttccagacatgctttcccagtgagattggtaactcaacacaagatttggtactggaaagcaagatattgatgggacacaagtgcacatcccttgatcagactgatgagggcattctggttggagcatcagttaacaatggagggatgataatagagagaaagctacactgtggtcttcttatagggacagatggcgcaagaagtacagtgcgtgaattggcaggtatatctatggaaggtgaaagggatttgcagaaactggtcagtgtgcattttcttagcagagatctaggcaggtatttgtccagtcagaggccagggatgctgttcttcatttttaatccaggtgcaattggtgtactagttgcacatgacctagagaatggggaatttgtattgcaggttccattttatcctcctcagcagatgtttgaagattttagtgctaaggtatgcgagcaaattattttcaaattagtcggatgggagccagcagatgttcatgttttagacataaaaccatgggcaatgcatgctgaagttgcagagaagtacatctgctgcaataatcgagtaatcctctctggtgatgccgcacaccggtttcctcctgctggtggttttggaatgaacaccggtgtccaggatgtacataatttggcttggaaattgggcttactgctgaatggtgtcgcctcaccatcaatattacaaacttatgagtcagagcgccggcctgttgcaattttcaataccgaacttagcgtggagaatttcaaggcagctatgtctattcctacaacccttggccttgatccaactgttgcaaactcagtgcatcaagttataaatagaagcctcggatcaatcattccaagaaatgtgcagaaggcagttctagaaggattgttttctcttggtagggcacaagtctcagactatatcctgaatgagaaaaatcccattgggtcgttgagactagcaagattgagaagtattctcgatgaaggcaaaagtcttcagctgcagttccctgcagaggatcttggcttccactatgcagaaggtgctctagttgttgaagctagttgtgagaagactcatgaaggagaaaaactacagcattctaagagggcatcaagagagtacatcccatctgctaaggttggttcgcggcttccccacatgctagtaagagaagtgcctgcttcgagtgagggcgcgttctcaacactggacctagtgagtggggataaactcgagtttgttctcatcattgcaccagtgaaagagtcatatgagattgcccgtgccaccctcaagatagcagatgagcttacgctatcagccagagtatgtgtaatgtggccacgaggttcgactgatgctgaagtggaagagagcagatccgagttgacaccctggacaaactacatcgatgtcgaggaagtgcctagggtgtcgggtggttcatggtgggagatgtgtcgtattagtaggaagagtgtccttttggttaggcctgatgagcacatagcatggctaacagaactggacagggtgagggatgctgagtcagaaattaggagggtcttctctcatgttctgtgcctaaatagccaccgggtgtaagaatttataaatttccttccatttaggctttgtttagatactttggtattcactttaatccacatgtatggaagcggattaggttataaattaaattaatttacatcctaatccacctcactccaaaccgcacaagaggacgttaacagaagatcttcgcacaagaggactttttttagtttcatcgtgttatttaggtactcgataaaatcaaatttggattgaattccttgac

SEQ ID NO: 7349 - DNA, 2248 bp, Zea Mays
cgcctttgcgcattgccgttccgttgcagcctattccaccaccgacgctgaaggccatacgcccccaatcgaatcgatcacatctatgccgtcgatcaccagaggtgggcgtggggggctcttctccacgcaccggggcgcgctcttgtggctccgccgttgccaaagcccactcttgtcgacactagccggcggcggaggccggagcgacgcgccacatctgcccgtactcatcgtcggagctggccctgttgggctcgtcctctcattcctcctcaccaaattcgggatcaaatgtgcggtgatagagaagaatgtggagttcactaggcacccacgagcgcacttcatcaacaaccgcacaatggagattttgacaaggtcattagtcctgtatccgttgcacatttctcacagtacaagttagttgatttgctactcaagaagcttgaaggtattggtttccagacatgctttcccagtgagattggtaactcaacacaagatttggtactggaaagcaagatattgatgggacacaagtgcacatcccttgatcagactgatgagggcattctggttggagcatcagttaacaatggagggatgataatagagagaaagctacactgtggtcttcttatagggacagatggcgcaagaagtacagtgcgtgaattggcaggtatatctatggaaggtgaaagggatttgcagaaactggtcagtgtgcattttcttagcagagatctaggcaggtatttgtccagtcagaggccagggatgctgttcttcatttttaatccaggtgcaattggtgtactagttgcacatgacctagagaatggggaatttgtattgcaggttccattttatcctcctcagcagatgtttgaagattttagtgctaagttgcagagaagtacatctgctgcaataatcgagtaatcctctctggtgatgccgcacaccggtttcctcctgctggtggttttggaatgaacaccggtgtccaggatgtacataatttggcttggaaattgggcttactgctgaatggtgtcgcctcaccatcaatattacaaacttatgagtcagagcgccggcctgttagaatcttctcacacgctttctgttcatccaatcgtggagaatttcaaggcagctatgtctattcctacaacccttggccttgatccaactgttgcaaactcagtgcatcaagttataaatagaagcctcggatcaatcattccaagaaatgtgcagaaggcagttctagaaggattgttttctcttggtagggcacaagtctcagactatatcctgaatgagaaaaatcccattgggtcgttgagactagcaagattgagaagtattctcgatgaaggcaaaagtcttcagctgcagttccctgcagaggatcttggcttccactatgcagaaggtgctctagttgttgaagctagttgtgagaagactcatgaaggagaaaaactacagcattctaagagggcatcaagagagtacatcccatctgctaaggttggttcgcggcttccccacatgctagtaagagaagtgcctgcttcgagtgagggcgcgttctcaacactggacctagtgagtggggataaactcgagtttgttctcatcattgcaccagtgaaagagtcatatgagattgcccgtgccaccctcaagatagcagatgagcttacgctatcagccagagtatgtgtaatgtggccacgaggttcgactgatgctgaagtggaagagagcagatccgagttgacaccctggacaaactacatcgatgtcgaggaagtgcctagggtgtcgggtggttcatggtgggagatgtgtcgtattagtaggaagagtgtccttttggttaggcctgatgagcacatagcatggctaacagaactggacagggtgagggatgctgagtcagaaattaggagggtcttctctcatgttctgtgcctaaatagccaccgggtgtaagaatttataaatttccttccatttaggctttgtttagatactttggtattcactttaatccacatgtatggaagcggattaggttataaattaaattaatttacatcctaatccacctcactccaaaccgcacaagaggacgttaacagaagatcttcgcacaagaggactttttttagtttcatcgtgttatttaggtactcgataaaatcaaatttggattgaattccttgac

SEQ ID NO: 7350 - DNA, 3127 bp, Zea Mays
ctcctcctcccctgctgcacagagtgggccggggccacggttgcaggttgcagcctattccaccaccgacgctgaaggccatacgcccccaatcgaatcgatcacatctatgccgtcgatcaccagaggtgggcgtggggggctcttctccacgcaccggggcgcgctcttgtggctccgccgttgccaaagcccactcttgtcgacactagccggcggcggaggccggagcgacgcgccacatctgcccgtactcatcgtcggagctggccctgttgggctcgtcctctcattcctcctcaccaaattcgcactatagccctgatttgaacaaacagatctactcaatgttaccaatccatcaagagcactcgggtttgagtaacactttcaaacatcaaaacccatccggccaccatatgtaacccaaaagttccaagcttcatcggaactgctaaatgtcataccaatttgtggaattcaaaaaggaattgcagcaactatgcggttgtaaataatgcattcagaacacgaccaactggatgttctcatcatttaaagtagaacttcaaccatgcagaaacgaataactaagtaggagtagagcacaaaccttgcaggtgattcctcgagcagctgctgggtgttgtccatcgcaacatcaatagcttgttgggcacctgccggcgtgcttggtgctcttgtggagattgtacaggatctcgggtagactgcacagcgccaactttcttcaccacggacatttttttagtaccagcacagacaccttgctgcctccacaatcaacgaattgagagtgcaggaggacatcagctccagcacgtgcagggcagcacaggtgacggtgccttcatgcttcgtgggaagaggcattggggcaacgaatggaggagcaggcgaggaggtgcacacatggcagaggtggccccggaggttccaaggtgatgcagctctccagcctccctccactccgagcaaagcgaaaagtggtgccaaagcttgtgtttttttgcctccaaaggagcagagaaggtggcgggggcttgtaaaatgtggcacaatgagcatgaggtgctttgcccttcgatttgatatggacgaccaagattgtgagactgctacagttgcagtctctagctactgcaccagatccagggatcaaatgtgcggtgatagagaagaatgtggagttcactaggcacccacgagcgcacttcatcaacaaccgcacaatggagattttgacaaggtcattagtcctgtatccgttgcacatttctcacagtacaagttagttgatttgctactcaagaagcttgaaggtattggtttccagacatgctttcccagtgagattggtaactcaacacaagatttggtactggaaagcaagatattgatgggacacaagtgcacatcccttgatcagactgatgagggcattctggttggagcatcagttaacaatggagggatgataatagagagaaagctacactgtggtcttcttatagggacagatggcgcaagaagtacagtgcgtgaattggcaggtatatctatggaaggtgaaagggatttgcagaaactggtcagtgtgcattttcttagcagagatctaggcaggtatttgtccagtcagaggccagggatgctgttcttcatttttaatccaggtgcaattggtgtactagttgcacatgacctagagaatggggaatttgtattgcaggttccattttatcctcctcagcagatgtttgaagattttagtgctaagttgcagagaagtacatctgctgcaataatcgagtaatcctctctggtgatgccgcacaccggtttcctcctgctggtggttttggaatgaacaccggtgtccaggatgtacataatttggcttggaaattgggcttactgctgaatggtgtcgcctcaccatcaatattacaaacttatgagtcagagcgccggcctgttgcaattttcaataccgaacttagcgtggagaatttcaaggcagctatgtctattcctacaacccttggccttgatccaactgttgcaaactcagtgcatcaagttataaatagaagcctcggatcaatcattccaagaaatgtgcagaaggcagttctagaaggattgttttctcttggtagggcacaagtctcagactatatcctgaatgagaaaaatcccattgggtcgttgagactagcaagattgagaagtattctcgatgaaggcaaaagtcttcagctgcagttccctgcagaggatcttggcttccactatgcagaaggtgctctagttgttgaagctagttgtgagaagactcatgaaggagaaaaactacagcattctaagagggcatcaagagagtacatcccatctgctaaggttggttcgcggcttccccacatgctagtaagagaagtgcctgcttcgagtgagggcgcgttctcaacactggacctagtgagtggggataaactcgagtttgttctcatcattgcaccagtgaaagagtcatatgagattgcccgtgccaccctcaagatagcagatgagcttacgctatcagccagagtatgtgtaatgtggccacgaggttcgactgatgctgaagtggaagagagcagatccgagttgacaccctggacaaactacatcgatgtcgaggaagtgcctagggtgtcgggtggttcatggtgggagatgtgtcgtattagtaggaagagtgtccttttggttaggcctgatgagcacatagcatggctaacagaactggacagggtgagggatgctgagtcagaaattaggagggtcttctctcatgttctgtgcctaaatagccaccgggtgtaagaatttataaatttccttccatttaggctttgtttagatactttggtattcactttaatccacatgtatggaagcggattaggttataaattaaattaatttacatcctaatccacctcactccaaaccgcacaagaggacgttaacagaagatcttcgcacaagaggactttttttagtttcatcgtgttatttaggtactcgataaaatcaaatttggattgaattccttgac

SEQ ID NO: 7351 - DNA, 2401 bp, Zea Mays
cttgcatcaggttgcagcctattccaccaccgacgctgaaggccatacgcccccaatcgaatcgatcacatctatgccgtcgatcaccagaggtgggcgtggggggctcttctccacgcaccggggcgcgctcttgtggctccgccgttgccaaagcccactcttgtcgacactagccggcggcggaggccggagcgacgcgccacatctgcccgtactcatcgtcggagctggccctgttgggctcgtcctctcattcctcctcaccaaattcgggatcaaatgtgcggtgatagagaagaatgtggagttcactaggcacccacgagcgcacttcatcaacaaccgcacaatggagatcttccgcaagttggatggcttggccagggacattgagaggtcccagccaccagtagatttgtggaggaagttcgtatactgtacttcactctccggttctgtccttggatcggttgatcacatgaaacaggaagattttgacaaggtcattagtcctgtatccgttgcacatttctcacagtacaagttagttgatttgctactcaagaagcttgaaggtattggtttccagacatgctttcccagtgagattggtaactcaacacaagatttggtactggaaagcaagatattgatgggacacaagtgcacatcccttgatcagactgatgagggcattctggttggagcatcagttaacaatggagggatgataatagagagaaagctacactgtggtcttcttatagggacagatggcgcaagaagtacagtgcgtgaattggcaggtatatctatggaaggtgaaagggatttgcagaaactggtcagtgtgcattttcttagcagagatctaggcaggtatttgtccagtcagaggccagggatgctgttcttcatttttaatccaggtgcaattggtgtactagttgcacatgacctagagaatggggaatttgtattgcaggttccattttatcctcctcagcagatgtttgaagattttagtgctaaggtatgcgagcaaattattttcaaattagtcggatgggagccagcagatgttcatgttttagacataaaaccatgggcaatgcatgctgaagttgcagagaagtacatctgctgcaataatcgagaatgaacaccggtgtccaggatgtacataatttggcttggaaattgggcttactgctgaatggtgtcgcctcaccatcaatattacaaacttatgagtcagagcgccggcctgttgcaattttcaataccgaacttagcgtggagaatttcaaggcagctatgtctattcctacaacccttggccttgatccaactgttgcaaactcagtgcatcaagttataaatagaagcctcggatcaatcattccaagaaatgtgcagaaggcagttctagaaggattgttttctcttggtagggcacaagtctcagactatatcctgaatgagaaaaatcccattgggtcgttgagactagcaagattgagaagtattctcgatgaaggcaaaagtcttcagctgcagttccctgcagaggatcttggcttccactatgcagaaggtgctctagttgttgaagctagttgtgagaagactcatgaaggagaaaaactacagcattctaagagggcatcaagagagtacatcccatctgctaaggttggttcgcggcttccccacatgctagtaagagaagtgcctgcttcgagtgagggcgcgttctcaacactggacctagtgagtggggataaactcgagtttgttctcatcattgcaccagtgaaagagtcatatgagattgcccgtgccaccctcaagatagcagatgagcttacgctatcagccagagtatgtgtaatgtggccacgaggttcgactgatgctgaagtggaagagagcagatccgagttgacaccctggacaaactacatcgatgtcgaggaagtgcctagggtgtcgggtggttcatggtgggagatgtgtcgtattagtaggaagagtgtccttttggttaggcctgatgagcacatagcatggctaacagaactggacagggtgagggatgctgagtcagaaattaggagggtcttctctcatgttctgtgcctaaatagccaccgggtgtaagaatttataaatttccttccatttaggctttgtttagatactttggtattcactttaatccacatgtatggaagcggattaggttataaattaaattaatttacatcctaatccacctcactccaaaccgcacaagaggacgttaacagaagatcttcgcacaagaggactttttttagtttcatcgtgttatttaggtactcgataaaatcaaatttggattgaattccttgac

SEQ ID NO: 7352 - DNA, 3385 bp, Zea Mays
cgctcacttgcatcaggttgcagcctattccaccaccgacgctgaaggccatacgcccccaatcgaatcgatcacatctatgccgtcgatcaccagaggtgggcgtggggggctcttctccacgcaccggggcgcgctcttgtggctccgccgttgccaaagcccactcttgtcgacactagccggcggcggaggccggagcgacgcgccacatctgcccgtactcatcgtcggagctggccctgttgggctcgtcctctcattcctcctcaccaaattcgcactatagccctgatttgaacaaacagatctactcaatgttaccaatccatcaagagcactcgggtttgagtaacactttcaaacatcaaaacccatccggccaccatatgtaacccaaaagttccaagcttcatcggaactgctaaatgtcataccaatttgtggaattcaaaaaggaattgcagcaactatgcggttgtaaataatgcattcagaacacgaccaactggatgttctcatcatttaaagtagaacttcaaccatgcagaaacgaataactaagtaggagtagagcacaaaccttgcaggtgattcctcgagcagctgctgggtgttgtccatcgcaacatcaatagcttgttgggcacctgccggcgtgcttggtgctcttgtggagattgtacaggatctcgggtagactgcacagcgccaactttcttcaccacggacatttttttagtaccagcacagacaccttgctgcctccacaatcaacgaattgagagtgcaggaggacatcagctccagcacgtgcagggcagcacaggtgacggtgccttcatgcttcgtgggaagaggcattggggcaacgaatggaggagcaggcgaggaggtgcacacatggcagaggtggccccggaggttccaaggtgatgcagctctccagcctccctccactccgagcaaagcgaaaagtggtgccaaagcttgtgtttttttgcctccaaaggagcagagaaggtggcgggggcttgtaaaatgtggcacaatgagcatgaggtgctttgcccttcgatttgatatggacgaccaagattgtgagactgctacagttgcagtctctagctactgcaccagatccagggatcaaatgtgcggtgatagagaagaatgtggagttcactaggcacccacgagcgcacttcatcaacaaccgcacaatggagatcttccgcaagttggatggcttggccagggacattgagaggtcccagccaccagtagatttgtggaggaagttcgtatactgtacttcactctccggttctgtccttggatcggttgatcacatgaaacaggaaggccagttcagttcttatcatgtcgagtgctttatgtcttgcacttcactgtattttgacaaggtcattagtcctgtatccgttgcacatttctcacagtacaagttagttgatttgctactcaagaagcttgaaggtattggtttccagacatgctttcccagtgagattggtaactcaacacaagatttggtactggaaagcaagatattgatgggacacaagtgcacatcccttgatcagactgatgagggcattctggttggagcatcagttaacaatggagggatgataatagagagaaagctacactgtggtcttcttatagggacagatggcgcaagaagtacagtgcgtgaattggcaggtatatctatggaaggtgaaagggatttgcagaaactggtcagtgtgcattttcttagcagagatctaggcaggtatttgtccagtcagaggccagggatgctgttcttcatttttaatccaggtgcaattggtgtactagttgcacatgacctagagaatggggaatttgtattgcaggttccattttatcctcctcagcagatgtttgaagattttagtgctaaggtatgcgagcaaattattttcaaattagtcggatgggagccagcagatgttcatgttttagacataaaaccatgggcaatgcatgctgaagttgcagagaagtacatctgctgcaataatcgagtaatcctctctggtgatgccgcacaccggtttcctcctgctggtggttttggaatgaacaccggtgtccaggatgtacataatttggcttggaaattgggcttactgctgaatggtgtcgcctcaccatcaatattacaaacttatgagtcagagcgccggcctgttagaatcttctcacacgctttctgttcatccaatcgtggagaatttcaaggcagctatgtctattcctacaacccttggccttgatccaactgttgcaaactcagtgcatcaagttataaatagaagcctcggatcaatcattccaagaaatgtgcagaaggcagttctagaaggattgttttctcttggtagggcacaagtctcagactatatcctgaatgagaaaaatcccattgggtcgttgagactagcaagattgagaagtattctcgatgaaggcaaaagtcttcagctgcagttccctgcagaggatcttggcttccactatgcagaaggtgctctagttgttgaagctagttgtgagaagactcatgaaggagaaaaactacagcattctaagagggcatcaagagagtacatcccatctgctaaggttggttcgcggcttccccacatgctagtaagagaagtgcctgcttcgagtgagggcgcgttctcaacactggacctagtgagtggggataaactcgagtttgttctcatcattgcaccagtgaaagagtcatatgagattgcccgtgccaccctcaagatagcagatgagcttacgctatcagccagagtatgtgtaatgtggccacgaggttcgactgatgctgaagtggaagagagcagatccgagttgacaccctggacaaactacatcgatgtcgaggaagtgcctagggtgtcgggtggttcatggtgggagatgtgtcgtattagtaggaagagtgtccttttggttaggcctgatgagcacatagcatggctaacagaactggacagggtgagggatgctgagtcagaaattaggagggtcttctctcatgttctgtgcctaaatagccaccgggtgtaagaatttataaatttccttccatttaggctttgtttagatactttggtattcactttaatccacatgtatggaagcggattaggttataaattaaattaatttacatcctaatccacctcactccaaaccgcacaagaggacgttaacagaagatcttcgcacaagaggactttttttagtttcatcgtgttatttaggtactcgataaaatcaaatttggattgaattccttgac

SEQ ID NO: 7353 - DNA, 2670 bp, Zea Mays
cgctcgctcacttgcatcaggttgcagcctattccaccaccgacgctgaaggccatacgcccccaatcgaatcgatcacatctatgccgtcgatcaccagaggtgggcgtggggggctcttctccacgcaccggggcgcgctcttgtggctccgccgttgccaaagcccactcttgtcgacactagccggcggcggaggccggagcgacgcgccacatctgcccgtactcatcgtcggagctggccctgttgggctcgtcctctcattcctcctcaccaaattcgggatcaaatgtgcggtgatagagaagaatgtggagttcactaggcacccacgagcgcacttcatcaacaaccgcacaatggaggtgtgtatgtttactaatgcactctaactttgccattttgactagtgcatgttgtttgggtggtgctttcacggatggctggcgtttttagatcttccgcaagttggatggcttggccagggacattgagaggtcccagccaccagtagatttgtggaggaagttcgtatactgtacttcactctccggttctgtccttggatcggttgatcacatgaaacaggaaggccagttcagttcttatcatgtcgagtgctttatgtcttgcacttcactgtgtatgtcttctgacaagtatttttgacagattttgacaaggtcattagtcctgtatccgttgcacatttctcacagtacaagttagttgatttgctactcaagaagcttgaaggtattggtttccagacatgctttcccagtgagattggtaactcaacacaagatttggtactggaaagcaagatattgatgggacacaagtgcacatcccttgatcagactgatgagggcattctggttggagcatcagttaacaatggagggatgataatagagagaaagctacactgtggtcttcttatagggacagatggcgcaagaagtacagtgcgtgaattggcaggtatatctatggaaggtgaaagggatttgcagaaactggtcagtgtgcattttcttagcagagatctaggcaggtatttgtccagtcagaggccagggatgctgttcttcatttttaatccaggtgcaattggtgtactagttgcacatgacctagagaatggggaatttgtattgcaggttccattttatcctcctcagcagatgtttgaagattttagtgctaaggtatgcgagcaaattattttcaaattagtcggatgggagccagcagatgttcatgttttagacataaaaccatgggcaatgcatgctgaagttgcagagaagtacatctgctgcaataatcgagtaatcctctctggtgatgccgcacaccggtttcctcctgctggtggttttggaatgaacaccggtgtccaggatgtacataatttggcttggaaattgggcttactgctgaatggtgtcgcctcaccatcaatattacaaacttatgagtcagagcgccggcctgttagaatcttctcacacgctttctgttcatccaatgttgcaattttcaataccgaacttagcgtggagaatttcaaggcagctatgtctattcctacaacccttggccttgatccaactgttgcaaactcagtgcatcaagttataaatagaagcctcggatcaatcattccaagaaatgtgcagaaggcagttctagaaggattgttttctcttggtagggcacaagtctcagactatatcctgaatgagaaaaatcccattgggtcgttgagactagcaagattgagaagtattctcgatgaaggcaaaagtcttcagctgcagttccctgcagaggatcttggcttccactatgcagaaggtgctctagttgttgaagctagttgtgagaagactcatgaaggagaaaaactacagcattctaagagggcatcaagagagtacatcccatctgctaaggttggttcgcggcttccccacatgctagtaagagaagtgcctgcttcgagtgagggcgcgttctcaacactggacctagtgagtggggataaactcgagtttgttctcatcattgcaccagtgaaagagtcatatgagattgcccgtgccaccctcaagatagcagatgagcttacgctatcagccagagtatgtgtaatgtggccacgaggttcgactgatgctgaagtggaagagagcagatccgagttgacaccctggacaaactacatcgatgtcgaggaagtgcctagggtgtcgggtggttcatggtgggagatgtgtcgtattagtaggaagagtgtccttttggttaggcctgatgagcacatagcatggctaacagaactggacagggtgagggatgctgagtcagaaattaggagggtcttctctcatgttctgtgcctaaatagccaccgggtgtaagaatttataaatttccttccatttaggctttgtttagatactttggtattcactttaatccacatgtatggaagcggattaggttataaattaaattaatttacatcctaatccacctcactccaaaccgcacaagaggacgttaacagaagatcttcgcacaagaggactttttttagtttcatcgtgttatttaggtactcgataaaatcaaatttggattgaattccttgac

SEQ ID NO: 7354 - DNA, 6651 bp, Zea Mays
gccgccgccctcttcctcctctactggttgcagcctattccaccaccgacgctgaaggccatacgcccccaatcgaatcgatcacatctatgccgtcgatcaccagaggtgggcgtggggggctcttctccacgcaccggggcgcgctcttgtggctccgccgttgccaaagcccactcttgtcgacactagccggcggcggaggccggagcgacgcgccacatctgcccgtactcatcgtcggagctggccctgttgggctcgtcctctcattcctcctcaccaaattcggtacggacctcgtgccccccttgctcatcgatgttccaattcgcgcttctgagttaggcagtagcgttgagcggagcaaagttcattgagggaatcagacaaatgtgctaaaacattaggacctggatcagatacagtagcaactgctactggaatctatgcagtagctgtatctgtttcattcaaaaggccatgaatggctaggatcaaagccatatgtttttttctctttccctccccaagtcttactgttagcagctgcttcttttaggagaaattacaaagaacagagaagacaatgcatacatctaataaagcaattaaatggaacaaagctacacgtgtttgctgcaatttgagagcctattacaaaagcttgcatatacaaaagacaaatgttaaactcagatccttttatatattaccaacgttctccatctcttatttcgtatacaaaagcttgcatccaccagcagcagccttccatccacaaagagcatatggttaacacaaaaaatagtgtgattactgtggatccttttgcacataaggccttccccatttcatatacaaaaacttgtatcaaccaatagaagctaggccttcggtatgaagcctgcaaacaaaataatttagagattataatttgtcaaggcaattcaacttatatcatctacctatacttacactgaagttttgctaaaattcctagccatctatcccttccaaggagagtaaggattactgatattttgaacaacgtttgaactctgaaaacagagagaaatacagtgaccaagataaaaagggcagcctggtgcatgtgcgcttgtgtggcctccagggaagggtttccctgcatgtgcaaaaggcactttccacgactcgaacccgcgatctcctggtcacaaggcatcatctttaaagattgagaaaataaaaaaggcagacccccacacgaatgaggtacggggaaaggataaactgaggcaagccttccccgtaaatgcggagaggctgcttcaaacacttggtgactcagcgagatagctctcaccactggaagggataaagattgagaaaatagggaagaaaataccaagttactctgaaaacacagaatgctaattatatgaaaaaagagaagtgtaagcataccataagaatttcggtaaaactagaatttgattcatatgcttgctattctggaacatgacttccatcttcttgttgcataggtttgcttgtgaattattgttccttttgttttttccttttcttacaattttttcactctaagatttctttctttttgatccaccttgctgcttttctttctttctttattagaccagccacatgtgtatattagtcaagtaagctgaatgtttcttgaacactagacttttcagcattaatgttaggagttcctatgatttttcttccacctgcttactggcagcatgaagtatctctttcagaagcgaatagcagtcttcagaatcagtagctcgtgaaaccaatggaacgaattttttgcaaagatttttgtaccgaagtgtagcatctaacttaggattttccaccatttcccgtacattcacatcttggataatatctgaccttacatctcgagtccatcgttttaaaatgtatcgttcaggcaaatgcttattgttcaccaaattgagacctttcaatgcgtgcctgcataatatatcaattttctcaaagggtcgacaactacatgagaccatctgatcagatgggttggctataaacttgcactcttcttcatttgttaatgtttctataggagcttcaattgcaatgacaaatttcactacatccatttgagcttatgcttctcatattcagcttgaaaatcttcaaatgttgatggtgtgtaaatcatacttgcttgtatcgtaggtgtcatcatcctcaaatgcttctttctagattcaaattcagcttctaactcattgtcttttttgtcttgaacaacaagctccacgtgctttaggaacctaatgatgtcaaggtctgatttcaaatggcctttgaatgcattattcaagctcttgtttagttgtgtacttcgcattcctagtgacccccagcatgtagcactcagtctacttatgttttcaacatgcaaatgctgtcaagccaagttgatttactaacttttcctcacatagcatcaaatgcttcttcaaaatctgcctcttgttcgtactcatgcaagaattgaaatctacttggatggttggttcttcctcatcttggagctattcttcattctgataattttagtactttcatgcattttgtgatatatgccaagtacagaaaccatgccacacactagtgaacgctgcagccacagtctttcccatagcaatgtcctgaactcctgatcagtgaaatcgtttgtggttgtttttgatgtgttgataaaaatgcattgaacaaccacttgaacgactcaatagtttcatcatatgtcaaagcctagtttgtctccttttgtgtcctgctgttttcatgcgcagaaggaggctgcagttctgtgcgcagcaggagtttggtggtcttgtgttctgctttttttggcattgtactttggtccattttggactgttttcttctcttaatttaatgatgcgcagctctcctgcgtgttcacgaaaaaaaaagctacaccaaataccacgctctctctaaactggctgaaaactatggacataacaaacggtctatattctttgttggttccaaaggtagtgtcaaatgcgatgacatcgccaaagtgagcatagtcaacaatcatctctgcatcagcctaaattatattggatatctgctctttgcagtccatttgtattgtatattgaaatgagggattctctacaactttaacttaaaaatattttagcaaaattccagattccagcctcaccatgcaacatctctctttgacgtttagtatgcatccaccaagaaactcatgtgctgctataggtgcaataccggaatcatcagccacctcaatatcaatagcttggtgcttagaaatgtttgtctgtgacggaatcagatgactagtttgagcaatttggagaatgtggttgtgctcaataaataagtcatgtaccttgtaaaccctattttctctttcataagtaatgcccatgcaaactctatagtctgttcttgtatgagctcgatcacgcttgctaacacagaacttctttattttcagcactatagccctgatttgaacaaacagatctactcaatgttaccaatccatcaagagcactcgggtttgagtaacactttcaaacatcaaaacccatccggccaccatatgtaacccaaaagttccaagcttcatcggaactgctaaatgtcataccaatttgtggaattcaaaaaggaattgcagcaactatgcggttgtaaataatgcattcagaacacgaccaactggatgttctcatcatttaaagtagaacttcaaccatgcagaaacgaataactaagtaggagtagagcacaaaccttgcaggtgattcctcgagcagctgctgggtgttgtccatcgcaacatcaatagcttgttgggcacctgccggcgtgcttggtgctcttgtggagattgtacaggatctcgggtagactgcacagcgccaactttcttcaccacggacatttttttagtaccagcacagacaccttgctgcctccacaatcaacgaattgagagtgcaggaggacatcagctccagcacgtgcagggcagcacaggtgacggtgccttcatgcttcgtgggaagaggcattggggcaacgaatggaggagcaggcgaggaggtgcacacatggcagaggtggccccggaggttccaaggagcagagaaggtggcgggggcttgtaaaatgtggcacaatgagcatgaggtgctttgcccttcgatttgatatggacgaccaagattgtgagactgctacagttgcagtctctagctactgcaccagatccagggatcaaatgtgcggtgatagagaagaatgtggagttcactaggcacccacgagcgcacttcatcaacaaccgcacaatggaggtgtgtatgtttactaatgcactctaactttgccattttgactagtgcatgttgtttgggtggtgctttcacggatggctggcgtttttagatcttccgcaagttggatggcttggccagggacattgagaggtcccagccaccagtagatttgtggaggaagttcgtatactgtacttcactctccggttctgtccttggatcggttgatcacatgaaacaggaaggccagttcagttcttatcatgtcgagtgctttatgtcttgcacttcactgtgtatgtcttctgacaagtatttttgacagattttgacaaggtcattagtcctgtatccgttgcacatttctcacagtacaagttagttgatttgctactcaagaagcttgaaggtattggtttccagacatgctttcccagtgagattggtaactcaacacaagatttggtactggaaagcaagatattgatgggacacaagtgcacatcccttgatcagactgatgagggcattctggttggagcatcagttaacaatggagggatgataatagagagaaagctacactgtggtcttcttatagggacagatggcgcaagaagtacagtgcgtgaattggcaggtatatctatggaaggtgaaagggatttgcagaaactggtcagtgtgcattttcttagcagagatctaggcaggtatttgtccagtcagaggccagggatgctgttcttcatttttaatccaggtgcaattggtgtactagttgcacatgacctagagaatggggaatttgtattgcaggttccattttatcctcctcagcagatgtttgaagattttagtgctaagttgcagagaagtacatctgctgcaataatcgagaatgaacaccggtgtccaggatgtacataatttggcttggaaattgggcttactgctgaatggtgtcgcctcaccatcaatattacaaacttatgagtcagagcgccggcctgttagaatcttctcacacgctttctgttcatccaatgtatatttctccactattaaattacaaaattagcttagtgtgatacaattgcttgcttattgcaggttgcaattttcaataccgaacttagcgtggagaatttcaaggcagctatgtctattcctacaacccttggccttgatccaactgttgcaaactcagtgcatcaagttataaatagaagcctcggatcaatcattccaagaaatgtgcagaaggcagttctagaaggattgttttctcttggtagggcacaagtctcagactatatcctgaatgagaaaaatcccattgggtcgttgagactagcaagattgagaagtattctcgatgaaggcaaaagtcttcagctgcagttccctgcagaggatcttggcttccactatgcagaaggtgctctagttgttgaagctagttgtgagaagactcatgaaggagaaaaactacagcattctaagagggcatcaagagagtacatcccatctgctaaggttggttcgcggcttccccacatgctagtaagagaagtgcctgcttcgagtgagggcgcgttctcaacactggacctagtgagtggggataaactcgagtttgttctcatcattgcaccagtgaaagagtcatatgagattgcccgtgccaccctcaagatagcagatgagcttacgctatcagccagagtatgtgtaatgtggccacgaggttcgactgatgctgaagtggaagagagcagatccgagttgacaccctggacaaactacatcgatgtcgaggaagtgcctagggtgtcgggtggttcatggtgggagatgtgtcgtattagtaggaagagtgtccttttggttaggcctgatgagcacatagcatggctaacagaactggacagggtgagggatgctgagtcagaaattaggagggtcttctctcatgttctgtgcctaaatagccaccgggtgtaagaatttataaatttccttccatttaggctttgtttagatactttggtattcactttaatccacatgtatggaagcggattaggttataaattaaattaatttacatcctaatccacctcactccaaaccgcacaagaggacgttaacagaagatcttcgcacaagaggactttttttagtttcatcgtgttatttaggtactcgataaaatcaaatttggattgaattccttgac

SEQ ID NO: 7355 - DNA, 3266 bp, Zea Mays
tgctccgccgccgccgccctcttcctcctctactggttgcagcctattccaccaccgacgctgaaggccatacgcccccaatcgaatcgatcacatctatgccgtcgatcaccagaggtgggcgtggggggctcttctccacgcaccggggcgcgctcttgtggctccgccgttgccaaagcccactcttgtcgacactagccggcggcggaggccggagcgacgcgccacatctgcccgtactcatcgtcggagctggccctgttgggctcgtcctctcattcctcctcaccaaattcgcactatagccctgatttgaacaaacagatctactcaatgttaccaatccatcaagagcactcgggtttgagtaacactttcaaacatcaaaacccatccggccaccatatgtaacccaaaagttccaagcttcatcggaactgctaaatgtcataccaatttgtggaattcaaaaaggaattgcagcaactatgcggttgtaaataatgcattcagaacacgaccaactggatgttctcatcatttaaagtagaacttcaaccatgcagaaacgaataactaagtaggagtagagcacaaaccttgcaggtgattcctcgagcagctgctgggtgttgtccatcgcaacatcaatagcttgttgggcacctgccggcgtgcttggtgctcttgtggagattgtacaggatctcgggtagactgcacagcgccaactttcttcaccacggacatttttttagtaccagcacagacaccttgctgcctccacaatcaacgaattgagagtgcaggaggacatcagctccagcacgtgcagggcagcacaggtgacggtgccttcatgcttcgtgggaagaggcattggggcaacgaatggaggagcaggcgaggaggtgcacacatggcagaggtggccccggaggttccaaggtgatgcagctctccagcctccctccactccgagcaaagcgaaaagtggtgccaaagcttgtgtttttttgcctccaaaggagcagagaaggtggcgggggcttgtaaaatgtggcacaatgagcatgaggtgctttgcccttcgatttgatatggacgaccaagattgtgagactgctacagttgcagtctctagctactgcaccagatccagggatcaaatgtgcggtgatagagaagaatgtggagttcactaggcacccacgagcgcacttcatcaacaaccgcacaatggagatcttccgcaagttggatggcttggccagggacattgagaggtcccagccaccagtagatttgtggaggaagttcgtatactgtacttcactctccggttctgtccttggatcggttgatcacatgaaacaggaaggccaattttgacaaggtcattagtcctgtatccgttgcacatttctcacagtacaagttagttgatttgctactcaagaagcttgaaggtattggtttccagacatgctttcccagtgagattggtaactcaacacaagatttggtactggaaagcaagatattgatgggacacaagtgcacatcccttgatcagactgatgagggcattctggttggagcatcagttaacaatggagggatgataatagagagaaagctacactgtggtcttcttatagggacagatggcgcaagaagtacagtgcgtgaattggcaggtatatctatggaaggtgaaagggatttgcagaaactggtcagtgtgcattttcttagcagagatctaggcaggtatttgtccagtcagaggccagggatgctgttcttcatttttaatccaggtgcaattggtgtactagttgcacatgacctagagaatggggaatttgtattgcaggttccattttatcctcctcagcagatgtttgaagattttagtgctaagttgcagagaagtacatctgctgcaataatcgagtaatcctctctggtgatgccgcacaccggtttcctcctgctggtggttttggaatgaacaccggtgtccaggatgtacataatttggcttggaaattgggcttactgctgaatggtgtcgcctcaccatcaatattacaaacttatgagtcagagcgccggcctgttagaatcttctcacacgctttctgttcatccaatcgtggagaatttcaaggcagctatgtctattcctacaacccttggccttgatccaactgttgcaaactcagtgcatcaagttataaatagaagcctcggatcaatcattccaagaaatgtgcagaaggcagttctagaaggattgttttctcttggtagggcacaagtctcagactatatcctgaatgagaaaaatcccattgggtcgttgagactagcaagattgagaagtattctcgatgaaggcaaaagtcttcagctgcagttccctgcagaggatcttggcttccactatgcagaaggtgctctagttgttgaagctagttgtgagaagactcatgaaggagaaaaactacagcattctaagagggcatcaagagagtacatcccatctgctaaggttggttcgcggcttccccacatgctagtaagagaagtgcctgcttcgagtgagggcgcgttctcaacactggacctagtgagtggggataaactcgagtttgttctcatcattgcaccagtgaaagagtcatatgagattgcccgtgccaccctcaagatagcagatgagcttacgctatcagccagagtatgtgtaatgtggccacgaggttcgactgatgctgaagtggaagagagcagatccgagttgacaccctggacaaactacatcgatgtcgaggaagtgcctagggtgtcgggtggttcatggtgggagatgtgtcgtattagtaggaagagtgtccttttggttaggcctgatgagcacatagcatggctaacagaactggacagggtgagggatgctgagtcagaaattaggagggtcttctctcatgttctgtgcctaaatagccaccgggtgtaagaatttataaatttccttccatttaggctttgtttagatactttggtattcactttaatccacatgtatggaagcggattaggttataaattaaattaatttacatcctaatccacctcactccaaaccgcacaagaggacgttaacagaagatcttcgcacaagaggactttttttagtttcatcgtgttatttaggtactcgataaaatcaaatttggattgaattccttgac

SEQ ID NO: 7356 - DNA, 2573 bp, Zea Mays
ctgcttgctccgccgccgccgccctcttcctcctctactggttgcagcctattccaccaccgacgctgaaggccatacgcccccaatcgaatcgatcacatctatgccgtcgatcaccagaggtgggcgtggggggctcttctccacgcaccggggcgcgctcttgtggctccgccgttgccaaagcccactcttgtcgacactagccggcggcggaggccggagcgacgcgccacatctgcccgtactcatcgtcggagctggccctgttgggctcgtcctctcattcctcctcaccaaattcgggatcaaatgtgcggtgatagagaagaatgtggagttcactaggcacccacgagcgcacttcatcaacaaccgcacaatggagatcttccgcaagttggatggcttggccagggacattgagaggtcccagccaccagtagatttgtggaggaagttcgtatactgtacttcactctccggttctgtccttggatcggttgatcacatgaaacaggaaggccagttcagttcttatcatgtcgagtgctttatgtcttgcacttcactgtgtatgtcttctgacaagtatttttgacagattttgacaaggtcattagtcctgtatccgttgcacatttctcacagtacaagttagttgatttgctactcaagaagcttgaaggtattggtttccagacatgctttcccagtgagattggtaactcaacacaagatttggtactggaaagcaagatattgatgggacacaagtgcacatcccttgatcagactgatgagggcattctggttggagcatcagttaacaatggagggatgataatagagagaaagctacactgtggtcttcttatagggacagatggcgcaagaagtacagtgcgtgaattggcaggtatatctatggaaggtgaaagggatttgcagaaactggtcagtgtgcattttcttagcagagatctaggcaggtatttgtccagtcagaggccagggatgctgttcttcatttttaatccaggtgcaattggtgtactagttgcacatgacctagagaatggggaatttgtattgcaggttccattttatcctcctcagcagatgtttgaagattttagtgctaaggtatgcgagcaaattattttcaaattagtcggatgggagccagcagatgttcatgttttagacataaaaccatgggcaatgcatgctgaagttgcagagaagtacatctgctgcaataatcgagtaatcctctctggtgatgccgcacaccggtttcctcctgctggtggttttggaatgaacaccggtgtccaggatgtacataatttggcttggaaattgggcttactgctgaatggtgtcgcctcaccatcaatattacaaacttatgagtcagagcgccggcctgttagaatcttctcacacgctttctgttcatccaatcgtggagaatttcaaggcagctatgtctattcctacaacccttggccttgatccaactgttgcaaactcagtgcatcaagttataaatagaagcctcggatcaatcattccaagaaatgtgcagaaggcagttctagaaggattgttttctcttggtagggcacaagtctcagactatatcctgaatgagaaaaatcccattgggtcgttgagactagcaagattgagaagtattctcgatgaaggcaaaagtcttcagctgcagttccctgcagaggatcttggcttccactatgcagaaggtgctctagttgttgaagctagttgtgagaagactcatgaaggagaaaaactacagcattctaagagggcatcaagagagtacatcccatctgctaaggttggttcgcggcttccccacatgctagtaagagaagtgcctgcttcgagtgagggcgcgttctcaacactggacctagtgagtggggataaactcgagtttgttctcatcattgcaccagtgaaagagtcatatgagattgcccgtgccaccctcaagatagcagatgagcttacgctatcagccagagtatgtgtaatgtggccacgaggttcgactgatgctgaagtggaagagagcagatccgagttgacaccctggacaaactacatcgatgtcgaggaagtgcctagggtgtcgggtggttcatggtgggagatgtgtcgtattagtaggaagagtgtccttttggttaggcctgatgagcacatagcatggctaacagaactggacagggtgagggatgctgagtcagaaattaggagggtcttctctcatgttctgtgcctaaatagccaccgggtgtaagaatttataaatttccttccatttaggctttgtttagatactttggtattcactttaatccacatgtatggaagcggattaggttataaattaaattaatttacatcctaatccacctcactccaaaccgcacaagaggacgttaacagaagatcttcgcacaagaggactttttttagtttcatcgtgttatttaggtactcgataaaatcaaatttggattgaattccttgac

SEQ ID NO: 7357 - DNA, 2358 bp, Zea Mays
gctgcttgctccgccgccgccgccctcttcctcctctactggttgcagcctattccaccaccgacgctgaaggccatacgcccccaatcgaatcgatcacatctatgccgtcgatcaccagaggtgggcgtggggggctcttctccacgcaccggggcgcgctcttgtggctccgccgttgccaaagcccactcttgtcgacactagccggcggcggaggccggagcgacgcgccacatctgcccgtactcatcgtcggagctggccctgttgggctcgtcctctcattcctcctcaccaaattcgggatcaaatgtgcggtgatagagaagaatgtggagttcactaggcacccacgagcgcacttcatcaacaaccgcacaatggagattttgacaaggtcattagtcctgtatccgttgcacatttctcacagtacaagttagttgatttgctactcaagaagcttgaaggtattggtttccagacatgctttcccagtgagattggtaactcaacacaagatttggtactggaaagcaagatattgatgggacacaagtgcacatcccttgatcagactgatgagggcattctggttggagcatcagttaacaatggagggatgataatagagagaaagctacactgtggtcttcttatagggacagatggcgcaagaagtacagtgcgtgaattggcaggtatatctatggaaggtgaaagggatttgcagaaactggtcagtgtgcattttcttagcagagatctaggcaggtatttgtccagtcagaggccagggatgctgttcttcatttttaatccaggtgcaattggtgtactagttgcacatgacctagagaatggggaatttgtattgcaggttccattttatcctcctcagcagatgtttgaagattttagtgctaaggtatgcgagcaaattattttcaaattagtcggatgggagccagcagatgttcatgttttagacataaaaccatgggcaatgcatgctgaagttgcagagaagtacatctgctgcaataatcgagtaatcctctctggtgatgccgcacaccggtttcctcctgctggtggttttggaatgaacaccggtgtccaggatgtacataatttggcttggaaattgggcttactgctgaatggtgtcgcctcaccatcaatattacaaacttatgagtcagagcgccggcctgttagaatcttctcacacgctttctgttcatccaatcgtggagaatttcaaggcagctatgtctattcctacaacccttggccttgatccaactgttgcaaactcagtgcatcaagttataaatagaagcctcggatcaatcattccaagaaatgtgcagaaggcagttctagaaggattgttttctcttggtagggcacaagtctcagactatatcctgaatgagaaaaatcccattgggtcgttgagactagcaagattgagaagtattctcgatgaaggcaaaagtcttcagctgcagttccctgcagaggatcttggcttccactatgcagaaggtgctctagttgttgaagctagttgtgagaagactcatgaaggagaaaaactacagcattctaagagggcatcaagagagtacatcccatctgctaaggttggttcgcggcttccccacatgctagtaagagaagtgcctgcttcgagtgagggcgcgttctcaacactggacctagtgagtggggataaactcgagtttgttctcatcattgcaccagtgaaagagtcatatgagattgcccgtgccaccctcaagatagcagatgagcttacgctatcagccagagtatgtgtaatgtggccacgaggttcgactgatgctgaagtggaagagagcagatccgagttgacaccctggacaaactacatcgatgtcgaggaagtgcctagggtgtcgggtggttcatggtgggagatgtgtcgtattagtaggaagagtgtccttttggttaggcctgatgagcacatagcatggctaacagaactggacagggtgagggatgctgagtcagaaattaggagggtcttctctcatgttctgtgcctaaatagccaccgggtgtaagaatttataaatttccttccatttaggctttgtttagatactttggtattcactttaatccacatgtatggaagcggattaggttataaattaaattaatttacatcctaatccacctcactccaaaccgcacaagaggacgttaacagaagatcttcgcacaagaggactttttttagtttcatcgtgttatttaggtactcgataaaatcaaatttggattgaattccttgac

SEQ ID NO: 7358 - DNA, 6757 bp, Zea Mays
gatgctacttgtgcgtgcatgcgttgcaactctggcaccgattccgttccttccttgcggcggcggcggaaaaacagaagcttctccatccttcccttcgttcgtgctcttcttcttgttattccgtttatcggtctggcgcagaaagaaacaagagatgagatctagtctgctaccggagtccccggttcatcagcagaagctgcttgctccgccgccgccgccctcttcctcctctactggttgcagcctattccaccaccgacgctgaaggccatacgcccccaatcgaatcgatcacatctatgccgtcgatcaccagaggtgggcgtggggggctcttctccacgcaccggggcgcgctcttgtggctccgccgttgccaaagcccactcttgtcgacactagccggcggcggaggccggagcgacgcgccacatctgcccgtactcatcgtcggagctggccctgttgggctcgtcctctcattcctcctcaccaaattcggtacggacctcgtgccccccttgctcatcgatgttccaattcgcgcttctgagttaggcagtagcgttgagcggagcaaagttcattgagggaatcagacaaatgtgctaaaacattaggacctggatcagatacagtagcaactgctactggaatctatgcagtagctgtatctgtttcattcaaaaggccatgaatggctaggatcaaagccatatgtttttttctctttccctccccaagtcttactgttagcagctgcttcttttaggagaaattacaaagaacagagaagacaatgcatacatctaataaagcaattaaatggaacaaagctacacgtgtttgctgcaatttgagagcctattacaaaagcttgcatatacaaaagacaaatgttaaactcagatccttttatatattaccaacgttctccatctcttatttcgtatacaaaagcttgcatccaccagcagcagccttccatccacaaagagcatatggttaacacaaaaaatagtgtgattactgtggatccttttgcacataaggccttccccatttcatatacaaaaacttgtatcaaccaatagaagctaggccttcggtatgaagcctgcaaacaaaataatttagagattataatttgtcaaggcaattcaacttatatcatctacctatacttacactgaagttttgctaaaattcctagccatctatcccttccaaggagagtaaggattactgatattttgaacaacgtttgaactctgaaaacagagagaaatacagtgaccaagataaaaagggcagcctggtgcatgtgcgcttgtgtggcctccagggaagggtttccctgcatgtgcaaaaggcactttccacgactcgaacccgcgatctcctggtcacaaggcatcatctttaaagattgagaaaataaaaaaggcagacccccacacgaatgaggtacggggaaaggataaactgaggcaagccttccccgtaaatgcggagaggctgcttcaaacacttggtgactcagcgagatagctctcaccactggaagggataaagattgagaaaatagggaagaaaataccaagttactctgaaaacacagaatgctaattatatgaaaaaagagaagtgtaagcataccataagaatttcggtaaaactagaatttgattcatatgcttgctattctggaacatgacttccatcttcttgttgcataggtttgcttgtgaattattgttccttttgttttttccttttcttacaattttttcactctaagatttctttctttttgatccaccttgctgcttttctttctttctttattagaccagccacatgtgtatattagtcaagtaagctgaatgtttcttgaacactagacttttcagcattaatgttaggagttcctatgatttttcttccacctgcttactggcagcatgaagtatctctttcagaagcgaatagcagtcttcagaatcagtagctcgtgaaaccaatggaacgaattttttgcaaagatttttgtaccgaagtgtagcatctaacttaggattttccaccatttcccgtacattcacatcttggataatatctgaccttacatctcgagtccatcgttttaaaatgtatcgttcaggcaaatgcttattgttcaccaaattgagacctttcaatgcgtgcctgcataatatatcaattttctcaaagggtcgacaactacatgagaccatctgatcagatgggttggctataaacttgcactcttcttcatttgttaatgtttctataggagcttcaattgcaatgacaaatttcactacatccatttgagcttatgcttctcatattcagcttgaaaatcttcaaatgttgatggtgtgtaaatcatacttgcttgtatcgtaggtgtcatcatcctcaaatgcttctttctagattcaaattcagcttctaactcattgtcttttttgtcttgaacaacaagctccacgtgctttaggaacctaatgatgtcaaggtctgatttcaaatggcctttgaatgcattattcaagctcttgtttagttgtgtacttcgcattcctagtgacccccagcatgtagcactcagtctacttatgttttcaacatgcaaatgctgtcaagccaagttgatttactaacttttcctcacatagcatcaaatgcttcttcaaaatctgcctcttgttcgtactcatgcaagaattgaaatctacttggatggttggttcttcctcatcttggagctattcttcattctgataattttagtactttcatgcattttgtgatatatgccaagtacagaaaccatgccacacactagtgaacgctgcagccacagtctttcccatagcaatgtcctgaactcctgatcagtgaaatcgtttgtggttgtttttgatgtgttgataaaaatgcattgaacaaccacttgaacgactcaatagtttcatcatatgtcaaagcctagtttgtctccttttgtgtcctgctgttttcatgcgcagaaggaggctgcagttctgtgcgcagcaggagtttggtggtcttgtgttctgctttttttggcattgtactttggtccattttggactgttttcttctcttaatttaatgatgcgcagctctcctgcgtgttcacgaaaaaaaaagctacaccaaataccacgctctctctaaactggctgaaaactatggacataacaaacggtctatattctttgttggttccaaaggtagtgtcaaatgcgatgacatcgccaaagtgagcatagtcaacaatcatctctgcatcagcctaaattatattggatatctgctctttgcagtccatttgtattgtatattgaaatgagggattctctacaactttaacttaaaaatattttagcaaaattccagattccagcctcaccatgcaacatctctctttgacgtttagtatgcatccaccaagaaactcatgtgctgctataggtgcaataccggaatcatcagccacctcaatatcaatagcttggtgcttagaaatgtttgtctgtgacggaatcagatgactagtttgagcaatttggagaatgtggttgtgctcaataaataagtcatgtaccttgtaaaccctattttctctttcataagtaatgcccatgcaaactctatagtctgttcttgtatgagctcgatcacgcttgctaacacagaacttctttattttcagcactatagccctgatttgaacaaacagatctactcaatgttaccaatccatcaagagcactcgggtttgagtaacactttcaaacatcaaaacccatccggccaccatatgtaacccaaaagttccaagcttcatcggaactgctaaatgtcataccaatttgtggaattcaaaaaggaattgcagcaactatgcggttgtaaataatgcattcagaacacgaccaactggatgttctcatcatttaaagtagaacttcaaccatgcagaaacgaataactaagtaggagtagagcacaaaccttgcaggtgattcctcgagcagctgctgggtgttgtccatcgcaacatcaatagcttgttgggcacctgccggcgtgcttggtgctcttgtggagattgtacaggatctcgggtagactgcacagcgccaactttcttcaccacggacatttttttagtaccagcacagacaccttgctgcctccacaatcaacgaattgagagtgcaggaggacatcagctccagcacgtgcagggcagcacaggtgacggtgccttcatgcttcgtgggaagaggcattggggcaacgaatggaggagcaggcgaggaggtgcacacatggcagaggtggccccggaggttccaagagaaggtggcgggggcttgtaaaatgtggcacaatgagcatgaggtgctttgcccttcgatttgatatggacgaccaagattgtgagactgctacagttgcagtctctagctactgcaccagatccagggatcaaatgtgcggtgatagagaagaatgtggagttcactaggcacccacgagcgcacttcatcaacaaccgcacaatggagatcttccgcaagttggatggcttggccagggacattgagaggtcccagccaccagtagatttgtggaggaagttcgtatactgtacttcactctccggttctgtccttggatcggttgatcacatgaaacaggaaggccagttcagttcttatcatgtcgagtgctttatgtcttgcacttcactgtattttgacaaggtcattagtcctgtatccgttgcacatttctcacagtacaagttagttgatttgctactcaagaagcttgaaggtattggtttccagacatgctttcccagtgagattggtaactcaacacaagatttggtactggaaagcaagatattgatgggacacaagtgcacatcccttgatcagactgatgagggcattctggttggagcatcagttaacaatggagggatgataatagagagaaagctacactgtggtcttcttatagggacagatggcgcaagaagtacagtgcgtgaattggcaggtatatctatggaaggtgaaagggatttgcagaaactggtcagtgtgcattttcttagcagagatctaggcaggtatttgtccagtcagaggccagggatgctgttcttcatttttaatccaggtgcaattggtgtactagttgcacatgacctagagaatggggaatttgtattgcaggttccattttatcctcctcagcagatgtttgaagattttagtgctaaggtatgcgagcaaattattttcaaattagtcggatgggagccagcagatgttcatgttttagacataaaaccatgggcaatgcatgctgaagttgcagagaagtacatctgctgcaataatcgagtaatcctctctggtgatgccgcacaccggtttcctcctgctggtggttttggaatgaacaccggtgtccaggatgtacataatttggcttggaaattgggcttactgctgaatggtgtcgcctcaccatcaatattacaaacttatgagtcagagcgccggcctcgtggagaatttcaaggcagctatgtctattcctacaacccttggccttgatccaactgttgcaaactcagtgcatcaagttataaatagaagcctcggatcaatcattccaagaaatgtgcagaaggcagttctagaaggattgttttctcttggtagggcacaagtctcagactatatcctgaatgagaaaaatcccattgggtcgttgagactagcaagattgagaagtattctcgatgaaggcaaaagtcttcagctgcagttccctgcagaggatcttggcttccactatgcagaaggtgctctagttgttgaagctagttgtgagaagactcatgaaggagaaaaactacagcattctaagagggcatcaagagagtacatcccatctgctaaggttggttcgcggcttccccacatgctagtaagagaagtgcctgcttcgagtgagggcgcgttctcaacactggacctagtgagtggggataaactcgagtttgttctcatcattgcaccagtgaaagagtcatatgagattgcccgtgccaccctcaagatagcagatgagcttacgctatcagccagagtatgtgtaatgtggccacgaggttcgactgatgctgaagtggaagagagcagatccgagttgacaccctggacaaactacatcgatgtcgaggaagtgcctagggtgtcgggtggttcatggtgggagatgtgtcgtattagtaggaagagtgtccttttggttaggcctgatgagcacatagcatggctaacagaactggacagggtgagggatgctgagtcagaaattaggagggtcttctctcatgttctgtgcctaaatagccaccgggtgtaagaatttataaatttccttccatttaggctttgtttagatactttggtattcactttaatccacatgtatggaagcggattaggttataaattaaattaatttacatcctaatccacctcactccaaaccgcacaagaggacgttaacagaagatcttcgcacaagaggactttttttagtttcatcgtgttatttaggtactcgataaaatcaaatttggattgaattccttgac

SEQ ID NO: 7359 - DNA, 3271 bp, Zea Mays
cgctgccgccgaagctgcttgctccgccgccgccgccctcttcctcctctactggttgcagcctattccaccaccgacgctgaaggccatacgcccccaatcgaatcgatcacatctatgccgtcgatcaccagaggtgggcgtggggggctcttctccacgcaccggggcgcgctcttgtggctccgccgttgccaaagcccactcttgtcgacactagccggcggcggaggccggagcgacgcgccacatctgcccgtactcatcgtcggagctggccctgttgggctcgtcctctcattcctcctcaccaaattcgcactatagccctgatttgaacaaacagatctactcaatgttaccaatccatcaagagcactcgggtttgagtaacactttcaaacatcaaaacccatccggccaccatatgtaacccaaaagttccaagcttcatcggaactgctaaatgtcataccaatttgtggaattcaaaaaggaattgcagcaactatgcggttgtaaataatgcattcagaacacgaccaactggatgttctcatcatttaaagtagaacttcaaccatgcagaaacgaataactaagtaggagtagagcacaaaccttgcaggtgattcctcgagcagctgctgggtgttgtccatcgcaacatcaatagcttgttgggcacctgccggcgtgcttggtgctcttgtggagattgtacaggatctcgggtagactgcacagcgccaactttcttcaccacggacatttttttagtaccagcacagacaccttgctgcctccacaatcaacgaattgagagtgcaggaggacatcagctccagcacgtgcagggcagcacaggtgacggtgccttcatgcttcgtgggaagaggcattggggcaacgaatggaggagcaggcgaggaggtgcacacatggcagaggtggccccggaggttccaaggtgatgcagctctccagcctccctccactccgagcaaagcgaaaagtggtgccaaagcttgtgtttttttgcctccaaaggagcagagaaggtggcgggggcttgtaaaatgtggcacaatgagcatgaggtgctttgcccttcgatttgatatggacgaccaagattgtgagactgctacagttgcagtctctagctactgcaccagatccagggatcaaatgtgcggtgatagagaagaatgtggagttcactaggcacccacgagcgcacttcatcaacaaccgcacaatggagatcttccgcaagttggatggcttggccagggacattgagaggtcccagccaccagtagatttgtggaggaagttcgtatactgtacttcactctccggttctgtccttggatcggttgatcacatgaaacaggaagattttgacaaggtcattagtcctgtatccgttgcacatttctcacagtacaagttagttgatttgctactcaagaagcttgaaggtattggtttccagacatgctttcccagtgagattggtaactcaacacaagatttggtactggaaagcaagatattgatgggacacaagtgcacatcccttgatcagactgatgagggcattctggttggagcatcagttaacaatggagggatgataatagagagaaagctacactgtggtcttcttatagggacagatggcgcaagaagtacagtgcgtgaattggcaggtatatctatggaaggtgaaagggatttgcagaaactggtcagtgtgcattttcttagcagagatctaggcaggtatttgtccagtcagaggccagggatgctgttcttcatttttaatccaggtgcaattggtgtactagttgcacatgacctagagaatggggaatttgtattgcaggttccattttatcctcctcagcagatgtttgaagattttagtgctaagttgcagagaagtacatctgctgcaataatcgagtaatcctctctggtgatgccgcacaccggtttcctcctgctggtggttttggaatgaacaccggtgtccaggatgtacataatttggcttggaaattgggcttactgctgaatggtgtcgcctcaccatcaatattacaaacttatgagtcagagcgccggcctgttgcaattttcaataccgaacttagcgtggagaatttcaaggcagctatgtctattcctacaacccttggccttgatccaactgttgcaaactcagtgcatcaagttataaatagaagcctcggatcaatcattccaagaaatgtgcagaaggcagttctagaaggattgttttctcttggtagggcacaagtctcagactatatcctgaatgagaaaaatcccattgggtcgttgagactagcaagattgagaagtattctcgatgaaggcaaaagtcttcagctgcagttccctgcagaggatcttggcttccactatgcagaaggtgctctagttgttgaagctagttgtgagaagactcatgaaggagaaaaactacagcattctaagagggcatcaagagagtacatcccatctgctaaggttggttcgcggcttccccacatgctagtaagagaagtgcctgcttcgagtgagggcgcgttctcaacactggacctagtgagtggggataaactcgagtttgttctcatcattgcaccagtgaaagagtcatatgagattgcccgtgccaccctcaagatagcagatgagcttacgctatcagccagagtatgtgtaatgtggccacgaggttcgactgatgctgaagtggaagagagcagatccgagttgacaccctggacaaactacatcgatgtcgaggaagtgcctagggtgtcgggtggttcatggtgggagatgtgtcgtattagtaggaagagtgtccttttggttaggcctgatgagcacatagcatggctaacagaactggacagggtgagggatgctgagtcagaaattaggagggtcttctctcatgttctgtgcctaaatagccaccgggtgtaagaatttataaatttccttccatttaggctttgtttagatactttggtattcactttaatccacatgtatggaagcggattaggttataaattaaattaatttacatcctaatccacctcactccaaaccgcacaagaggacgttaacagaagatcttcgcacaagaggactttttttagtttcatcgtgttatttaggtactcgataaaatcaaatttggattgaattccttgac

SEQ ID NO: 7360 - DNA, 2459 bp, Zea Mays
ccgctgccgccgggttcatcagcagaagctgcttgctccgccgccgccgccctcttcctcctctactggttgcagcctattccaccaccgacgctgaaggccatacgcccccaatcgaatcgatcacatctatgccgtcgatcaccagaggtgggcgtggggggctcttctccacgcaccggggcgcgctcttgtggctccgccgttgccaaagcccactcttgtcgacactagccggcggcggaggccggagcgacgcgccacatctgcccgtactcatcgtcggagctggccctgttgggctcgtcctctcattcctcctcaccaaattcgggatcaaatgtgcggtgatagagaagaatgtggagttcactaggcacccacgagcgcacttcatcaacaaccgcacaatggagatcttccgcaagttggatggcttggccagggacattgagaggtcccagccaccagtagatttgtggaggaagttcgtatactgtacttcactctccggttctgtccttggatcggttgatcacatgaaacaggaagattttgacaaggtcattagtcctgtatccgttgcacatttctcacagtacaagttagttgatttgctactcaagaagcttgaaggtattggtttccagacatgctttcccagtgagattggtaactcaacacaagatttggtactggaaagcaagatattgatgggacacaagtgcacatcccttgatcagactgatgagggcattctggttggagcatcagttaacaatggagggatgataatagagagaaagctacactgtggtcttcttatagggacagatggcgcaagaagtacagtgcgtgaattggcaggtatatctatggaaggtgaaagggatttgcagaaactggtcagtgtgcattttcttagcagagatctaggcaggtatttgtccagtcagaggccagggatgctgttcttcatttttaatccaggtgcaattggtgtactagttgcacatgacctagagaatggggaatttgtattgcaggttccattttatcctcctcagcagatgtttgaagattttagtgctaaggtatgcgagcaaattattttcaaattagtcggatgggagccagcagatgttcatgttttagacataaaaccatgggcaatgcatgctgaagttgcagagaagtacatctgctgcaataatcgagaatgaacaccggtgtccaggatgtacataatttggcttggaaattgggcttactgctgaatggtgtcgcctcaccatcaatattacaaacttatgagtcagagcgccggcctgttgcaattttcaataccgaacttagcgtggagaatttcaaggcagctatgtctattcctacaacccttggccttgatccaactgttgcaaactcagtgcatcaagttataaatagaagcctcggatcaatcattccaagaaatgtgcagaaggcagttctagaaggattgttttctcttggtagggcacaagtctcagactatatcctgaatgagaaaaatcccattgggtcgttgagactagcaagattgagaagtattctcgatgaaggcaaaagtcttcagctgcagttccctgcagaggatcttggcttccactatgcagaaggtgctctagttgttgaagctagttgtgagaagactcatgaaggagaaaaactacagcattctaagagggcatcaagagagtacatcccatctgctaaggttggttcgcggcttccccacatgctagtaagagaagtgcctgcttcgagtgagggcgcgttctcaacactggacctagtgagtggggataaactcgagtttgttctcatcattgcaccagtgaaagagtcatatgagattgcccgtgccaccctcaagatagcagatgagcttacgctatcagccagagtatgtgtaatgtggccacgaggttcgactgatgctgaagtggaagagagcagatccgagttgacaccctggacaaactacatcgatgtcgaggaagtgcctagggtgtcgggtggttcatggtgggagatgtgtcgtattagtaggaagagtgtccttttggttaggcctgatgagcacatagcatggctaacagaactggacagggtgagggatgctgagtcagaaattaggagggtcttctctcatgttctgtgcctaaatagccaccgggtgtaagaatttataaatttccttccatttaggctttgtttagatactttggtattcactttaatccacatgtatggaagcggattaggttataaattaaattaatttacatcctaatccacctcactccaaaccgcacaagaggacgttaacagaagatcttcgcacaagaggactttttttagtttcatcgtgttatttaggtactcgataaaatcaaatttggattgaattccttgac

SEQ ID NO: 7361 - DNA, 3366 bp, Zea Mays
cccagccccgctgccgccgggttcatcagcagaagctgcttgctccgccgccgccgccctcttcctcctctactggtacgctcgctcacttgcatcaggttgcagcctattccaccaccgacgctgaaggccatacgcccccaatcgaatcgatcacatctatgccgtcgatcaccagaggtgggcgtggggggctcttctccacgcaccggggcgcgctcttgtggctccgccgttgccaaagcccactcttgtcgacactagccggcggcggaggccggagcgacgcgccacatctgcccgtactcatcgtcggagctggccctgttgggctcgtcctctcattcctcctcaccaaattcgcactatagccctgatttgaacaaacagatctactcaatgttaccaatccatcaagagcactcgggtttgagtaacactttcaaacatcaaaacccatccggccaccatatgtaacccaaaagttccaagcttcatcggaactgctaaatgtcataccaatttgtggaattcaaaaaggaattgcagcaactatgcggttgtaaataatgcattcagaacacgaccaactggatgttctcatcatttaaagtagaacttcaaccatgcagaaacgaataactaagtaggagtagagcacaaaccttgcaggtgattcctcgagcagctgctgggtgttgtccatcgcaacatcaatagcttgttgggcacctgccggcgtgcttggtgctcttgtggagattgtacaggatctcgggtagactgcacagcgccaactttcttcaccacggacatttttttagtaccagcacagacaccttgctgcctccacaatcaacgaattgagagtgcaggaggacatcagctccagcacgtgcagggcagcacaggtgacggtgccttcatgcttcgtgggaagaggcattggggcaacgaatggaggagcaggcgaggaggtgcacacatggcagaggtggccccggaggttccaaggtgatgcagctctccagcctccctccactccgagcaaagcgaaaagtggtgccaaagcttgtgtttttttgcctccaaaggagcagagaaggtggcgggggcttgtaaaatgtggcacaatgagcatgaggtgctttgcccttcgatttgatatggacgaccaagattgtgagactgctacagttgcagtctctagctactgcaccagatccagggatcaaatgtgcggtgatagagaagaatgtggagttcactaggcacccacgagcgcacttcatcaacaaccgcacaatggagatcttccgcaagttggatggcttggccagggacattgagaggtcccagccaccagtagatttgtggaggaagttcgtatactgtacttcactctccggttctgtccttggatcggttgatcacatgaaacaggaaggccagttcagttcttatcatgtcgagtgctttatgtcttgcacttcactgtattttgacaaggtcattagtcctgtatccgttgcacatttctcacagtacaagttagttgatttgctactcaagaagcttgaaggtattggtttccagacatgctttcccagtgagattggtaactcaacacaagatttggtactggaaagcaagatattgatgggacacaagtgcacatcccttgatcagactgatgagggcattctggttggagcatcagttaacaatggagggatgataatagagagaaagctacactgtggtcttcttatagggacagatggcgcaagaagtacagtgcgtgaattggcaggtatatctatggaaggtgaaagggatttgcagaaactggtcagtgtgcattttcttagcagagatctaggcaggtatttgtccagtcagaggccagggatgctgttcttcatttttaatccaggtgcaattggtgtactagttgcacatgacctagagaatggggaatttgtattgcaggttccattttatcctcctcagcagatgtttgaagattttagtgctaagttgcagagaagtacatctgctgcaataatcgagtaatcctctctggtgatgccgcacaccggtttcctcctgctggtggttttggaatgaacaccggtgtccaggatgtacataatttggcttggaaattgggcttactgctgaatggtgtcgcctcaccatcaatattacaaacttatgagtcagagcgccggcctgttgcaattttcaataccgaacttagcgtggagaatttcaaggcagctatgtctattcctacaacccttggccttgatccaactgttgcaaactcagtgcatcaagttataaatagaagcctcggatcaatcattccaagaaatgtgcagaaggcagttctagaaggattgttttctcttggtagggcacaagtctcagactatatcctgaatgagaaaaatcccattgggtcgttgagactagcaagattgagaagtattctcgatgaaggcaaaagtcttcagctgcagttccctgcagaggatcttggcttccactatgcagaaggtgctctagttgttgaagctagttgtgagaagactcatgaaggagaaaaactacagcattctaagagggcatcaagagagtacatcccatctgctaaggttggttcgcggcttccccacatgctagtaagagaagtgcctgcttcgagtgagggcgcgttctcaacactggacctagtgagtggggataaactcgagtttgttctcatcattgcaccagtgaaagagtcatatgagattgcccgtgccaccctcaagatagcagatgagcttacgctatcagccagagtatgtgtaatgtggccacgaggttcgactgatgctgaagtggaagagagcagatccgagttgacaccctggacaaactacatcgatgtcgaggaagtgcctagggtgtcgggtggttcatggtgggagatgtgtcgtattagtaggaagagtgtccttttggttaggcctgatgagcacatagcatggctaacagaactggacagggtgagggatgctgagtcagaaattaggagggtcttctctcatgttctgtgcctaaatagccaccgggtgtaagaatttataaatttccttccatttaggctttgtttagatactttggtattcactttaatccacatgtatggaagcggattaggttataaattaaattaatttacatcctaatccacctcactccaaaccgcacaagaggacgttaacagaagatcttcgcacaagaggactttttttagtttcatcgtgttatttaggtactcgataaaatcaaatttggattgaattccttgac

SEQ ID NO: 7362 - DNA, 3138 bp, Zea Mays
cccagccccgctgccgccgggttcatcagcagaagctgcttgctccgccgccgccgccctcttcctcctctactggtacgctcgctcacttgcatcaggttgcagcctattccaccaccgacgctgaaggccatacgcccccaatcgaatcgatcacatctatgccgtcgatcaccagaggtgggcgtggggggctcttctccacgcaccggggcgcgctcttgtggctccgccgttgccaaagcccactcttgtcgacactagccggcggcggaggccggagcgacgcgccacatctgcccgtactcatcgtcggagctggccctgttgggctcgtcctctcattcctcctcaccaaattcgcactatagccctgatttgaacaaacagatctactcaatgttaccaatccatcaagagcactcgggtttgagtaacactttcaaacatcaaaacccatccggccaccatatgtaacccaaaagttccaagcttcatcggaactgctaaatgtcataccaatttgtggaattcaaaaaggaattgcagcaactatgcggttgtaaataatgcattcagaacacgaccaactggatgttctcatcatttaaagtagaacttcaaccatgcagaaacgaataactaagtaggagtagagcacaaaccttgcaggtgattcctcgagcagctgctgggtgttgtccatcgcaacatcaatagcttgttgggcacctgccggcgtgcttggtgctcttgtggagattgtacaggatctcgggtagactgcacagcgccaactttcttcaccacggacatttttttagtaccagcacagacaccttgctgcctccacaatcaacgaattgagagtgcaggaggacatcagctccagcacgtgcagggcagcacaggtgacggtgccttcatgcttcgtgggaagaggcattggggcaacgaatggaggagcaggcgaggaggtgcacacatggcagaggtggccccggaggttccaaggagcagagaaggtggcgggggcttgtaaaatgtggcacaatgagcatgaggtgctttgcccttcgatttgatatggacgaccaagattgtgagactgctacagttgcagtctctagctactgcaccagatccagggatcaaatgtgcggtgatagagaagaatgtggagttcactaggcacccacgagcgcacttcatcaacaaccgcacaatggagattttgacaaggtcattagtcctgtatccgttgcacatttctcacagtacaagttagttgatttgctactcaagaagcttgaaggtattggtttccagacatgctttcccagtgagattggtaactcaacacaagatttggtactggaaagcaagatattgatgggacacaagtgcacatcccttgatcagactgatgagggcattctggttggagcatcagttaacaatggagggatgataatagagagaaagctacactgtggtcttcttatagggacagatggcgcaagaagtacagtgcgtgaattggcaggtatatctatggaaggtgaaagggatttgcagaaactggtcagtgtgcattttcttagcagagatctaggcaggtatttgtccagtcagaggccagggatgctgttcttcatttttaatccaggtgcaattggtgtactagttgcacatgacctagagaatggggaatttgtattgcaggttccattttatcctcctcagcagatgtttgaagattttagtgctaaggtatgcgagcaaattattttcaaattagtcggatgggagccagcagatgttcatgttttagacataaaaccatgggcaatgcatgctgaagttgcagagaagtacatctgctgcaataatcgagaatgaacaccggtgtccaggatgtacataatttggcttggaaattgggcttactgctgaatggtgtcgcctcaccatcaatattacaaacttatgagtcagagcgccggcctgttgcaattttcaataccgaacttagcgtggagaatttcaaggcagctatgtctattcctacaacccttggccttgatccaactgttgcaaactcagtgcatcaagttataaatagaagcctcggatcaatcattccaagaaatgtgcagaaggcagttctagaaggattgttttctcttggtagggcacaagtctcagactatatcctgaatgagaaaaatcccattgggtcgttgagactagcaagattgagaagtattctcgatgaaggcaaaagtcttcagctgcagttccctgcagaggatcttggcttccactatgcagaaggtgctctagttgttgaagctagttgtgagaagactcatgaaggagaaaaactacagcattctaagagggcatcaagagagtacatcccatctgctaaggttggttcgcggcttccccacatgctagtaagagaagtgcctgcttcgagtgagggcgcgttctcaacactggacctagtgagtggggataaactcgagtttgttctcatcattgcaccagtgaaagagtcatatgagattgcccgtgccaccctcaagatagcagatgagcttacgctatcagccagagtatgtgtaatgtggccacgaggttcgactgatgctgaagtggaagagagcagatccgagttgacaccctggacaaactacatcgatgtcgaggaagtgcctagggtgtcgggtggttcatggtgggagatgtgtcgtattagtaggaagagtgtccttttggttaggcctgatgagcacatagcatggctaacagaactggacagggtgagggatgctgagtcagaaattaggagggtcttctctcatgttctgtgcctaaatagccaccgggtgtaagaatttataaatttccttccatttaggctttgtttagatactttggtattcactttaatccacatgtatggaagcggattaggttataaattaaattaatttacatcctaatccacctcactccaaaccgcacaagaggacgttaacagaagatcttcgcacaagaggactttttttagtttcatcgtgttatttaggtactcgataaaatcaaatttggattgaattccttgac

SEQ ID NO: 7363 - DNA, 2327 bp, Zea Mays
cccagccccgctgccgccgggttcatcagcagaagctgcttgctccgccgccgccgccctcttcctcctctactggttgcagcctattccaccaccgacgctgaaggccatacgcccccaatcgaatcgatcacatctatgccgtcgatcaccagaggtgggcgtggggggctcttctccacgcaccggggcgcgctcttgtggctccgccgttgccaaagcccactcttgtcgacactagccggcggcggaggccggagcgacgcgccacatctgcccgtactcatcgtcggagctggccctgttgggctcgtcctctcattcctcctcaccaaattcgggatcaaatgtgcggtgatagagaagaatgtggagttcactaggcacccacgagcgcacttcatcaacaaccgcacaatggagattttgacaaggtcattagtcctgtatccgttgcacatttctcacagtacaagttagttgatttgctactcaagaagcttgaaggtattggtttccagacatgctttcccagtgagattggtaactcaacacaagatttggtactggaaagcaagatattgatgggacacaagtgcacatcccttgatcagactgatgagggcattctggttggagcatcagttaacaatggagggatgataatagagagaaagctacactgtggtcttcttatagggacagatggcgcaagaagtacagtgcgtgaattggcaggtatatctatggaaggtgaaagggatttgcagaaactggtcagtgtgcattttcttagcagagatctaggcaggtatttgtccagtcagaggccagggatgctgttcttcatttttaatccaggtgcaattggtgtactagttgcacatgacctagagaatggggaatttgtattgcaggttccattttatcctcctcagcagatgtttgaagattttagtgctaagttgcagagaagtacatctgctgcaataatcgagtaatcctctctggtgatgccgcacaccggtttcctcctgctggtggttttggaatgaacaccggtgtccaggatgtacataatttggcttggaaattgggcttactgctgaatggtgtcgcctcaccatcaatattacaaacttatgagtcagagcgccggcctgttagaatcttctcacacgctttctgttcatccaatgttgcaattttcaataccgaacttagcgtggagaatttcaaggcagctatgtctattcctacaacccttggccttgatccaactgttgcaaactcagtgcatcaagttataaatagaagcctcggatcaatcattccaagaaatgtgcagaaggcagttctagaaggattgttttctcttggtagggcacaagtctcagactatatcctgaatgagaaaaatcccattgggtcgttgagactagcaagattgagaagtattctcgatgaaggcaaaagtcttcagctgcagttccctgcagaggatcttggcttccactatgcagaaggtgctctagttgttgaagctagttgtgagaagactcatgaaggagaaaaactacagcattctaagagggcatcaagagagtacatcccatctgctaaggttggttcgcggcttccccacatgctagtaagagaagtgcctgcttcgagtgagggcgcgttctcaacactggacctagtgagtggggataaactcgagtttgttctcatcattgcaccagtgaaagagtcatatgagattgcccgtgccaccctcaagatagcagatgagcttacgctatcagccagagtatgtgtaatgtggccacgaggttcgactgatgctgaagtggaagagagcagatccgagttgacaccctggacaaactacatcgatgtcgaggaagtgcctagggtgtcgggtggttcatggtgggagatgtgtcgtattagtaggaagagtgtccttttggttaggcctgatgagcacatagcatggctaacagaactggacagggtgagggatgctgagtcagaaattaggagggtcttctctcatgttctgtgcctaaatagccaccgggtgtaagaatttataaatttccttccatttaggctttgtttagatactttggtattcactttaatccacatgtatggaagcggattaggttataaattaaattaatttacatcctaatccacctcactccaaaccgcacaagaggacgttaacagaagatcttcgcacaagaggactttttttagtttcatcgtgttatttaggtactcgataaaatcaaatttggattgaattccttgac

SEQ ID NO: 7364 - DNA, 2567 bp, Zea Mays
ctcccttcccgcgcgcggccgccgcatccgtccgggcctcctcgtctcccccagccccgctgccgccgggttcatcagcagaagctgcttgctccgccgccgccgccctcttcctcctctactggttgcagcctattccaccaccgacgctgaaggccatacgcccccaatcgaatcgatcacatctatgccgtcgatcaccagaggtgggcgtggggggctcttctccacgcaccggggcgcgctcttgtggctccgccgttgccaaagcccactcttgtcgacactagccggcggcggaggccggagcgacgcgccacatctgcccgtactcatcgtcggagctggccctgttgggctcgtcctctcattcctcctcaccaaattcgggatcaaatgtgcggtgatagagaagaatgtggagttcactaggcacccacgagcgcacttcatcaacaaccgcacaatggagatcttccgcaagttggatggcttggccagggacattgagaggtcccagccaccagtagatttgtggaggaagttcgtatactgtacttcactctccggttctgtccttggatcggttgatcacatgaaacaggaagattttgacaaggtcattagtcctgtatccgttgcacatttctcacagtacaagttagttgatttgctactcaagaagcttgaaggtattggtttccagacatgctttcccagtgagattggtaactcaacacaagatttggtactggaaagcaagatattgatgggacacaagtgcacatcccttgatcagactgatgagggcattctggttggagcatcagttaacaatggagggatgataatagagagaaagctacactgtggtcttcttatagggacagatggcgcaagaagtacagtgcgtgaattggcaggtatatctatggaaggtgaaagggatttgcagaaactggtcagtgtgcattttcttagcagagatctaggcaggtatttgtccagtcagaggccagggatgctgttcttcatttttaatccaggtgcaattggtgtactagttgcacatgacctagagaatggggaatttgtattgcaggttccattttatcctcctcagcagatgtttgaagattttagtgctaaggtatgcgagcaaattattttcaaattagtcggatgggagccagcagatgttcatgttttagacataaaaccatgggcaatgcatgctgaagttgcagagaagtacatctgctgcaataatcgagtaatcctctctggtgatgccgcacaccggtttcctcctgctggtggttttggaatgaacaccggtgtccaggatgtacataatttggcttggaaattgggcttactgctgaatggtgtcgcctcaccatcaatattacaaacttatgagtcagagcgccggcctgttgcaattttcaataccgaacttagcgtggagaatttcaaggcagctatgtctattcctacaacccttggccttgatccaactgttgcaaactcagtgcatcaagttataaatagaagcctcggatcaatcattccaagaaatgtgcagaaggcagttctagaaggattgttttctcttggtagggcacaagtctcagactatatcctgaatgagaaaaatcccattgggtcgttgagactagcaagattgagaagtattctcgatgaaggcaaaagtcttcagctgcagttccctgcagaggatcttggcttccactatgcagaaggtgctctagttgttgaagctagttgtgagaagactcatgaaggagaaaaactacagcattctaagagggcatcaagagagtacatcccatctgctaaggttggttcgcggcttccccacatgctagtaagagaagtgcctgcttcgagtgagggcgcgttctcaacactggacctagtgagtggggataaactcgagtttgttctcatcattgcaccagtgaaagagtcatatgagattgcccgtgccaccctcaagatagcagatgagcttacgctatcagccagagtatgtgtaatgtggccacgaggttcgactgatgctgaagtggaagagagcagatccgagttgacaccctggacaaactacatcgatgtcgaggaagtgcctagggtgtcgggtggttcatggtgggagatgtgtcgtattagtaggaagagtgtccttttggttaggcctgatgagcacatagcatggctaacagaactggacagggtgagggatgctgagtcagaaattaggagggtcttctctcatgttctgtgcctaaatagccaccgggtgtaagaatttataaatttccttccatttaggctttgtttagatactttggtattcactttaatccacatgtatggaagcggattaggttataaattaaattaatttacatcctaatccacctcactccaaaccgcacaagaggacgttaacagaagatcttcgcacaagaggactttttttagtttcatcgtgttatttaggtactcgataaaatcaaatttggattgaattccttgac

SEQ ID NO: 7365 - DNA, 3358 bp, Zea Mays
ctctcccttcccgcgcgcggccgccgcatccgtccgggcctcctcgtctcccccagccccgctgccgccgggttcatcagcagaagctgcttgctccgccgccgccgccctcttcctcctctactggttgcagcctattccaccaccgacgctgaaggccatacgcccccaatcgaatcgatcacatctatgccgtcgatcaccagaggtgggcgtggggggctcttctccacgcaccggggcgcgctcttgtggctccgccgttgccaaagcccactcttgtcgacactagccggcggcggaggccggagcgacgcgccacatctgcccgtactcatcgtcggagctggccctgttgggctcgtcctctcattcctcctcaccaaattcgcactatagccctgatttgaacaaacagatctactcaatgttaccaatccatcaagagcactcgggtttgagtaacactttcaaacatcaaaacccatccggccaccatatgtaacccaaaagttccaagcttcatcggaactgctaaatgtcataccaatttgtggaattcaaaaaggaattgcagcaactatgcggttgtaaataatgcattcagaacacgaccaactggatgttctcatcatttaaagtagaacttcaaccatgcagaaacgaataactaagtaggagtagagcacaaaccttgcaggtgattcctcgagcagctgctgggtgttgtccatcgcaacatcaatagcttgttgggcacctgccggcgtgcttggtgctcttgtggagattgtacaggatctcgggtagactgcacagcgccaactttcttcaccacggacatttttttagtaccagcacagacaccttgctgcctccacaatcaacgaattgagagtgcaggaggacatcagctccagcacgtgcagggcagcacaggtgacggtgccttcatgcttcgtgggaagaggcattggggcaacgaatggaggagcaggcgaggaggtgcacacatggcagaggtggccccggaggttccaaggagcagagaaggtggcgggggcttgtaaaatgtggcacaatgagcatgaggtgctttgcccttcgatttgatatggacgaccaagattgtgagactgctacagttgcagtctctagctactgcaccagatccagggatcaaatgtgcggtgatagagaagaatgtggagttcactaggcacccacgagcgcacttcatcaacaaccgcacaatggagatcttccgcaagttggatggcttggccagggacattgagaggtcccagccaccagtagatttgtggaggaagttcgtatactgtacttcactctccggttctgtccttggatcggttgatcacatgaaacaggaaggccaattttgacaaggtcattagtcctgtatccgttgcacatttctcacagtacaagttagttgatttgctactcaagaagcttgaaggtattggtttccagacatgctttcccagtgagattggtaactcaacacaagatttggtactggaaagcaagatattgatgggacacaagtgcacatcccttgatcagactgatgagggcattctggttggagcatcagttaacaatggagggatgataatagagagaaagctacactgtggtcttcttatagggacagatggcgcaagaagtacagtgcgtgaattggcaggtatatctatggaaggtgaaagggatttgcagaaactggtcagtgtgcattttcttagcagagatctaggcaggtatttgtccagtcagaggccagggatgctgttcttcatttttaatccaggtgcaattggtgtactagttgcacatgacctagagaatggggaatttgtattgcaggttccattttatcctcctcagcagatgtttgaagattttagtgctaaggtatgcgagcaaattattttcaaattagtcggatgggagccagcagatgttcatgttttagacataaaaccatgggcaatgcatgctgaagttgcagagaagtacatctgctgcaataatcgagtaatcctctctggtgatgccgcacaccggtttcctcctgctggtggttttggaatgaacaccggtgtccaggatgtacataatttggcttggaaattgggcttactgctgaatggtgtcgcctcaccatcaatattacaaacttatgagtcagagcgccggcctgttgcaattttcaataccgaacttagcgtggagaatttcaaggcagctatgtctattcctacaacccttggccttgatccaactgttgcaaactcagtgcatcaagttataaatagaagcctcggatcaatcattccaagaaatgtgcagaaggcagttctagaaggattgttttctcttggtagggcacaagtctcagactatatcctgaatgagaaaaatcccattgggtcgttgagactagcaagattgagaagtattctcgatgaaggcaaaagtcttcagctgcagttccctgcagaggatcttggcttccactatgcagaaggtgctctagttgttgaagctagttgtgagaagactcatgaaggagaaaaactacagcattctaagagggcatcaagagagtacatcccatctgctaaggttggttcgcggcttccccacatgctagtaagagaagtgcctgcttcgagtgagggcgcgttctcaacactggacctagtgagtggggataaactcgagtttgttctcatcattgcaccagtgaaagagtcatatgagattgcccgtgccaccctcaagatagcagatgagcttacgctatcagccagagtatgtgtaatgtggccacgaggttcgactgatgctgaagtggaagagagcagatccgagttgacaccctggacaaactacatcgatgtcgaggaagtgcctagggtgtcgggtggttcatggtgggagatgtgtcgtattagtaggaagagtgtccttttggttaggcctgatgagcacatagcatggctaacagaactggacagggtgagggatgctgagtcagaaattaggagggtcttctctcatgttctgtgcctaaatagccaccgggtgtaagaatttataaatttccttccatttaggctttgtttagatactttggtattcactttaatccacatgtatggaagcggattaggttataaattaaattaatttacatcctaatccacctcactccaaaccgcacaagaggacgttaacagaagatcttcgcacaagaggactttttttagtttcatcgtgttatttaggtactcgataaaatcaaatttggattgaattccttgac

SEQ ID NO: 7366 - DNA, 3212 bp, Zea Mays
gtgggggcgacattgggcatgcccggagacaactttcgtagggaggcggcgacacgaggatgggttcatcagcagaagctgcttgctccgccgccgccgccctcttcctcctctactggttgcagcctattccaccaccgacgctgaaggccatacgcccccaatcgaatcgatcacatctatgccgtcgatcaccagaggtgggcgtggggggctcttctccacgcaccggggcgcgctcttgtggctccgccgttgccaaagcccactcttgtcgacactagccggcggcggaggccggagcgacgcgccacatctgcccgtactcatcgtcggagctggccctgttgggctcgtcctctcattcctcctcaccaaattcgcactatagccctgatttgaacaaacagatctactcaatgttaccaatccatcaagagcactcgggtttgagtaacactttcaaacatcaaaacccatccggccaccatatgtaacccaaaagttccaagcttcatcggaactgctaaatgtcataccaatttgtggaattcaaaaaggaattgcagcaactatgcggttgtaaataatgcattcagaacacgaccaactggatgttctcatcatttaaagtagaacttcaaccatgcagaaacgaataactaagtaggagtagagcacaaaccttgcaggtgattcctcgagcagctgctgggtgttgtccatcgcaacatcaatagcttgttgggcacctgccggcgtgcttggtgctcttgtggagattgtacaggatctcgggtagactgcacagcgccaactttcttcaccacggacatttttttagtaccagcacagacaccttgctgcctccacaatcaacgaattgagagtgcaggaggacatcagctccagcacgtgcagggcagcacaggtgacggtgccttcatgcttcgtgggaagaggcattggggcaacgaatggaggagcaggcgaggaggtgcacacatggcagaggtggccccggaggttccaagggatcaaatgtgcggtgatagagaagaatgtggagttcactaggcacccacgagcgcacttcatcaacaaccgcacaatggagatcttccgcaagttggatggcttggccagggacattgagaggtcccagccaccagtagatttgtggaggaagttcgtatactgtacttcactctccggttctgtccttggatcggttgatcacatgaaacaggaagattttgacaaggtcattagtcctgtatccgttgcacatttctcacagtacaagttagttgatttgctactcaagaagcttgaaggtattggtttccagacatgctttcccagtgagattggtaactcaacacaagatttggtactggaaagcaagatattgatgggacacaagtgcacatcccttgatcagactgatgagggcattctggttggagcatcagttaacaatggagggatgataatagagagaaagctacactgtggtcttcttatagggacagatggcgcaagaagtacagtgcgtgaattggcaggtatatctatggaaggtgaaagggatttgcagaaactggtcagtgtgcattttcttagcagagatctaggcaggtatttgtccagtcagaggccagggatgctgttcttcatttttaatccaggtgcaattggtgtactagttgcacatgacctagagaatggggaatttgtattgcaggttccattttatcctcctcagcagatgtttgaagattttagtgctaaggtatgcgagcaaattattttcaaattagtcggatgggagccagcagatgttcatgttttagacataaaaccatgggcaatgcatgctgaagttgcagagaagtacatctgctgcaataatcgagtaatcctctctggtgatgccgcacaccggtttcctcctgctggtggttttggaatgaacaccggtgtccaggatgtacataatttggcttggaaattgggcttactgctgaatggtgtcgcctcaccatcaatattacaaacttatgagtcagagcgccggcctgttgcaattttcaataccgaacttagcgtggagaatttcaaggcagctatgtctattcctacaacccttggccttgatccaactgttgcaaactcagtgcatcaagttataaatagaagcctcggatcaatcattccaagaaatgtgcagaaggcagttctagaaggattgttttctcttggtagggcacaagtctcagactatatcctgaatgagaaaaatcccattgggtcgttgagactagcaagattgagaagtattctcgatgaaggcaaaagtcttcagctgcagttccctgcagaggatcttggcttccactatgcagaaggtgctctagttgttgaagctagttgtgagaagactcatgaaggagaaaaactacagcattctaagagggcatcaagagagtacatcccatctgctaaggttggttcgcggcttccccacatgctagtaagagaagtgcctgcttcgagtgagggcgcgttctcaacactggacctagtgagtggggataaactcgagtttgttctcatcattgcaccagtgaaagagtcatatgagattgcccgtgccaccctcaagatagcagatgagcttacgctatcagccagagtatgtgtaatgtggccacgaggttcgactgatgctgaagtggaagagagcagatccgagttgacaccctggacaaactacatcgatgtcgaggaagtgcctagggtgtcgggtggttcatggtgggagatgtgtcgtattagtaggaagagtgtccttttggttaggcctgatgagcacatagcatggctaacagaactggacagggtgagggatgctgagtcagaaattaggagggtcttctctcatgttctgtgcctaaatagccaccgggtgtaagaatttataaatttccttccatttaggctttgtttagatactttggtattcactttaatccacatgtatggaagcggattaggttataaattaaattaatttacatcctaatccacctcactccaaaccgcacaagaggacgttaacagaagatcttcgcacaagaggactttttttagtttcatcgtgttatttaggtactcgataaaatcaaatttggattgaattccttgac

SEQ ID NO: 7367 - DNA, 1205 bp, Zea Mays
cttatttcatctaaatataagatggtgtggtatggtgttggttgatgaattgaacctgatacatattccttgtgtgttgtggctagaaaaccataatgtacttttacaatgttatgataaattaagaacttgaatttatagtttaaagtataaatagttttgaagactgttattgatgcttttcatggctcatgggccgtacgtattagcatactaagcataggcacccaaagatatcccaacagctggctaaatgggggtgtaccagctgttaagggttagggagattagcttaaatataggagattggttagatgtattaggcggcaggactatataagccgcatagaggaggagagggtaagcagaattaggaatcttagtccagagcctccaagggagggcggacagatttatctaataaaatgtcttcagttcggagccccccaacaaagacagattgctagaatgaacgtcactctctagttaactatcccaacttctcatgatatggagtcagttgatgcagcatgatgccatctaagtatatctatttggttggaaacaagtgtagggtgcattgcagttgataaaatacatctaaatttattcaacgtaaagtatgttacagaacataagttatacggttgacatcctacacacaggttattcgaatttgtaaagggttatgtatgttgtaaacaaataagtcaatgaatcatggatattgaccatataaggcatctctaactactagtaccagactaccagagtatttgcatgtgtttgtggataacctcgaccacaagagggtttcattgataatatgagcagaaatcatgtctttatacagatcagcaatattgtggctatacttatctgatatatcatgttcaaatatcaaatctaataggctggttgctggactatgctccttgcagtcaagacaagctattgatacttgcagctagtttccaacaaaatttcatgttcctctaacagccacaaatgccacttgagggtgaaccaaaacagtgttaggaacaatctatgtagcttatagaagttgtatgcagaagtcttttgtttctggtatgatgattccagagtagctagggaaaaaatgtcagagcctgcctggtttgttccttgtcctcctcctctgtaatcagatcctttcgtcccatttccagctagtgttctca

SEQ ID NO: 7368 - DNA, 1949 bp, Zea Mays
agtgcggaagacccggccccagcgctggcggagaccacccccaggcacagcttcgataatttttgtctgattccggcgttccgcttccgcagacggcagacatgaagaccggagaagaagcgcgcccgaagcgcctgacctcctgccccatcattttcatcccacgcctataagtatccggtcctccgtcctcccctccacctcctttcccccgcctctccgccgcttcttccgcgcgcgccgcgccgcgccgccctcttcccccggctcctcgtgtttgtttctcttctcttcttatccgccgaagcccgaaggagaaaaacacccaccagaaacccaggacgaggaagagtctgcggccgatcgtggatgtcgccaccgacgaacggcgccatctcgctcgcctacgcgccgtccatgatgctgggggcgggcgccctgacgaacccgccgctcctccccttcgacggcttcacggatgaggacttcctcgcctccgccgacgccgctctccttggcgaggctggtaccgaccagaccctcctcctgctgccctcgtgccccggggcgaactgctgcggcggcagtagctccgaccagggtctcggagccctagcgtgtgaggtcacaaccgccggatccttctcgctcttgggccagcctgcgcctgggcaggtttcgtgggaggtgacgactgccgtcgctgcggaccgcaacaccttctcgcgcgcacctgtgggacaacacgtgccgtaaggaaggccagaagcgcaaggggcgccaagtctatttgggtggctacgacaaagaagataaggctgcaagggcatatgacattgccgctctgaagtattggggtgataatgctactactaacttccctagagagaactacatcagagagatacaggatatgcagaacatgaacaggcgtgatgttgtagcatcactgaggaggaagagcagtggcttttctagaggagcatcaatctacagaggagtaacaaagcaccaccaacatggacgctggcaggcaagaatcggccgtgttgcagggaacaaggatctgtatcttggaactttcgcaaccgagcaagaggctgcagaggcgtacgacatcgcggcactgaagttcaggggcgagaatgccgtgaccaacttcgagcccagccggtacaacctgctagcgatcgctcaacgagacatccccatcctggggaggaagctgattcagaagccagctccggaggcagaagaccaggccgctctgagcgctcgttcgttctcccagtcccagcagtcgagcaacagcttgccaccgtatttcctcaccaacctcctgcagccgctgccgtcgcagcactcactagctcaggctctgccgagctacaacaacttggggttcggggagcccagcttgtactggccctgcccctgcggtgacccgggggagcagaaggtgcagcttggcagcaagctggaaatcgtggacggtctcgtgcagctggccaactctgctgcgaactgacagtgctatctgaaatgctggttgttttgcttgtgtggctcggggtcgggggtacgttcatggaactgatagcctgagccctgaagatagcggggtataacatacattgtgccgtttgtttgtcgtattttggtgtatcgtattttggtgtacaaaggcatccaagagtctagtcaagctaactagatgatattatcgggtgtatgatctctctaccggaatggcttaaggcattcaccacagacgaagtgctacattgttaatgagaaacaacactggatgtgtggttagtctctcccgtaatgagcattcacctccgtttagattttaaattgtgagatgttttagttttcttagatacgtaactataaaacattttgtttttttaattgtaagacattatgttttttttaaatatgtt

SEQ ID NO: 7369 - DNA, 2018 bp, Zea Mays
tagagcgttgccctttggggcgcaaggcgttggcgtatggacctgaatctgatattgatgtcctctgtattggtccttgtattgcatcgctgcaacaccatttttttgttgtcctgcgacaaatgctcgaagggaggccagaagtatcagaattgcattcaattgaaggagctaaggttccattgatgcgttttaaattcaatgggattttagttgactttccttatgttcaactcccagtgatcaatgctgcagaggctatgcatgcatttgatccccatgttctagaaaatgtggatgggccaagttggagatgtctatctggagtccgtgctaatagacaaatcattcaattagttcccaatatgaagaaatttcaatatttgttgcggtgcctcaaactatgggcaagaaaaagaggacttcattgccatctacttggcttcttcgctggaattcatttggctatccttgctgcatatgtttgccgcagacatccgaatgctagtataaatactctgttgtctttgttcttcgacatttttgttcactggccttggcctcttccagtgagtttgcttgatccgcctgttccttgtcggggtcctgatgggtgctccctcatgcccataatgttgccatgtattccaccagaattttgctcctctagtacaacagaaagtactttcagcaaaatcaaagaagaactttggcgtggctatgctctaagcaaggataccagaagtactgattttaactggagttggctctttgcaccttttccatatggtgcaagatacaaatgctttctccgcatagttctctctgctccgatgggagaagaattgcgtgactgggttggatgggtgaaatcacgattccgcaaccttcttctcaagctggagagtcttggtgtttactgtgaccctgatccctcagaacaagttgatcataccatcactgatccaaatgttgtattcttctggggtctcatctatagaaggaatattcaaatatgtataagttctctcaaagaagatttcatgaaaagtgtctgcaataacatctatggaaaggaaaaatgtgcccattcagacatcacaatgtccattgttgggcctccccagctgccaaaaagtgtctttgatctctcagtttactctgaaaagctgccacaacatatgatggggcaccaactaatgaagcagaactacaatgcagtcagttaggctcagctgtcatattgcgtgcgagcttcatatgtcaatatcacaacagcaagaagctgctgttgaagtcgttttcaacatcagatttgaatttttttttactgccctttttagatgtaggggcttgttcatgcctcgggaacaaggaatatgggagattttttccttgtgaagctggatgtcgatagctggatctcttcaagcatccagcaaaatgagatggaagcatctcttgaagcattcaagcgacttattcctgttatgaggtgtgtgtgcaggtacatgcatattcatgtacacatcatagcaattggtatacaagtgaggaggaggtacggtatagctgtatgtaaactgtagatgtaatgtttgtactcagcagcagaaatgtgtaaattgcttcctgttagcgctgcttctgggcacagatgctgaggttgatatggaggccatgaatggaagctatatattccaggccagtatgcaaatgcaagtgttttggatcgattcgacccacttttgttttttaggctgtaaaaaaactgtgtcctagaatccaaggattcttatggtaatgagtatgactttgtggaagaaaaacgtttactcatgcgaagcttttgatgtaattgtggtgaatattctttccgatctcgcttacaaaaactttgagggtgcaagattagaattcagccctttcggtttgtggctgaatcaacttcgccatagtttgggcctttgtggctcatttggatagatagcagaattctgttaatgcaaatagtttgg

SEQ ID NO: 7370 - DNA, 3004 bp, Zea Mays
ataatcctctttcgttgctcgccagcctgcatcctgagacactcccaaattcccaatgttccaccgcgccagctcgcgactttgatcccgttccagcctccgttccgttcgggtcctgctggtccattacccttgtaactaaaaccccaaatctgtctcaagtccgagcaatttcaaagcgtgaagctctgctcacgtcgtcgcctccgcgtccgccacccactcaacaacgcggcggcgaatcgcgggcggttcgccgccgaccgccgccgcctttccctcgccagccccccgctcctgaagcaatggtactggaccacgccatcaggggctcggcggcccgcagggctgagacccaaaccctagcgccagtgctgctcatgggcccgccgcctccaccgccgatcccaccgacgacggggatgtacctcccggggcccccaccccccgggacgctcctgccgcacccgatgcacatggcgctcccgcgtgaggtcatcatttacatggacgagtgtcggagccgctccctcctcaagttcatttccgacgcggggattgtgccttcgctagaggacgagcggaggagggagcgggtagtacgcgagctcggcaagatagtaatggattgggcaaagagggtggcctacgagcagggcaactggcactggatcgcttcagccacggtgttgaccttcggttcctatgccctgggggcgtatggacctgaatctgatattgatgtcctctgtattggtccttgtattgcatcgctgcaacaccatttttttgttgtcctgcgacaaatgctcgaagggaggccagaagtatcagaattgcattcaattgaaggagctaaggttccattgatgcgttttaaattcaatgggattttagttgactttccttatgttcaactcccagtgatcaatgctgcagaggctatgcatgcatttgatccccatgttctagaaaatgtggatgggccaagttggagatgtctatctggagtccgtgctaatagacaaatcattcaattagttcccaatatgaaggtccaacaaccacctcactagatttattcatgtactgctatcttcattttttttgttttactcttgtcttttttgtatttgagttttgaaacctaatgttgtctcccattgtatcacttttgttcgttatgtacattttatatttctcagtttggtcctggttaatgtgttttgtcatgtcaaatcatatgtccttttttgttagcactgttgaagtctgctgcactttttatgacttcaaacctttcttgctactgctcttcctattctaattttctcttttttatggagtatgaatgcagaaatttcaatatttgttgcggtgcctcaaactatgggcaagaaaaagaggacttcattgccatctacttggcttcttcgctggaattcatttggctatccttgctgcatatgtttgccgcagacatccgaatgctagtataaatactctgttgtctttgttcttcgacatttttgttcactggccttggcctcttccagtgagtttgcttgatccgcctgttccttgtcggggtcctgatgggtgctccctcatgcccataatgttgccatgtattccaccagaattttgctcctctagtacaacagaaagtactttcagcaaaatcaaagaagaactttggcgtggctatgctctaagcaaggataccagaagtactgattttaactggagttggctctttgcaccttttccatatggtgcaagatacaaatgctttctccgcatagttctctctgctccgatgggagaagaattgcgtgactgggttggatgggtgaaatcacgattccgcaaccttcttctcaagctggagagtcttggtgtttactgtgaccctgatccctcagaacaagttgatcataccatcactgatccaaatgttgtattcttctggggtctcatctatagaaggaatattcaaatatgtataagttctctcaaagaagatttcatgaaaagtgtctgcaataacatctatggaaaggaaaaatgtgcccattcagacatcacaatgtccattgttgggcctccccagctgccaaaaagtgtctttgatctctcagtttactctgaaaagctgccacaacatatgatggggcaccaactaatgaagcagaactacaatgcagtcagttaggctcagctgtcatattgcgtgcgagcttcatatgtcaatatcacaacagcaagaagctgctgttgaagtcgttttcaacatcagatttgaatttttttttactgccctttttagatgtaggggcttgttcatgcctcgggaacaaggaatatgggagattttttccttgtgaagctggatgtcgatagctggatctcttcaagcatccagcaaaatgagatggaagcatctcttgaagcattcaagcgacttattcctgttatgaggtgtgtgtgcaggtacatgcatattcatgtacacatcatagcaattggtatacaagtgaggaggaggtacggtatagctgtatgtaaactgtagatgtaatgtttgtactcagcagcagaaatgtgtaaattgcttcctgttagcgctgcttctgggcacagatgctgaggttgatatggaggccatgaatggaagctatatattccaggccagtatgcaaatgcaagtgttttggatcgattcgacccacttttgttttttaggctgtaaaaaaactgtgtcctagaatccaaggattcttatggtaatgagtatgactttgtggaagaaaaacgtttactcatgcgaagcttttgatgtaattgtggtgaatattctttccgatctcgcttacaaaaactttgagggtgcaagattagaattcagccctttcggtttgtggctgaatcaacttcgccatagtttgggcctttgtggctcatttggatagatagcagaattctgttaatgcaaatagtttgg

SEQ ID NO: 7371 - DNA, 167 bp, Zea Mays
ctcacgtgaaccgatgctcccggtggcataataactgcaggctctctctggtcttcatgccgagaggacacttcctcctgctcgcggggcttgccggtgacagagctcctcaccgtcgcaacgttgcagagcttcatcgtggcttccattattcggctccaagctag

SEQ ID NO: 7372 - DNA, 1218 bp, Zea Mays
cttgaatcgccatatgtttaggctctgttctattctgctttacgctgtgcccgagaaatgattggggtaaccgatggatccaagaacttgatccgtgctattaacaacaggctcagtgctctgtcatttcacatcagggagtattattgggttgatatgaagaagataaatgagatttatcgctataagactgaggagtattcccatgatgctattaacaaattcaacatctacccagagcaaattccatcttggcttgcagactggattcctgtgaaaggcggttaccttataggcaatctgcagccagctcacatggatttcaggtttttctccctagggaatctgtgggcgattgtctcatctcttgctactcaaaggcaagcagagggtattctgaaccttattgaagccaaatgggatgacatagtagccaacatgcctcttaaaatatgttaccctgcactagagtatgaggaatggcgtatcatcactggcagtgatcccaaaaacacgccctggtcgtatcataatggtggatcttggcctacattgttatggcagttcaccttggcttgtatcaagatgggtaggcgtgacttggcacggagggcagttgaggtggcagaaaagaggctctcagatgacaagtggccagagtattatgacaccaggacaggaaggttcattgggaagcaatcacggctatatcaaacttggagcattgctggatatcttagctctaagatgttattggactgtccggagatggcatccatactagtatgcgatgaagacttcgagctgctggaaggttgtgcttgcagcttgaataagaatgctcgcaccaaatgctcacgtcgtgcggccaagtcgcaggttcttgtgtagttccatgcctgttcttgacccaaaagctgcaacgctccttcaacttgttgtaattgttcgtcacagaagctggcactagttactagttacttaagcagaatgatcacaaaccacctatgccgatttttttggcgagttcgtggttgatccatttatacaggagtatatgttgttgtctgtacattttatctaatggattttatgtatcctgctggtcaactcaagttgattggtagttttttttatgtaagcagacagcatgtaaatatcaccgctcgttacaagtgtactaaaagaaaagttagagagacataatgacggaatgag

SEQ ID NO: 7373 - DNA, 1753 bp, Zea Mays
atgcccgaccttgtgaagctatgtcccccatcaacttatcgagtacttgagcctttgcattagctgcatcctgcctcaattgtctactgggagaaatgatgccagagtttgtgtgggtgaagggacagtgtaatcagattgcctagcattattctgtgatgtcttggctactatactgagttgggagaagactgtggattgctatagtcctggtcaagggttgatgcctgctagtttcaaagttagatctgtacctttagatggcaatagcgaagcatttgaggaggttcttgacccagattttggagagtcagctattggacgtgtagcacctgttgactctggtctttggtggataattctgttaagggcatatggaaaaattactggagactatgctctacaagaaagggttgatgtgcagacaggcatcaggctaatactgaatttgtgcttgtctgatggatttgacatgtttcctacattgcttgtaactgatggatcatgtatgattgatcggcggatgggaatccatggtcatcctctggagatccaggctctgttctattctgctttacgctgtgcccgagaaatgattggggtaaccgatggatccaagaacttgatccgtgctattaacaacaggctcagtgctctgtcatttcacatcagggagtattattgggttgatatgaagaagataaatgagatttatcgctataagactgaggagtattcccatgatgctattaacaaattcaacatctacccagagcaaattccatcttggcttgcagactggattcctgtgaaaggcggttaccttataggcaatctgcagccagctcacatggatttcaggtttttctccctagggaatctgtgggcgattgtctcatctcttgctactcaaaggcaagcagagggtattctgaaccttattgaagccaaatgggatgacatagtagccaacatgcctcttaaaatatgttaccctgcactagagtatgaggaatggcgtatcatcactggcagtgatcccaaaaacacgccctggtcgtatcataatggtggatcttggcctacattgttatggcagttcaccttggcttgtatcaagatgggtaggcgtgacttggcacggagggcagttgaggtggcagaaaagaggctctcagatgacaagtggccagagtattatgacaccaggacaggaaggttcattgggaagcaatcacggctatatcaaacttggagcattgctggatatcttagctctaagatgttattggactgtccggagatggcatccatactagtatgcgatgaagacttcgagctgctggaaggttgtgcttgcagcttgaataagaatgctcgcaccaaatgctcacgtcgtgcggccaagtcgcaggttcttgtgtagttccatgcctgttcttgacccaaaagctgcaacgctccttcaacttgttgtaattgttcgtcacagaagctggcactagttactagttacttaagcagaatgatcacaaaccacctatgccgatttttttggcgagttcgtggttgatccatttatacaggagtatatgttgttgtctgtacattttatctaatggattttatgtatcctgctggtcaactcaagttgattggtagttttttttatgtaagcagacagcatgtaaatatcaccgctcgttacaagtgtactaaaagaaaagttagagagacataatgacggaatgag

SEQ ID NO: 7374 - DNA, 1957 bp, Zea Mays
gcctcctcgcccagtcgaccttctcggatagcacccctcgacagcacccaagcaaccgaccgaaatgagcagtgactcagttaggattgtgtttattggatttgagtgtctgattgtgtcagtcaaatttgagttcatcacatccagcccccgcaaccccgtccgtgggcttccccatgcgctgtgtggcactacggtagccgaccctcagcagatcttgcgcggctgtcctcaccagtcgccaacggcctcctcgcccagtcgaccttctcagacagcacccctcgacagcacccaagcaaccgaccgaagtgagcagtgactcagttagattcacagtgtacggaagggagccacttaatacttagtaaaacaccatcagagttgggagaagactgtggattgctatagtcctggtcaagggttgatgcctgctagtttcaaagttagatctgtacctttagatggcaatagcgaagcatttgaggaggttcttgacccagattttggagagtcagctattggacgtgtagcacctgttgactctggtctttggtggataattctgttaagggcatatggaaaaattactggagactatgctctacaagaaagggttgatgtgcagacaggcatcaggctaatactgaatttgtgcttgtctgatggatttgacatgtttcctacattgcttgtaactgatggatcatgtatgattgatcggcggatgggaatccatggtcatcctctggagatccaggctctgttctattctgctttacgctgtgcccgagaaatgattggggtaaccgatggatccaagaacttgatccgtgctattaacaacaggctcagtgctctgtcatttcacatcagggagtattattgggttgatatgaagaagataaatgagatttatcgctataagactgaggagtattcccatgatgctattaacaaattcaacatctacccagagcaaattccatcttggcttgcagactggattcctgtgaaaggcggttaccttataggcaatctgcagccagctcacatggatttcaggtttttctccctagggaatctgtgggcgattgtctcatctcttgctactcaaaggcaagcagagggtattctgaaccttattgaagccaaatgggatgacatagtagccaacatgcctcttaaaatatgttaccctgcactagagtatgaggaatggcgtatcatcactggcagtgatcccaaaaacacgccctggtcgtatcataatggtggatcttggcctacattgttatggcagttcaccttggcttgtatcaagatgggtaggcgtgacttggcacggagggcagttgaggtggcagaaaagaggctctcagatgacaagtggccagagtattatgacaccaggacaggaaggttcattgggaagcaatcacggctatatcaaacttggagcattgctggatatcttagctctaagatgttattggactgtccggagatggcatccatactagtatgcgatgaagacttcgagctgctggaaggttgtgcttgcagcttgaataagaatgctcgcaccaaatgctcacgtcgtgcggccaagtcgcaggttcttgtgtagttccatgcctgttcttgacccaaaagctgcaacgctccttcaacttgttgtaattgttcgtcacagaagctggcactagttactagttacttaagcagaatgatcacaaaccacctatgccgatttttttggcgagttcgtggttgatccatttatacaggagtatatgttgttgtctgtacattttatctaatggattttatgtatcctgctggtcaactcaagttgattggtagttttttttatgtaagcagacagcatgtaaatatcaccgctcgttacaagtgtactaaaagaaaagttagagagacataatgacggaatgag

SEQ ID NO: 7375 - DNA, 2080 bp, Zea Mays
cggccaccgcctttctcctgcgcgtgtggctgcggtctgcctcagtagctagagcagcatagtcgcacatccaacccctgcaaccccgtccgtgggcttccccatgtgctgtgtggcactacggtagccgaccctcagcagatcttgcgcagctgtcctcaccagtcgccaacggcctcctcgcccagtcgaccttctcggatagcacccctcgacagcacccaagcaaccgaccgaaatgagcagtgactcagttaggattgtgtttattggatttgagtgtctgattgtgtcagtcaaatttgagttcatcacatccagcccccgcaaccccgtccgtgggcttccccatgcgctgtgtggcactacggtagccgaccctcagcagatcttgcgcggctgtcctcaccagtcgccaacggcctcctcgcccagtcgaccttctcagacagcacccctcgacagcacccaagcaaccgaccgaagtgagcagtgactcagttagagttgggagaagactgtggattgctatagtcctggtcaagggttgatgcctgctagtttcaaagttagatctgtacctttagatggcaatagcgaagcatttgaggaggttcttgacccagattttggagagtcagctattggacgtgtagcacctgttgactctggtctttggtggataattctgttaagggcatatggaaaaattactggagactatgctctacaagaaagggttgatgtgcagacaggcatcaggctaatactgaatttgtgcttgtctgatggatttgacatgtttcctacattgcttgtaactgatggatcatgtatgattgatcggcggatgggaatccatggtcatcctctggagatccaggctctgttctattctgctttacgctgtgcccgagaaatgattggggtaaccgatggatccaagaacttgatccgtgctattaacaacaggctcagtgctctgtcatttcacatcagggagtattattgggttgatatgaagaagataaatgagatttatcgctataagactgaggagtattcccatgatgctattaacaaattcaacatctacccagagcaaattccatcttggcttgcagactggattcctgtgaaaggcggttaccttataggcaatctgcagccagctcacatggatttcaggtttttctccctagggaatctgtgggcgattgtctcatctcttgctactcaaaggcaagcagagggtattctgaaccttattgaagccaaatgggatgacatagtagccaacatgcctcttaaaatatgttaccctgcactagagtatgaggaatggcgtatcatcactggcagtgatcccaaaaacacgccctggtcgtatcataatggtggatcttggcctacattgttatggcagttcaccttggcttgtatcaagatgggtaggcgtgacttggcacggagggcagttgaggtggcagaaaagaggctctcagatgacaagtggccagagtattatgacaccaggacaggaaggttcattgggaagcaatcacggctatatcaaacttggagcattgctggatatcttagctctaagatgttattggactgtccggagatggcatccatactagtatgcgatgaagacttcgagctgctggaaggttgtgcttgcagcttgaataagaatgctcgcaccaaatgctcacgtcgtgcggccaagtcgcaggttcttgtgtagttccatgcctgttcttgacccaaaagctgcaacgctccttcaacttgttgtaattgttcgtcacagaagctggcactagttactagttacttaagcagaatgatcacaaaccacctatgccgatttttttggcgagttcgtggttgatccatttatacaggagtatatgttgttgtctgtacattttatctaatggattttatgtatcctgctggtcaactcaagttgattggtagttttttttatgtaagcagacagcatgtaaatatcaccgctcgttacaagtgtactaaaagaaaagttagagagacataatgacggaatgag

SEQ ID NO: 7376 - DNA, 5536 bp, Zea Mays
ctccactcaccccgccgcattcccatcagcggccggccaccgcctttctcctgcgcgtgtggctgcggtctgcctcagtagctagagcagcatagtcgcacatccaacccctgcaaccccgtccgtgggcttccccatgtgctgtgtggcactacggtagccgaccctcagcagatcttgcgcagctgtcctcaccagtcgccaacggcctcctcgcccagtcgaccttctcggatagcacccctcgacagcacccaagcaaccgaccgaaatgagcagtgactcagttaggattgtgtttattggatttgagtgtctgattgtgtcagtcaaatttgagttcatcacatccagcccccgcaaccccgtccgtgggcttccccatgcgctgtgtggcactacggtagccgaccctcagcagatcttgcgcggctgtcctcaccagtcgccaacggcctcctcgcccagtcgaccttctcagacagcacccctcgacagcacccaagcaaccgaccgaagtgagcagtgactcagttaggtaagttcagagataatgtttcattttttctacgaattttatgaatacatgctcctcttatatgaactgcaactatctctaccctagaacagacatcaacatgtacatgactattaaatttcctgttacattgttctacctatattgtaacaaatgtcctttcactgttgtcattatgtcaacttagttaattatatgggcactaatatattttttatttataaatacaccaacaatttacgaggagctgcgcccattcgttttcaaaattctaattgtaatgtccacttcttcagtaggtaagttcagaaataatgtttcattttttctacgaattttatgaatacatgctcctcttatatgaactgccactatctctaccctagaacagacatcaacatgtacatgactattaaatttcctattacattgttctacctatattgtagcatatgtcctttcactgttgatttgttcgcttcacacaaaaaatagtgaacgtcgattccagcccaaactttcgtttggtccacccagtcttgctgtagacactgtagttaaaatgctctaccaactttattcaggtctcttattcctagacctgcaatctcctttgccatggtcgatttcaataatttaaaacatgttgataatgagtgccatatatattcttagcgactcttgatcaagttcatatatgaatgaatcacagattcacagtgtacggaagggagccacttaatacttagtaaaacaccatcaggtaaccactttgtagttcaagtgagctgaatcgcccaaattcaagatagtgtatctctacatgctagtatgatttctttaaatatgcattgtgtgagtatatgctagatcacaatcttttactttcacaataggttcttgctgtcagtgaccacaatttggtttagttacaatgactatagcatgacctttacgatcatgccctcaagcatccagttttttttaccatatggatatgtgtggatacaatagcagttagttttattgtctatcccaattaagaatggccacaatgtagcatttgattgacatacacctctaatatatcgtacataagcaagaatatgtgaatacagtagcggtttgtttcattacctgaatttatttattaagaatggccataaaaaagggtgtttcgttacctatatatgaacacatactacactatatacaaattcaaaccaagtgtaactctggcatattgtttctaaaaacactaaccgttagttcatgtgatgttcatcctctttgagatttcatcagactgtgtttctaacaatggacaaaaaaggaataactaatgagttcaaacaatactattatgtccttcactaggaaactggtcagtacatagtttgcctctttatatataatataaatttaacaatgcaatttatagcttctttctccgatatatacaagctaaaaaaataagtgttcaactgtgtaggaacagtgagatcaatgattcaatgcctgcacctagatatgacatgtggtgattctgttgactgtactttaaactcaagttgtgaacaactaaactcaaactatgagtaattcattgtaacatataactgttgtcttttttacaatgttcactattgtcttgtgcatgtatcgggtttgttatgctcctagaaccttcgtagcgacagccgccgaacctcgtggcgcaaaaacaattttttttttgaaaaacaggtattatgctggtaaaggcttatgtggctgtagacatgttcaactaatatcttttttccgcatatttgtcaatgatccaatttgttattttcaaactttatttaccatgaagattactaattgtatattgttataattcaagtttggttatatcccttcatcatataaaaagtatcctacaatcaaaaattacgcgcgctgggcgcgcgccaaccactagtatcatttaagagaaagcaagttcgatactacaaggactcacaagccacacttttgagggccatttcttctttactagattgaatacttgcactggccagtttaatttaccataaaattcctctatatatttcacttgtatgcatgctgtcgcgatcattctcctttgtctagtgctgtgattttacaaggaagctagacagtagtcgtattaccgtttgcattctcggtttgaggcaaccgaattccctttccaacttaatttccaaagctgcatccaaacctcctttgcaaataggcacaaaaatgcaccgtcgttaatcgctattaatcacacaaaacatacgttggaatttggattgtattgctactttttgtatcttcaagcttgtctgctgtgatatccttgcctgaaccaagagccaagggataatggttttttgaaaagaaaaaaaaattaaatgtgaaagagggcaaaagaaaatttcggccacgtgaaccacatcttccttcgccacatccggagctcatgtttattaactgccacgagcccacaaacgtggcgcgccctgcgccgtacgatgccacagtagcctatattttacactttcccaaaccaaaaactatcctgtctgtcttaatcccgttccaatcgctgttacctgataattaccgcagcgatcgaaacgaaccagcctcaaacccatttccttcccgtgcttccttgttcctcctcatcccaaaattcgcaagcgccgattccaatcaggaaaccggaaacctttcttcctccgcaattcaatccggcgggccccgaagccggcgccaatggcggccgccgccatctctcacctccgccggggcgcgcagcaccacgcagtgctatgcatctcgctgtcgcgccgccgcttctcctcctccgccgtggccgcggcctccccgctcgccgcggccgcgcgccgcctcctctccacgacggcagactccgccaccgcgtccacgtcgggggagcactacaagccgccgcccttcgaccccttccgcgccgccaccctatcgccctctgctccgccgctagagtcggcccggctcgaggatgagcccccgagcagtccgccgccgcaggatgaggcggccgcgtccgtggcggcgcacgagcaggcgacgctggcctgccaggagctggaattggagggcctcaaggcgggggtggaggcggtgaagagcagggaggagtcgccggaggagaaggaggcgtggtggctgctcagccgagcggtcgtcaactactgcggtagcgccgtcgggacggtggccgcgaacgatccgtccaccagccagatgctcaattatgaccaggtgttcattagggacttcgtgccatcggccatcgcgttcctcctcaagggtgagagcgatattgtgaagaacttcctgctccacacgttgcagctccagagttgggagaagactgtggattgctatagtcctggtcaagggttgatgcctgctagtttcaaagttagatctgtacctttagatggcaatagcgaagcatttgaggaggttcttgacccagattttggagagtcagctattggacgtgtagcacctgttgactctggtctttggtggataattctgttaagggcatatggaaaaattactggagactatgctctacaagaaagggttgatgtgcagacaggcatcaggctaatactgaatttgtgcttgtctgatggatttgacatgtttcctacattgcttgtaactgatggatcatgtatgattgatcggcggatgggaatccatggtcatcctctggagatccaggctctgttctattctgctttacgctgtgcccgagaaatgattggggtaaccgatggatccaagaacttgatccgtgctattaacaacaggctcagtgctctgtcatttcacatcagggagtattattgggttgatatgaagaagataaatgagatttatcgctataagactgaggagtattcccatgatgctattaacaaattcaacatctacccagagcaaattccatcttggcttgcagactggattcctgtgaaaggcggttaccttataggcaatctgcagccagctcacatggatttcaggtttttctccctagggaatctgtgggcgattgtctcatctcttgctactcaaaggcaagcagagggtattctgaaccttattgaagccaaatgggatgacatagtagccaacatgcctcttaaaatatgttaccctgcactagagtatgaggaatggcgtatcatcactggcagtgatcccaaaaacacgccctggtcgtatcataatggtggatcttggcctacattgttatggcagttcaccttggcttgtatcaagatgggtaggcgtgacttggcacggagggcagttgaggtggcagaaaagaggctctcagatgacaagtggccagagtattatgacaccaggacaggaaggttcattgggaagcaatcacggctatatcaaacttggagcattgctggatatcttagctctaagatgttattggactgtccggagatggcatccatactagtatgcgatgaagacttcgagctgctggaaggttgtgcttgcagcttgaataagaatgctcgcaccaaatgctcacgtcgtgcggccaagtcgcaggttcttgtgtagttccatgcctgttcttgacccaaaagctgcaacgctccttcaacttgttgtaattgttcgtcacagaagctggcactagttactagttacttaagcagaatgatcacaaaccacctatgccgatttttttggcgagttcgtggttgatccatttatacaggagtatatgttgttgtctgtacattttatctaatggattttatgtatcctgctggtcaactcaagttgattggtagttttttttatgtaagcagacagcatgtaaatatcaccgctcgttacaagtgtactaaaagaaaagttagagagacataatgacggaatgag

SEQ ID NO: 7377 - DNA, 4882 bp, Zea Mays
ctcctccactcaccccgccgcattcccatcagcggccggccaccgcctttctcctgcgcgtgtggctgcggtctgcctcagtagctagagcagcatagtcgcacatccaacccctgcaaccccgtccgtgggcttccccatgtgctgtgtggcactacggtagccgaccctcagcagatcttgcgcagctgtcctcaccagtcgccaacggcctcctcgcccagtcgaccttctcggatagcacccctcgacagcacccaagcaaccgaccgaaatgagcagtgactcagttaggattgtgtttattggatttgagtgtctgattgtgtcagtcaaatttgagttcatcacatccagcccccgcaaccccgtccgtgggcttccccatgcgctgtgtggcactacggtagccgaccctcagcagatcttgcgcggctgtcctcaccagtcgccaacggcctcctcgcccagtcgaccttctcagacagcacccctcgacagcacccaagcaaccgaccgaagtgagcagtgactcagttaggagctgcgcccattcgttttcaaaattctaattgtaatgtccacttcttcagtagattcacagtgtacggaagggagccacttaatacttagtaaaacaccatcaggtaaccactttgtagttcaagtgagctgaatcgcccaaattcaagatagtgtatctctacatgctagtatgatttctttaaatatgcattgtgtgagtatatgctagatcacaatcttttactttcacaataggttcttgctgtcagtgaccacaatttggtttagttacaatgactatagcatgacctttacgatcatgccctcaagcatccagttttttttaccatatggatatgtgtggatacaatagcagttagttttattgtctatcccaattaagaatggccacaatgtagcatttgattgacatacacctctaatatatcgtacataagcaagaatatgtgaatacagtagcggtttgtttcattacctgaatttatttattaagaatggccataaaaaagggtgtttcgttacctatatatgaacacatactacactatatacaaattcaaaccaagtgtaactctggcatattgtttctaaaaacactaaccgttagttcatgtgatgttcatcctctttgagatttcatcagactgtgtttctaacaatggacaaaaaaggaataactaatgagttcaaacaatactattatgtccttcactaggaaactggtcagtacatagtttgcctctttatatataatataaatttaacaatgcaatttatagcttctttctccgatatatacaagctaaaaaaataagtgttcaactgtgtaggaacagtgagatcaatgattcaatgcctgcacctagatatgacatgtggtgattctgttgactgtactttaaactcaagttgtgaacaactaaactcaaactatgagtaattcattgtaacatataactgttgtcttttttacaatgttcactattgtcttgtgcatgtatcgggtttgttatgctcctagaaccttcgtagcgacagccgccgaacctcgtggcgcaaaaacaattttttttttgaaaaacaggtattatgctggtaaaggcttatgtggctgtagacatgttcaactaatatcttttttccgcatatttgtcaatgatccaatttgttattttcaaactttatttaccatgaagattactaattgtatattgttataattcaagtttggttatatcccttcatcatataaaaagtatcctacaatcaaaaattacgcgcgctgggcgcgcgccaaccactagtatcatttaagagaaagcaagttcgatactacaaggactcacaagccacacttttgagggccatttcttctttactagattgaatacttgcactggccagtttaatttaccataaaattcctctatatatttcacttgtatgcatgctgtcgcgatcattctcctttgtctagtgctgtgattttacaaggaagctagacagtagtcgtattaccgtttgcattctcggtttgaggcaaccgaattccctttccaacttaatttccaaagctgcatccaaacctcctttgcaaataggcacaaaaatgcaccgtcgttaatcgctattaatcacacaaaacatacgttggaatttggattgtattgctactttttgtatcttcaagcttgtctgctgtgatatccttgcctgaaccaagagccaagggataatggttttttgaaaagaaaaaaaaattaaatgtgaaagagggcaaaagaaaatttcggccacgtgaaccacatcttccttcgccacatccggagctcatgtttattaactgccacgagcccacaaacgtggcgcgccctgcgccgtacgatgccacagtagcctatattttacactttcccaaaccaaaaactatcctgtctgtcttaatcccgttccaatcgctgttacctgataattaccgcagcgatcgaaacgaaccagcctcaaacccatttccttcccgtgcttccttgttcctcctcatcccaaaattcgcaagcgccgattccaatcaggaaaccggaaacctttcttcctccgcaattcaatccggcgggccccgaagccggcgccaatggcggccgccgccatctctcacctccgccggggcgcgcagcaccacgcagtgctatgcatctcgctgtcgcgccgccgcttctcctcctccgccgtggccgcggcctccccgctcgccgcggccgcgcgccgcctcctctccacgacggcagactccgccaccgcgtccacgtcgggggagcactacaagccgccgcccttcgaccccttccgcgccgccaccctatcgccctctgctccgccgctagagtcggcccggctcgaggatgagcccccgagcagtccgccgccgcaggatgaggcggccgcgtccgtggcggcgcacgagcaggcgacgctggcctgccaggagctggaattggagggcctcaaggcgggggtggaggcggtgaagagcagggaggagtcgccggaggagaaggaggcgtggtggctgctcagccgagcggtcgtcaactactgcggtagcgccgtcgggacggtggccgcgaacgatccgtccaccagccagatgctcaattatgaccaggtgttcattagggacttcgtgccatcggccatcgcgttcctcctcaagggtgagagcgatattgtgaagaacttcctgctccacacgttgcagctccagagttgggagaagactgtggattgctatagtcctggtcaagggttgatgcctgctagtttcaaagttagatctgtacctttagatggcaatagcgaagcatttgaggaggttcttgacccagattttggagagtcagctattggacgtgtagcacctgttgactctggtctttggtggataattctgttaagggcatatggaaaaattactggagactatgctctacaagaaagggttgatgtgcagacaggcatcaggctaatactgaatttgtgcttgtctgatggatttgacatgtttcctacattgcttgtaactgatggatcatgtatgattgatcggcggatgggaatccatggtcatcctctggagatccaggctctgttctattctgctttacgctgtgcccgagaaatgattggggtaaccgatggatccaagaacttgatccgtgctattaacaacaggctcagtgctctgtcatttcacatcagggagtattattgggttgatatgaagaagataaatgagatttatcgctataagactgaggagtattcccatgatgctattaacaaattcaacatctacccagagcaaattccatcttggcttgcagactggattcctgtgaaaggcggttaccttataggcaatctgcagccagctcacatggatttcaggtttttctccctagggaatctgtgggcgattgtctcatctcttgctactcaaaggcaagcagagggtattctgaaccttattgaagccaaatgggatgacatagtagccaacatgcctcttaaaatatgttaccctgcactagagtatgaggaatggcgtatcatcactggcagtgatcccaaaaacacgccctggtcgtatcataatggtggatcttggcctacattgttatggcagttcaccttggcttgtatcaagatgggtaggcgtgacttggcacggagggcagttgaggtggcagaaaagaggctctcagatgacaagtggccagagtattatgacaccaggacaggaaggttcattgggaagcaatcacggctatatcaaacttggagcattgctggatatcttagctctaagatgttattggactgtccggagatggcatccatactagtatgcgatgaagacttcgagctgctggaaggttgtgcttgcagcttgaataagaatgctcgcaccaaatgctcacgtcgtgcggccaagtcgcaggttcttgtgtagttccatgcctgttcttgacccaaaagctgcaacgctccttcaacttgttgtaattgttcgtcacagaagctggcactagttactagttacttaagcagaatgatcacaaaccacctatgccgatttttttggcgagttcgtggttgatccatttatacaggagtatatgttgttgtctgtacattttatctaatggattttatgtatcctgctggtcaactcaagttgattggtagttttttttatgtaagcagacagcatgtaaatatcaccgctcgttacaagtgtactaaaagaaaagttagagagacataatgacggaatgag

SEQ ID NO: 7378 - DNA, 2478 bp, Zea Mays
caaactcaccttctcccacgaacggtgaagccgcgacggcgcgacgactccacagccccagtcctcctccactcaccccgccgcattcccatcagcggccggccaccgcctttctcctgcgcgtgtggctgcggtctgcctcagtagctagagcagcatagtcgcacatccaacccctgcaaccccgtccgtgggcttccccatgtgctgtgtggcactacggtagccgaccctcagcagatcttgcgcagctgtcctcaccagtcgccaacggcctcctcgcccagtcgaccttctcggatagcacccctcgacagcacccaagcaaccgaccgaaatgagcagtgactcagttaggattgtgtttattggatttgagtgtctgattgtgtcagtcaaatttgagttcatcacatccagcccccgcaaccccgtccgtgggcttccccatgcgctgtgtggcactacggtagccgaccctcagcagatcttgcgcggctgtcctcaccagtcgccaacggcctcctcgcccagtcgaccttctcagacagcacccctcgacagcacccaagcaaccgaccgaagtgagcagtgactcagttaggtaagttcagagataatgtttcattttttctacgaattttatgaatacatgctcctcttatatgaactgcaactatctctaccctagaacagacatcaacatgtacatgactattaaatttcctgttacattgttctacctatattgtaacaaatgtcctttcactgttgtcattatgtcaacttagttaattatatgggcactaatatattttttatttataaatacaccaacaatttacgaggagctgcgcccattcgttttcaaaattctaattgtaatgtccacttcttcagtagagttgggagaagactgtggattgctatagtcctggtcaagggttgatgcctgctagtttcaaagttagatctgtacctttagatggcaatagcgaagcatttgaggaggttcttgacccagattttggagagtcagctattggacgtgtagcacctgttgactctggtctttggtggataattctgttaagggcatatggaaaaattactggagactatgctctacaagaaagggttgatgtgcagacaggcatcaggctaatactgaatttgtgcttgtctgatggatttgacatgtttcctacattgcttgtaactgatggatcatgtatgattgatcggcggatgggaatccatggtcatcctctggagatccaggctctgttctattctgctttacgctgtgcccgagaaatgattggggtaaccgatggatccaagaacttgatccgtgctattaacaacaggctcagtgctctgtcatttcacatcagggagtattattgggttgatatgaagaagataaatgagatttatcgctataagactgaggagtattcccatgatgctattaacaaattcaacatctacccagagcaaattccatcttggcttgcagactggattcctgtgaaaggcggttaccttataggcaatctgcagccagctcacatggatttcaggtttttctccctagggaatctgtgggcgattgtctcatctcttgctactcaaaggcaagcagagggtattctgaaccttattgaagccaaatgggatgacatagtagccaacatgcctcttaaaatatgttaccctgcactagagtatgaggaatggcgtatcatcactggcagtgatcccaaaaacacgccctggtcgtatcataatggtggatcttggcctacattgttatggcagttcaccttggcttgtatcaagatgggtaggcgtgacttggcacggagggcagttgaggtggcagaaaagaggctctcagatgacaagtggccagagtattatgacaccaggacaggaaggttcattgggaagcaatcacggctatatcaaacttggagcattgctggatatcttagctctaagatgttattggactgtccggagatggcatccatactagtatgcgatgaagacttcgagctgctggaaggttgtgcttgcagcttgaataagaatgctcgcaccaaatgctcacgtcgtgcggccaagtcgcaggttcttgtgtagttccatgcctgttcttgacccaaaagctgcaacgctccttcaacttgttgtaattgttcgtcacagaagctggcactagttactagttacttaagcagaatgatcacaaaccacctatgccgatttttttggcgagttcgtggttgatccatttatacaggagtatatgttgttgtctgtacattttatctaatggattttatgtatcctgctggtcaactcaagttgattggtagttttttttatgtaagcagacagcatgtaaatatcaccgctcgttacaagtgtactaaaagaaaagttagagagacataatgacggaatgag

SEQ ID NO: 7379 - DNA, 5061 bp, Zea Mays
acgctactggatacttccgatgcctgttccgctgtttctcttctcccgtgtcttctcccgtttacctgccgtgtgcgactactaggaggtcgccgccgccgtacgctcagcttctctgcgccggcgacaagcacccaccacaccaggattgtgtttattggatttgagtgtctgattgtgtcagtcaaatttgagttcatcacatccagcccccgcaaccccgtccgtgggcttccccatgcgctgtgtggcactacggtagccgaccctcagcagatcttgcgcggctgtcctcaccagtcgccaacggcctcctcgcccagtcgaccttctcagacagcacccctcgacagcacccaagcaaccgaccgaagtgagcagtgactcagttaggtaagttcagagataatgtttcattttttctacgaattttatgaatacatgctcctcttatatgaactgcaactatctctaccctagaacagacatcaacatgtacatgactattaaatttcctgttacattgttctacctatattgtaacaaatgtcctttcactgttgtcattatgtcaacttagttaattatatgggcactaatatattttttatttataaatacaccaacaatttacgaggagctgcgcccattcgttttcaaaattctaattgtaatgtccacttcttcagtagattcacagtgtacggaagggagccacttaatacttagtaaaacaccatcaggtaaccactttgtagttcaagtgagctgaatcgcccaaattcaagatagtgtatctctacatgctagtatgatttctttaaatatgcattgtgtgagtatatgctagatcacaatcttttactttcacaataggttcttgctgtcagtgaccacaatttggtttagttacaatgactatagcatgacctttacgatcatgccctcaagcatccagttttttttaccatatggatatgtgtggatacaatagcagttagttttattgtctatcccaattaagaatggccacaatgtagcatttgattgacatacacctctaatatatcgtacataagcaagaatatgtgaatacagtagcggtttgtttcattacctgaatttatttattaagaatggccataaaaaagggtgtttcgttacctatatatgaacacatactacactatatacaaattcaaaccaagtgtaactctggcatattgtttctaaaaacactaaccgttagttcatgtgatgttcatcctctttgagatttcatcagactgtgtttctaacaatggacaaaaaaggaataactaatgagttcaaacaatactattatgtccttcactaggaaactggtcagtacatagtttgcctctttatatataatataaatttaacaatgcaatttatagcttctttctccgatatatacaagctaaaaaaataagtgttcaactgtgtaggaacagtgagatcaatgattcaatgcctgcacctagatatgacatgtggtgattctgttgactgtactttaaactcaagttgtgaacaactaaactcaaactatgagtaattcattgtaacatataactgttgtcttttttacaatgttcactattgtcttgtgcatgtatcgggtttgttatgctcctagaaccttcgtagcgacagccgccgaacctcgtggcgcaaaaacaattttttttttgaaaaacaggtattatgctggtaaaggcttatgtggctgtagacatgttcaactaatatcttttttccgcatatttgtcaatgatccaatttgttattttcaaactttatttaccatgaagattactaattgtatattgttataattcaagtttggttatatcccttcatcatataaaaagtatcctacaatcaaaaattacgcgcgctgggcgcgcgccaaccactagtatcatttaagagaaagcaagttcgatactacaaggactcacaagccacacttttgagggccatttcttctttactagattgaatacttgcactggccagtttaatttaccataaaattcctctatatatttcacttgtatgcatgctgtcgcgatcattctcctttgtctagtgctgtgattttacaaggaagctagacagtagtcgtattaccgtttgcattctcggtttgaggcaaccgaattccctttccaacttaatttccaaagctgcatccaaacctcctttgcaaataggcacaaaaatgcaccgtcgttaatcgctattaatcacacaaaacatacgttggaatttggattgtattgctactttttgtatcttcaagcttgtctgctgtgatatccttgcctgaaccaagagccaagggataatggttttttgaaaagaaaaaaaaattaaatgtgaaagagggcaaaagaaaatttcggccacgtgaaccacatcttccttcgccacatccggagctcatgtttattaactgccacgagcccacaaacgtggcgcgccctgcgccgtacgatgccacagtagcctatattttacactttcccaaaccaaaaactatcctgtctgtcttaatcccgttccaatcgctgttacctgataattaccgcagcgatcgaaacgaaccagcctcaaacccatttccttcccgtgcttccttgttcctcctcatcccaaaattcgcaagcgccgattccaatcaggaaaccggaaacctttcttcctccgcaattcaatccggcgggccccgaagccggcgccaatggcggccgccgccatctctcacctccgccggggcgcgcagcaccacgcagtgctatgcatctcgctgtcgcgccgccgcttctcctcctccgccgtggccgcggcctccccgctcgccgcggccgcgcgccgcctcctctccacgacggcagactccgccaccgcgtccacgtcgggggagcactacaagccgccgcccttcgaccccttccgcgccgccaccctatcgccctctgctccgccgctagagtcggcccggctcgaggatgagcccccgagcagtccgccgccgcaggatgaggcggccgcgtccgtggcggcgcacgagcaggcgacgctggcctgccaggagctggaattggagggcctcaaggcgggggtggaggcggtgaagagcagggaggagtcgccggaggagaaggaggcgtggtggctgctcagccgagcggtcgtcaactactgcggtagcgccgtcgggacggtggccgcgaacgatccgtccaccagccagatgctcaattatgaccaggtgttcattagggacttcgtgccatcggccatcgcgttcctcctcaagggtgagagcgatattgtgaagaacttcctgctccacacgttgcagctccagagttgggagaagactgtggattgctatagtcctggtcaagggttgatgcctgctagtttcaaagttagatctgtacctttagatggcaatagcgaagcatttgaggaggttcttgacccagattttggagagtcagctattggacgtgtagcacctgttgactctggtctttggtggataattctgttaagggcatatggaaaaattactggagactatgctctacaagaaagggttgatgtgcagacaggcatcaggctaatactgaatttgtgcttgtctgatggatttgacatgtttcctacattgcttgtaactgatggatcatgtatgattgatcggcggatgggaatccatggtcatcctctggagatccaggcaagctgatgaacccttctccttacattctcaatcatgttaggtaacttttggatgatgttatggtcggccttgatcataaggctctgttctattctgctttacgctgtgcccgagaaatgattggggtaaccgatggatccaagaacttgatccgtgctattaacaacaggctcagtgctctgtcatttcacatcagggagtattattgggttgatatgaagaagataaatgagatttatcgctataagactgaggagtattcccatgatgctattaacaaattcaacatctacccagagcaaattccatcttggcttgcagactggattcctgtgaaaggcggttaccttataggcaatctgcagccagctcacatggatttcaggtttttctccctagggaatctgtgggcgattgtctcatctcttgctactcaaaggcaagcagagggtattctgaaccttattgaagccaaatgggatgacatagtagccaacatgcctcttaaaatatgttaccctgcactagagtatgaggaatggcgtatcatcactggcagtgatcccaaaaacacgccctggtcgtatcataatggtggatcttggcctacattgttatggcagttcaccttggcttgtatcaagatgggtaggcgtgacttggcacggagggcagttgaggtggcagaaaagaggctctcagatgacaagtggccagagtattatgacaccaggacaggaaggttcattgggaagcaatcacggctatatcaaacttggagcattgctggatatcttagctctaagatgttattggactgtccggagatggcatccatactagtatgcgatgaagacttcgagctgctggaaggttgtgcttgcagcttgaataagaatgctcgcaccaaatgctcacgtcgtgcggccaagtcgcaggttcttgtgtagttccatgcctgttcttgacccaaaagctgcaacgctccttcaacttgttgtaattgttcgtcacagaagctggcactagttactagttacttaagcagaatgatcacaaaccacctatgccgatttttttggcgagttcgtggttgatccatttatacaggagtatatgttgttgtctgtacattttatctaatggattttatgtatcctgctggtcaactcaagttgattggtagttttttttatgtaagcagacagcatgtaaatatcaccgctcgttacaagtgtactaaaagaaaagttagagagacataatgacggaatgag

SEQ ID NO: 7380 - DNA, 4292 bp, Zea Mays
acgctactggatacttccgatgcctgttccgctgtttctcttctcccgtgtcttctcccgtttacctgccgtgtgcgactactaggaggtcgccgccgccgtacgctcagcttctctgcgccggcgacaagcacccaccacaccagctacgcggctcctctggtccccatgagcgcaggccacaaactcaccttctcccacgaacggtgaagccgcgacggcgcgacgactccacagccccagtcctcctccactcaccccgccgcattcccatcagcggccggccaccgcctttctcctgcgcgtgtggctgcggtctgcctcagtagctagagcagcatagtcgcacatccaacccctgcaaccccgtccgtgggcttccccatgtgctgtgtggcactacggtagccgaccctcagcagatcttgcgcagctgtcctcaccagtcgccaacggcctcctcgcccagtcgaccttctcggatagcacccctcgacagcacccaagcaaccgaccgaaatgagcagtgactcagttaggattgtgtttattggatttgagtgtctgattgtgtcagtcaaatttgagttcatcacatccagcccccgcaaccccgtccgtgggcttccccatgcgctgtgtggcactacggtagccgaccctcagcagatcttgcgcggctgtcctcaccagtcgccaacggcctcctcgcccagtcgaccttctcagacagcacccctcgacagcacccaagcaaccgaccgaagtgagcagtgactcagttaggaacagtgagatcaatgattcaatgcctgcacctagatatgacatgtggtgattctgttgactgtactttaaactcaagttgtgaacaactaaactcaaactatgagtaattcattgtaacatataactgttgtcttttttacaatgttcactattgtcttgtgcatgtatcgggtttgttatgctcctagaaccttcgtagcgacagccgccgaacctcgtggcgcaaaaacaattttttttttgaaaaacaggtattatgctggtaaaggcttatgtggctgtagacatgttcaactaatatcttttttccgcatatttgtcaatgatccaatttgttattttcaaactttatttaccatgaagattactaattgtatattgttataattcaagtttggttatatcccttcatcatataaaaagtatcctacaatcaaaaattacgcgcgctgggcgcgcgccaaccactagtatcatttaagagaaagcaagttcgatactacaaggactcacaagccacacttttgagggccatttcttctttactagattgaatacttgcactggccagtttaatttaccataaaattcctctatatatttcacttgtatgcatgctgtcgcgatcattctcctttgtctagtgctgtgattttacaaggaagctagacagtagtcgtattaccgtttgcattctcggtttgaggcaaccgaattccctttccaacttaatttccaaagctgcatccaaacctcctttgcaaataggcacaaaaatgcaccgtcgttaatcgctattaatcacacaaaacatacgttggaatttggattgtattgctactttttgtatcttcaagcttgtctgctgtgatatccttgcctgaaccaagagccaagggataatggttttttgaaaagaaaaaaaaattaaatgtgaaagagggcaaaagaaaatttcggccacgtgaaccacatcttccttcgccacatccggagctcatgtttattaactgccacgagcccacaaacgtggcgcgccctgcgccgtacgatgccacagtagcctatattttacactttcccaaaccaaaaactatcctgtctgtcttaatcccgttccaatcgctgttacctgataattaccgcagcgatcgaaacgaaccagcctcaaacccatttccttcccgtgcttccttgttcctcctcatcccaaaattcgcaagcgccgattccaatcaggaaaccggaaacctttcttcctccgcaattcaatccggcgggccccgaagccggcgccaatggcggccgccgccatctctcacctccgccggggcgcgcagcaccacgcagtgctatgcatctcgctgtcgcgccgccgcttctcctcctccgccgtggccgcggcctccccgctcgccgcggccgcgcgccgcctcctctccacgacggcagactccgccaccgcgtccacgtcgggggagcactacaagccgccgcccttcgaccccttccgcgccgccaccctatcgccctctgctccgccgctagagtcggcccggctcgaggatgagcccccgagcagtccgccgccgcaggatgaggcggccgcgtccgtggcggcgcacgagcaggcgacgctggcctgccaggagctggaattggagggcctcaaggcgggggtggaggcggtgaagagcagggaggagtcgccggaggagaaggaggcgtggtggctgctcagccgagcggtcgtcaactactgcggtagcgccgtcgggacggtggccgcgaacgatccgtccaccagccagatgctcaattatgaccaggtgttcattagggacttcgtgccatcggccatcgcgttcctcctcaagggtgagagcgatattgtgaagaacttcctgctccacacgttgcagctccagagttgggagaagactgtggattgctatagtcctggtcaagggttgatgcctgctagtttcaaagttagatctgtacctttagatggcaatagcgaagcatttgaggaggttcttgacccagattttggagagtcagctattggacgtgtagcacctgttgactctggtctttggtggataattctgttaagggcatatggaaaaattactggagactatgctctacaagaaagggttgatgtgcagacaggcatcaggctaatactgaatttgtgcttgtctgatggatttgacatgtttcctacattgcttgtaactgatggatcatgtatgattgatcggcggatgggaatccatggtcatcctctggagatccaggctctgttctattctgctttacgctgtgcccgagaaatgattggggtaaccgatggatccaagaacttgatccgtgctattaacaacaggctcagtgctctgtcatttcacatcagggagtattattgggttgatatgaagaagataaatgagatttatcgctataagactgaggagtattcccatgatgctattaacaaattcaacatctacccagagcaaattccatcttggcttgcagactggattcctgtgaaaggcggttaccttataggcaatctgcagccagctcacatggatttcaggtttttctccctagggaatctgtgggcgattgtctcatctcttgctactcaaaggcaagcagagggtattctgaaccttattgaagccaaatgggatgacatagtagccaacatgcctcttaaaatatgttaccctgcactagagtatgaggaatggcgtatcatcactggcagtgatcccaaaaacacgccctggtcgtatcataatggtggatcttggcctacattgttatggcagttcaccttggcttgtatcaagatgggtaggcgtgacttggcacggagggcagttgaggtggcagaaaagaggctctcagatgacaagtggccagagtattatgacaccaggacaggaaggttcattgggaagcaatcacggctatatcaaacttggagcattgctggatatcttagctctaagatgttattggactgtccggagatggcatccatactagtatgcgatgaagacttcgagctgctggaaggttgtgcttgcagcttgaataagaatgctcgcaccaaatgctcacgtcgtgcggccaagtcgcaggttcttgtgtagttccatgcctgttcttgacccaaaagctgcaacgctccttcaacttgttgtaattgttcgtcacagaagctggcactagttactagttacttaagcagaatgatcacaaaccacctatgccgatttttttggcgagttcgtggttgatccatttatacaggagtatatgttgttgtctgtacattttatctaatggattttatgtatcctgctggtcaactcaagttgattggtagttttttttatgtaagcagacagcatgtaaatatcaccgctcgttacaagtgtactaaaagaaaagttagagagacataatgacggaatgag

SEQ ID NO: 7381 - DNA, 2731 bp, Zea Mays
acgctactggatacttccgatgcctgttccgctgtttctcttctcccgtgtcttctcccgtttacctgccgtgtgcgactactaggaggtcgccgccgccgtacgctcagcttctctgcgccggcgacaagcacccaccacaccaggattgtgtttattggatttgagtgtctgattgtgtcagtcaaatttgagttcatcacatccagcccccgcaaccccgtccgtgggcttccccatgcgctgtgtggcactacggtagccgaccctcagcagatcttgcgcggctgtcctcaccagtcgccaacggcctcctcgcccagtcgaccttctcagacagcacccctcgacagcacccaagcaaccgaccgaagtgagcagtgactcagttaggtaagttcagagataatgtttcattttttctacgaattttatgaatacatgctcctcttatatgaactgcaactatctctaccctagaacagacatcaacatgtacatgactattaaatttcctgttacattgttctacctatattgtaacaaatgtcctttcactgttgtcattatgtcaacttagttaattatatgggcactaatatattttttatttataaatacaccaacaatttacgaggagctgcgcccattcgttttcaaaattctaattgtaatgtccacttcttcagtaggtaagttcagaaataatgtttcattttttctacgaattttatgaatacatgctcctcttatatgaactgccactatctctaccctagaacagacatcaacatgtacatgactattaaatttcctattacattgttctacctatattgtagcatatgtcctttcactgttgatttgttcgcttcacacaaaaaatagtgaacgtcgattccagcccaaactttcgtttggtccacccagtcttgctgtagacactgtagttaaaatgctctaccaactttattcaggtctcttattcctagacctgcaatctcctttgccatggtcgatttcaataatttaaaacatgttgataatgagtgccatatatattcttagcgactcttgatcaagttcatatatgaatgaatcacagattcacagtgtacggaagggagccacttaatacttagtaaaacaccatcagagttgggagaagactgtggattgctatagtcctggtcaagggttgatgcctgctagtttcaaagttagatctgtacctttagatggcaatagcgaagcatttgaggaggttcttgacccagattttggagagtcagctattggacgtgtagcacctgttgactctggtctttggtggataattctgttaagggcatatggaaaaattactggagactatgctctacaagaaagggttgatgtgcagacaggcatcaggctaatactgaatttgtgcttgtctgatggatttgacatgtttcctacattgcttgtaactgatggatcatgtatgattgatcggcggatgggaatccatggtcatcctctggagatccaggctctgttctattctgctttacgctgtgcccgagaaatgattggggtaaccgatggatccaagaacttgatccgtgctattaacaacaggctcagtgctctgtcatttcacatcagggagtattattgggttgatatgaagaagataaatgagatttatcgctataagactgaggagtattcccatgatgctattaacaaattcaacatctacccagagcaaattccatcttggcttgcagactggattcctgtgaaaggcggttaccttataggcaatctgcagccagctcacatggatttcaggtttttctccctagggaatctgtgggcgattgtctcatctcttgctactcaaaggcaagcagagggtattctgaaccttattgaagccaaatgggatgacatagtagccaacatgcctcttaaaatatgttaccctgcactagagtatgaggaatggcgtatcatcactggcagtgatcccaaaaacacgccctggtcgtatcataatggtggatcttggcctacattgttatggcagttcaccttggcttgtatcaagatgggtaggcgtgacttggcacggagggcagttgaggtggcagaaaagaggctctcagatgacaagtggccagagtattatgacaccaggacaggaaggttcattgggaagcaatcacggctatatcaaacttggagcattgctggatatcttagctctaagatgttattggactgtccggagatggcatccatactagtatgcgatgaagacttcgagctgctggaaggttgtgcttgcagcttgaataagaatgctcgcaccaaatgctcacgtcgtgcggccaagtcgcaggttcttgtgtagttccatgcctgttcttgacccaaaagctgcaacgctccttcaacttgttgtaattgttcgtcacagaagctggcactagttactagttacttaagcagaatgatcacaaaccacctatgccgatttttttggcgagttcgtggttgatccatttatacaggagtatatgttgttgtctgtacattttatctaatggattttatgtatcctgctggtcaactcaagttgattggtagttttttttatgtaagcagacagcatgtaaatatcaccgctcgttacaagtgtactaaaagaaaagttagagagacataatgacggaatgag

SEQ ID NO: 7382 - DNA, 2267 bp, Zea Mays
acgctactggatacttccgatgcctgttccgctgtttctcttctcccgtgtcttctcccgtttacctgccgtgtgcgactactaggaggtcgccgccgccgtacgctcagcttctctgcgccggcgacaagcacccaccacaccaggattgtgtttattggatttgagtgtctgattgtgtcagtcaaatttgagttcatcacatccagcccccgcaaccccgtccgtgggcttccccatgcgctgtgtggcactacggtagccgaccctcagcagatcttgcgcggctgtcctcaccagtcgccaacggcctcctcgcccagtcgaccttctcagacagcacccctcgacagcacccaagcaaccgaccgaagtgagcagtgactcagttaggtaagttcagagataatgtttcattttttctacgaattttatgaatacatgctcctcttatatgaactgcaactatctctaccctagaacagacatcaacatgtacatgactattaaatttcctgttacattgttctacctatattgtaacaaatgtcctttcactgttgtcattatgtcaacttagttaattatatgggcactaatatattttttatttataaatacaccaacaatttacgaggagctgcgcccattcgttttcaaaattctaattgtaatgtccacttcttcagtagagttgggagaagactgtggattgctatagtcctggtcaagggttgatgcctgctagtttcaaagttagatctgtacctttagatggcaatagcgaagcatttgaggaggttcttgacccagattttggagagtcagctattggacgtgtagcacctgttgactctggtctttggtggataattctgttaagggcatatggaaaaattactggagactatgctctacaagaaagggttgatgtgcagacaggcatcaggctaatactgaatttgtgcttgtctgatggatttgacatgtttcctacattgcttgtaactgatggatcatgtatgattgatcggcggatgggaatccatggtcatcctctggagatccaggctctgttctattctgctttacgctgtgcccgagaaatgattggggtaaccgatggatccaagaacttgatccgtgctattaacaacaggctcagtgctctgtcatttcacatcagggagtattattgggttgatatgaagaagataaatgagatttatcgctataagactgaggagtattcccatgatgctattaacaaattcaacatctacccagagcaaattccatcttggcttgcagactggattcctgtgaaaggcggttaccttataggcaatctgcagccagctcacatggatttcaggtttttctccctagggaatctgtgggcgattgtctcatctcttgctactcaaaggcaagcagagggtattctgaaccttattgaagccaaatgggatgacatagtagccaacatgcctcttaaaatatgttaccctgcactagagtatgaggaatggcgtatcatcactggcagtgatcccaaaaacacgccctggtcgtatcataatggtggatcttggcctacattgttatggcagttcaccttggcttgtatcaagatgggtaggcgtgacttggcacggagggcagttgaggtggcagaaaagaggctctcagatgacaagtggccagagtattatgacaccaggacaggaaggttcattgggaagcaatcacggctatatcaaacttggagcattgctggatatcttagctctaagatgttattggactgtccggagatggcatccatactagtatgcgatgaagacttcgagctgctggaaggttgtgcttgcagcttgaataagaatgctcgcaccaaatgctcacgtcgtgcggccaagtcgcaggttcttgtgtagttccatgcctgttcttgacccaaaagctgcaacgctccttcaacttgttgtaattgttcgtcacagaagctggcactagttactagttacttaagcagaatgatcacaaaccacctatgccgatttttttggcgagttcgtggttgatccatttatacaggagtatatgttgttgtctgtacattttatctaatggattttatgtatcctgctggtcaactcaagttgattggtagttttttttatgtaagcagacagcatgtaaatatcaccgctcgttacaagtgtactaaaagaaaagttagagagacataatgacggaatgag

SEQ ID NO: 7383 - DNA, 4993 bp, Zea Mays
acgctactggatacttccgatgcctgttccgctgtttctcttctcccgtgtcttctcccgtttacctgccgtgtgcgactactaggaggtcgccgccgccgtacgctcagcttctctgcgccggcgacaagcacccaccacaccaggattgtgtttattggatttgagtgtctgattgtgtcagtcaaatttgagttcatcacatccagcccccgcaaccccgtccgtgggcttccccatgcgctgtgtggcactacggtagccgaccctcagcagatcttgcgcggctgtcctcaccagtcgccaacggcctcctcgcccagtcgaccttctcagacagcacccctcgacagcacccaagcaaccgaccgaagtgagcagtgactcagttaggtaagttcagagataatgtttcattttttctacgaattttatgaatacatgctcctcttatatgaactgcaactatctctaccctagaacagacatcaacatgtacatgactattaaatttcctgttacattgttctacctatattgtaacaaatgtcctttcactgttgtcattatgtcaacttagttaattatatgggcactaatatattttttatttataaatacaccaacaatttacgaggagctgcgcccattcgttttcaaaattctaattgtaatgtccacttcttcagtagattcacagtgtacggaagggagccacttaatacttagtaaaacaccatcaggtaaccactttgtagttcaagtgagctgaatcgcccaaattcaagatagtgtatctctacatgctagtatgatttctttaaatatgcattgtgtgagtatatgctagatcacaatcttttactttcacaataggttcttgctgtcagtgaccacaatttggtttagttacaatgactatagcatgacctttacgatcatgccctcaagcatccagttttttttaccatatggatatgtgtggatacaatagcagttagttttattgtctatcccaattaagaatggccacaatgtagcatttgattgacatacacctctaatatatcgtacataagcaagaatatgtgaatacagtagcggtttgtttcattacctgaatttatttattaagaatggccataaaaaagggtgtttcgttacctatatatgaacacatactacactatatacaaattcaaaccaagtgtaactctggcatattgtttctaaaaacactaaccgttagttcatgtgatgttcatcctctttgagatttcatcagactgtgtttctaacaatggacaaaaaaggaataactaatgagttcaaacaatactattatgtccttcactaggaaactggtcagtacatagtttgcctctttatatataatataaatttaacaatgcaatttatagcttctttctccgatatatacaagctaaaaaaataagtgttcaactgtgtaggaacagtgagatcaatgattcaatgcctgcacctagatatgacatgtggtgattctgttgactgtactttaaactcaagttgtgaacaactaaactcaaactatgagtaattcattgtaacatataactgttgtcttttttacaatgttcactattgtcttgtgcatgtatcgggtttgttatgctcctagaaccttcgtagcgacagccgccgaacctcgtggcgcaaaaacaattttttttttgaaaaacaggtattatgctggtaaaggcttatgtggctgtagacatgttcaactaatatcttttttccgcatatttgtcaatgatccaatttgttattttcaaactttatttaccatgaagattactaattgtatattgttataattcaagtttggttatatcccttcatcatataaaaagtatcctacaatcaaaaattacgcgcgctgggcgcgcgccaaccactagtatcatttaagagaaagcaagttcgatactacaaggactcacaagccacacttttgagggccatttcttctttactagattgaatacttgcactggccagtttaatttaccataaaattcctctatatatttcacttgtatgcatgctgtcgcgatcattctcctttgtctagtgctgtgattttacaaggaagctagacagtagtcgtattaccgtttgcattctcggtttgaggcaaccgaattccctttccaacttaatttccaaagctgcatccaaacctcctttgcaaataggcacaaaaatgcaccgtcgttaatcgctattaatcacacaaaacatacgttggaatttggattgtattgctactttttgtatcttcaagcttgtctgctgtgatatccttgcctgaaccaagagccaagggataatggttttttgaaaagaaaaaaaaattaaatgtgaaagagggcaaaagaaaatttcggccacgtgaaccacatcttccttcgccacatccggagctcatgtttattaactgccacgagcccacaaacgtggcgcgccctgcgccgtacgatgccacagtagcctatattttacactttcccaaaccaaaaactatcctgtctgtcttaatcccgttccaatcgctgttacctgataattaccgcagcgatcgaaacgaaccagcctcaaacccatttccttcccgtgcttccttgttcctcctcatcccaaaattcgcaagcgccgattccaatcaggaaaccggaaacctttcttcctccgcaattcaatccggcgggccccgaagccggcgccaatggcggccgccgccatctctcacctccgccggggcgcgcagcaccacgcagtgctatgcatctcgctgtcgcgccgccgcttctcctcctccgccgtggccgcggcctccccgctcgccgcggccgcgcgccgcctcctctccacgacggcagactccgccaccgcgtccacgtcgggggagcactacaagccgccgcccttcgaccccttccgcgccgccaccctatcgccctctgctccgccgctagagtcggcccggctcgaggatgagcccccgagcagtccgccgccgcaggatgaggcggccgcgtccgtggcggcgcacgagcaggcgacgctggcctgccaggagctggaattggagggcctcaaggcgggggtggaggcggtgaagagcagggaggagtcgccggaggagaaggaggcgtggtggctgctcagccgagcggtcgtcaactactgcggtagcgccgtcgggacggtggccgcgaacgatccgtccaccagccagatgctcaattatgaccaggtgttcattagggacttcgtgccatcggccatcgcgttcctcctcaagggtgagagcgatattgtgaagaacttcctgctccacacgttgcagctccagagttgggagaagactgtggattgctatagtcctggtcaagggttgatgcctgctagtttcaaagttagatctgtacctttagatggcaatagcgaagcatttgaggaggttcttgacccagattttggagagtcagctattggacgtgtagcacctgttgactctgctctctttttctaaggtctttggtggataattctgttaagggcatatggaaaaattactggagactatgctctacaagaaagggttgatgtgcagacaggcatcaggctaatactgaatttgtgcttgtctgatggatttgacatgtttcctacattgcttgtaactgatggatcatgtatgattgatcggcggatgggaatccatggtcatcctctggagatccaggctctgttctattctgctttacgctgtgcccgagaaatgattggggtaaccgatggatccaagaacttgatccgtgctattaacaacaggctcagtgctctgtcatttcacatcagggagtattattgggttgatatgaagaagataaatgagatttatcgctataagactgaggagtattcccatgatgctattaacaaattcaacatctacccagagcaaattccatcttggcttgcagactggattcctgtgaaaggcggttaccttataggcaatctgcagccagctcacatggatttcaggtttttctccctagggaatctgtgggcgattgtctcatctcttgctactcaaaggcaagcagagggtattctgaaccttattgaagccaaatgggatgacatagtagccaacatgcctcttaaaatatgttaccctgcactagagtatgaggaatggcgtatcatcactggcagtgatcccaaaaacacgccctggtcgtatcataatggtggatcttggcctacattgttatggcagttcaccttggcttgtatcaagatgggtaggcgtgacttggcacggagggcagttgaggtggcagaaaagaggctctcagatgacaagtggccagagtattatgacaccaggacaggaaggttcattgggaagcaatcacggctatatcaaacttggagcattgctggatatcttagctctaagatgttattggactgtccggagatggcatccatactagtatgcgatgaagacttcgagctgctggaaggttgtgcttgcagcttgaataagaatgctcgcaccaaatgctcacgtcgtgcggccaagtcgcaggttcttgtgtagttccatgcctgttcttgacccaaaagctgcaacgctccttcaacttgttgtaattgttcgtcacagaagctggcactagttactagttacttaagcagaatgatcacaaaccacctatgccgatttttttggcgagttcgtggttgatccatttatacaggagtatatgttgttgtctgtacattttatctaatggattttatgtatcctgctggtcaactcaagttgattggtagttttttttatgtaagcagacagcatgtaaatatcaccgctcgttacaagtgtactaaaagaaaagttagagagacataatgacggaatgag

SEQ ID NO: 7384 - DNA, 3738 bp, Zea Mays
ctccctcgctcgctccgcctctccacgctactggatacttccgatgcctgttccgctgtttctcttctcccgtgtcttctcccgtttacctgccgtgtgcgactactaggaggtcgccgccgccgtacgctcagcttctctgcgccggcgacaagcacccaccacaccaggattgtgtttattggatttgagtgtctgattgtgtcagtcaaatttgagttcatcacatccagcccccgcaaccccgtccgtgggcttccccatgcgctgtgtggcactacggtagccgaccctcagcagatcttgcgcggctgtcctcaccagtcgccaacggcctcctcgcccagtcgaccttctcagacagcacccctcgacagcacccaagcaaccgaccgaagtgagcagtgactcagttaggtaagttcagagataatgtttcattttttctacgaattttatgaatacatgctcctcttatatgaactgcaactatctctaccctagaacagacatcaacatgtacatgactattaaatttcctgttacattgttctacctatattgtaacaaatgtcctttcactgttgtcattatgtcaacttagttaattatatgggcactaatatattttttatttataaatacaccaacaatttacgaggagctgcgcccattcgttttcaaaattctaattgtaatgtccacttcttcagtaggtaagttcagaaataatgtttcattttttctacgaattttatgaatacatgctcctcttatatgaactgccactatctctaccctagaacagacatcaacatgtacatgactattaaatttcctattacattgttctacctatattgtagcatatgtcctttcactgttgatttgttcgcttcacacaaaaaatagtgaacgtcgattccagcccaaactttcgtttggtccacccagtcttgctgtagacactgtagttaaaatgctctaccaactttattcaggtctcttattcctagacctgcaatctcctttgccatggtcgatttcaataatttaaaacatgttgataatgagtgccatatatattcttagcgactcttgatcaagttcatatatgaatgaatcacagattcacagtgtacggaagggagccacttaatacttagtaaaacaccatcaggtaaccactttgtagttcaagtgagctgaatcgcccaaattcaagatagtgtatctctacatgctagtatgatttctttaaatatgcattgtgtgagtatatgctagatcacaatcttttactttcacaataggttcttgctgtcagtgaccacaatttggtttagttacaatgactatagcatgacctttacgatcatgccctcaagcatccagttttttttaccatatggatatgtgtggatacaatagcagttagttttattgtctatcccaattaagaatggccacaatgtagcatttgattgacatacacctctaatatatcgtacataagcaagaatatgtgaatacagtagcggtttgtttcattacctgaatttatttattaagaatggccataaaaaagggtgtttcgttacctatatatgaacacatactacactatatacaaattcaaaccaagtgtaactctggcatattgtttctaaaaacactaaccgttagttcatgtgatgttcatcctctttgagatttcatcagactgtgtttctaacaatggacaaaaaaggaataactaatgagttcaaacaatactattatgtccttcactaggaaactggtcagtacatagtttgcctctttatatataatataaatttaacaatgcaatttatagcttctttctccgatatatacaagctaaaaaaataagtgttcaactgtgtaggaacagtgagatcaatgattcaatgcctgcacctagatatgacatgtggtgattctgttgactgtactttaaactcaagttgtgaacaactaaactcaaactatgagtaattcattgtaacatataactgttgtcttttttacaatgttcactattgtcttgtgcatgtatcgggtttgttatgctcctagaaccttcgtagcgacagccgccgaacctcgtggcgcaaaaacaattttttttttgaaaaacagagttgggagaagactgtggattgctatagtcctggtcaagggttgatgcctgctagtttcaaagttagatctgtacctttagatggcaatagcgaagcatttgaggaggttcttgacccagattttggagagtcagctattggacgtgtagcacctgttgactctggtctttggtggataattctgttaagggcatatggaaaaattactggagactatgctctacaagaaagggttgatgtgcagacaggcatcaggctaatactgaatttgtgcttgtctgatggatttgacatgtttcctacattgcttgtaactgatggatcatgtatgattgatcggcggatgggaatccatggtcatcctctggagatccaggctctgttctattctgctttacgctgtgcccgagaaatgattggggtaaccgatggatccaagaacttgatccgtgctattaacaacaggctcagtgctctgtcatttcacatcagggagtattattgggttgatatgaagaagataaatgagatttatcgctataagactgaggagtattcccatgatgctattaacaaattcaacatctacccagagcaaattccatcttggcttgcagactggattcctgtgaaaggcggttaccttataggcaatctgcagccagctcacatggatttcaggtttttctccctagggaatctgtgggcgattgtctcatctcttgctactcaaaggcaagcagagggtattctgaaccttattgaagccaaatgggatgacatagtagccaacatgcctcttaaaatatgttaccctgcactagagtatgaggaatggcgtatcatcactggcagtgatcccaaaaacacgccctggtcgtatcataatggtggatcttggcctacattgttatggcagttcaccttggcttgtatcaagatgggtaggcgtgacttggcacggagggcagttgaggtggcagaaaagaggctctcagatgacaagtggccagagtattatgacaccaggacaggaaggttcattgggaagcaatcacggctatatcaaacttggagcattgctggatatcttagctctaagatgttattggactgtccggagatggcatccatactagtatgcgatgaagacttcgagctgctggaaggttgtgcttgcagcttgaataagaatgctcgcaccaaatgctcacgtcgtgcggccaagtcgcaggttcttgtgtagttccatgcctgttcttgacccaaaagctgcaacgctccttcaacttgttgtaattgttcgtcacagaagctggcactagttactagttacttaagcagaatgatcacaaaccacctatgccgatttttttggcgagttcgtggttgatccatttatacaggagtatatgttgttgtctgtacattttatctaatggattttatgtatcctgctggtcaactcaagttgattggtagttttttttatgtaagcagacagcatgtaaatatcaccgctcgttacaagtgtactaaaagaaaagttagagagacataatgacggaatgag

SEQ ID NO: 7385 - DNA, 4703 bp, Zea Mays
ctccctcgctcgctccgcctctccacgctactggatacttccgatgcctgttccgctgtttctcttctcccgtgtcttctcccgtttacctgccgtgtgcgactactaggaggtcgccgccgccgtacgctcagcttctctgcgccggcgacaagcacccaccacaccaggattgtgtttattggatttgagtgtctgattgtgtcagtcaaatttgagttcatcacatccagcccccgcaaccccgtccgtgggcttccccatgcgctgtgtggcactacggtagccgaccctcagcagatcttgcgcggctgtcctcaccagtcgccaacggcctcctcgcccagtcgaccttctcagacagcacccctcgacagcacccaagcaaccgaccgaagtgagcagtgactcagttagattcacagtgtacggaagggagccacttaatacttagtaaaacaccatcaggtaaccactttgtagttcaagtgagctgaatcgcccaaattcaagatagtgtatctctacatgctagtatgatttctttaaatatgcattgtgtgagtatatgctagatcacaatcttttactttcacaataggttcttgctgtcagtgaccacaatttggtttagttacaatgactatagcatgacctttacgatcatgccctcaagcatccagttttttttaccatatggatatgtgtggatacaatagcagttagttttattgtctatcccaattaagaatggccacaatgtagcatttgattgacatacacctctaatatatcgtacataagcaagaatatgtgaatacagtagcggtttgtttcattacctgaatttatttattaagaatggccataaaaaagggtgtttcgttacctatatatgaacacatactacactatatacaaattcaaaccaagtgtaactctggcatattgtttctaaaaacactaaccgttagttcatgtgatgttcatcctctttgagatttcatcagactgtgtttctaacaatggacaaaaaaggaataactaatgagttcaaacaatactattatgtccttcactaggaaactggtcagtacatagtttgcctctttatatataatataaatttaacaatgcaatttatagcttctttctccgatatatacaagctaaaaaaataagtgttcaactgtgtaggaacagtgagatcaatgattcaatgcctgcacctagatatgacatgtggtgattctgttgactgtactttaaactcaagttgtgaacaactaaactcaaactatgagtaattcattgtaacatataactgttgtcttttttacaatgttcactattgtcttgtgcatgtatcgggtttgttatgctcctagaaccttcgtagcgacagccgccgaacctcgtggcgcaaaaacaattttttttttgaaaaacaggtattatgctggtaaaggcttatgtggctgtagacatgttcaactaatatcttttttccgcatatttgtcaatgatccaatttgttattttcaaactttatttaccatgaagattactaattgtatattgttataattcaagtttggttatatcccttcatcatataaaaagtatcctacaatcaaaaattacgcgcgctgggcgcgcgccaaccactagtatcatttaagagaaagcaagttcgatactacaaggactcacaagccacacttttgagggccatttcttctttactagattgaatacttgcactggccagtttaatttaccataaaattcctctatatatttcacttgtatgcatgctgtcgcgatcattctcctttgtctagtgctgtgattttacaaggaagctagacagtagtcgtattaccgtttgcattctcggtttgaggcaaccgaattccctttccaacttaatttccaaagctgcatccaaacctcctttgcaaataggcacaaaaatgcaccgtcgttaatcgctattaatcacacaaaacatacgttggaatttggattgtattgctactttttgtatcttcaagcttgtctgctgtgatatccttgcctgaaccaagagccaagggataatggttttttgaaaagaaaaaaaaattaaatgtgaaagagggcaaaagaaaatttcggccacgtgaaccacatcttccttcgccacatccggagctcatgtttattaactgccacgagcccacaaacgtggcgcgccctgcgccgtacgatgccacagtagcctatattttacactttcccaaaccaaaaactatcctgtctgtcttaatcccgttccaatcgctgttacctgataattaccgcagcgatcgaaacgaaccagcctcaaacccatttccttcccgtgcttccttgttcctcctcatcccaaaattcgcaagcgccgattccaatcaggaaaccggaaacctttcttcctccgcaattcaatccggcgggccccgaagccggcgccaatggcggccgccgccatctctcacctccgccggggcgcgcagcaccacgcagtgctatgcatctcgctgtcgcgccgccgcttctcctcctccgccgtggccgcggcctccccgctcgccgcggccgcgcgccgcctcctctccacgacggcagactccgccaccgcgtccacgtcgggggagcactacaagccgccgcccttcgaccccttccgcgccgccaccctatcgccctctgctccgccgctagagtcggcccggctcgaggatgagcccccgagcagtccgccgccgcaggatgaggcggccgcgtccgtggcggcgcacgagcaggcgacgctggcctgccaggagctggaattggagggcctcaaggcgggggtggaggcggtgaagagcagggaggagtcgccggaggagaaggaggcgtggtggctgctcagccgagcggtcgtcaactactgcggtagcgccgtcgggacggtggccgcgaacgatccgtccaccagccagatgctcaattatgaccaggtgttcattagggacttcgtgccatcggccatcgcgttcctcctcaagggtgagagcgatattgtgaagaacttcctgctccacacgttgcagctccagagttgggagaagactgtggattgctatagtcctggtcaagggttgatgcctgctagtttcaaagttagatctgtacctttagatggcaatagcgaagcatttgaggaggttcttgacccagattttggagagtcagctattggacgtgtagcacctgttgactctggtctttggtggataattctgttaagggcatatggaaaaattactggagactatgctctacaagaaagggttgatgtgcagacaggcatcaggctaatactgaatttgtgcttgtctgatggatttgacatgtttcctacattgcttgtaactgatggatcatgtatgattgatcggcggatgggaatccatggtcatcctctggagatccaggctctgttctattctgctttacgctgtgcccgagaaatgattggggtaaccgatggatccaagaacttgatccgtgctattaacaacaggctcagtgctctgtcatttcacatcagggagtattattgggttgatatgaagaagataaatgagatttatcgctataagactgaggagtattcccatgatgctattaacaaattcaacatctacccagagcaaattccatcttggcttgcagactggattcctgtgaaaggcggttaccttataggcaatctgcagccagctcacatggatttcaggtttttctccctagggaatctgtgggcgattgtctcatctcttgctactcaaaggcaagcagagggtattctgaaccttattgaagccaaatgggatgacatagtagccaacatgcctcttaaaatatgttaccctgcactagagtatgaggaatggcgtatcatcactggcagtgatcccaaaaacacgccctggtcgtatcataatggtggatcttggcctacattgttatggcagttcaccttggcttgtatcaagatgggtaggcgtgacttggcacggagggcagttgaggtggcagaaaagaggctctcagatgacaagtggccagagtattatgacaccaggacaggaaggttcattgggaagcaatcacggctatatcaaacttggagcattgctggatatcttagctctaagatgttattggactgtccggagatggcatccatactagtatgcgatgaagacttcgagctgctggaaggttgtgcttgcagcttgaataagaatgctcgcaccaaatgctcacgtcgtgcggccaagtcgcaggttcttgtgtagttccatgcctgttcttgacccaaaagctgcaacgctccttcaacttgttgtaattgttcgtcacagaagctggcactagttactagttacttaagcagaatgatcacaaaccacctatgccgatttttttggcgagttcgtggttgatccatttatacaggagtatatgttgttgtctgtacattttatctaatggattttatgtatcctgctggtcaactcaagttgattggtagttttttttatgtaagcagacagcatgtaaatatcaccgctcgttacaagtgtactaaaagaaaagttagagagacataatgacggaatgag

SEQ ID NO: 7386 - DNA, 5006 bp, Zea Mays
ctcactccctcgctcgctccgcctctccacgctactggatacttccgatgcctgttccgctgtttctcttctcccgtgtcttctcccgtttacctgccgtgtgcgactactaggaggtcgccgccgccgtacgctcagcttctctgcgccggcgacaagcacccaccacaccaggattgtgtttattggatttgagtgtctgattgtgtcagtcaaatttgagttcatcacatccagcccccgcaaccccgtccgtgggcttccccatgcgctgtgtggcactacggtagccgaccctcagcagatcttgcgcggctgtcctcaccagtcgccaacggcctcctcgcccagtcgaccttctcagacagcacccctcgacagcacccaagcaaccgaccgaagtgagcagtgactcagttaggtaagttcagagataatgtttcattttttctacgaattttatgaatacatgctcctcttatatgaactgcaactatctctaccctagaacagacatcaacatgtacatgactattaaatttcctgttacattgttctacctatattgtaacaaatgtcctttcactgttgtcattatgtcaacttagttaattatatgggcactaatatattttttatttataaatacaccaacaatttacgaggagctgcgcccattcgttttcaaaattctaattgtaatgtccacttcttcagtagattcacagtgtacggaagggagccacttaatacttagtaaaacaccatcaggtaaccactttgtagttcaagtgagctgaatcgcccaaattcaagatagtgtatctctacatgctagtatgatttctttaaatatgcattgtgtgagtatatgctagatcacaatcttttactttcacaataggttcttgctgtcagtgaccacaatttggtttagttacaatgactatagcatgacctttacgatcatgccctcaagcatccagttttttttaccatatggatatgtgtggatacaatagcagttagttttattgtctatcccaattaagaatggccacaatgtagcatttgattgacatacacctctaatatatcgtacataagcaagaatatgtgaatacagtagcggtttgtttcattacctgaatttatttattaagaatggccataaaaaagggtgtttcgttacctatatatgaacacatactacactatatacaaattcaaaccaagtgtaactctggcatattgtttctaaaaacactaaccgttagttcatgtgatgttcatcctctttgagatttcatcagactgtgtttctaacaatggacaaaaaaggaataactaatgagttcaaacaatactattatgtccttcactaggaaactggtcagtacatagtttgcctctttatatataatataaatttaacaatgcaatttatagcttctttctccgatatatacaagctaaaaaaataagtgttcaactgtgtaggaacagtgagatcaatgattcaatgcctgcacctagatatgacatgtggtgattctgttgactgtactttaaactcaagttgtgaacaactaaactcaaactatgagtaattcattgtaacatataactgttgtcttttttacaatgttcactattgtcttgtgcatgtatcgggtttgttatgctcctagaaccttcgtagcgacagccgccgaacctcgtggcgcaaaaacaattttttttttgaaaaacaggtattatgctggtaaaggcttatgtggctgtagacatgttcaactaatatcttttttccgcatatttgtcaatgatccaatttgttattttcaaactttatttaccatgaagattactaattgtatattgttataattcaagtttggttatatcccttcatcatataaaaagtatcctacaatcaaaaattacgcgcgctgggcgcgcgccaaccactagtatcatttaagagaaagcaagttcgatactacaaggactcacaagccacacttttgagggccatttcttctttactagattgaatacttgcactggccagtttaatttaccataaaattcctctatatatttcacttgtatgcatgctgtcgcgatcattctcctttgtctagtgctgtgattttacaaggaagctagacagtagtcgtattaccgtttgcattctcggtttgaggcaaccgaattccctttccaacttaatttccaaagctgcatccaaacctcctttgcaaataggcacaaaaatgcaccgtcgttaatcgctattaatcacacaaaacatacgttggaatttggattgtattgctactttttgtatcttcaagcttgtctgctgtgatatccttgcctgaaccaagagccaagggataatggttttttgaaaagaaaaaaaaattaaatgtgaaagagggcaaaagaaaatttcggccacgtgaaccacatcttccttcgccacatccggagctcatgtttattaactgccacgagcccacaaacgtggcgcgccctgcgccgtacgatgccacagtagcctatattttacactttcccaaaccaaaaactatcctgtctgtcttaatcccgttccaatcgctgttacctgataattaccgcagcgatcgaaacgaaccagcctcaaacccatttccttcccgtgcttccttgttcctcctcatcccaaaattcgcaagcgccgattccaatcaggaaaccggaaacctttcttcctccgcaattcaatccggcgggccccgaagccggcgccaatggcggccgccgccatctctcacctccgccggggcgcgcagcaccacgcagtgctatgcatctcgctgtcgcgccgccgcttctcctcctccgccgtggccgcggcctccccgctcgccgcggccgcgcgccgcctcctctccacgacggcagactccgccaccgcgtccacgtcgggggagcactacaagccgccgcccttcgaccccttccgcgccgccaccctatcgccctctgctccgccgctagagtcggcccggctcgaggatgagcccccgagcagtccgccgccgcaggatgaggcggccgcgtccgtggcggcgcacgagcaggcgacgctggcctgccaggagctggaattggagggcctcaaggcgggggtggaggcggtgaagagcagggaggagtcgccggaggagaaggaggcgtggtggctgctcagccgagcggtcgtcaactactgcggtagcgccgtcgggacggtggccgcgaacgatccgtccaccagccagatgctcaattatgaccaggtgttcattagggacttcgtgccatcggccatcgcgttcctcctcaagggtgagagcgatattgtgaagaacttcctgctccacacgttgcagctccagagttgggagaagactgtggattgctatagtcctggtcaagggttgatgcctgctagtttcaaagttagatctgtacctttagatggcaatagcgaagcatttgaggaggttcttgacccagattttggagagtcagctattggacgtgtagcacctgttgactctggtctttggtggataattctgttaagggcatatggaaaaattactggagactatgctctacaagaaagggttgatgtgcagacaggcatcaggctaatactgaatttgtgcttgtctgatggatttgacatgtttcctacattgcttgtaactgatggatcatgtatgattgatcggcggatgggaatccatggtcatcctctggagatccaggctctgttctattctgctttacgctgtgcccgagaaatgattggggtaaccgatggatccaagaacttgatccgtgctattaacaacaggctcagtgctctgtcatttcacatcagggagtattattgggttgatatgaagaagataaatgagatttatcgctataagactgaggagtattcccatgatgctattaacaaattcaacatctacccagagcaaattccatcttggcttgcagactggattcctgtgaaaggcggttaccttataggcaatctgcagccagctcacatggatttcaggtttttctccctagggaatctgtgggcgattgtctcatctcttgctactcaaaggcaagcagagggtattctgaaccttattgaagccaaatgggatgacatagtagccaacatgcctcttaaaatatgttaccctgcactagagtatgaggaatggcgtatcatcactggcagtgatcccaaaaacacgccctggtcgtatcataatggtggatcttggcctacattgttatggcagttcaccttggcttgtatcaagatgggtaggcgtgacttggcacggagggcagttgaggtggcagaaaagaggctctcagatgacaagtggccagagtattatgacaccaggacaggaaggttcattgggaagcaatcacggctatatcaaacttggagcattgctggatatcttagctctaagatgttattggactgtccggagatggcatccatactagtatgcgatgaagacttcgagctgctggaaggttgtgcttgcagcttgaataagaatgctcgcaccaaatgctcacgtcgtgcggccaagtcgcaggttcttgtgtagttccatgcctgttcttgacccaaaagctgcaacgctccttcaacttgttgtaattgttcgtcacagaagctggcactagttactagttacttaagcagaatgatcacaaaccacctatgccgatttttttggcgagttcgtggttgatccatttatacaggagtatatgttgttgtctgtacattttatctaatggattttatgtatcctgctggtcaactcaagttgattggtagttttttttatgtaagcagacagcatgtaaatatcaccgctcgttacaagtgtactaaaagaaaagttagagagacataatgacggaatgag

SEQ ID NO: 7387 - DNA, 2101 bp, Zea Mays
gtcgtcaaaaaaaaattgggtcgtccgatcgccagtcaaaagatgatgtctcctctcactccctcgctcgctccgcctctccacgctactggatacttccgatgcctgttccgctgtttctcttctcccgtgtcttctcccgtttacctgccgtgtgcgactactaggaggtcgccgccgccgtacgctcagcttctctgcgccggcgacaagcacccaccacaccaggattgtgtttattggatttgagtgtctgattgtgtcagtcaaatttgagttcatcacatccagcccccgcaaccccgtccgtgggcttccccatgcgctgtgtggcactacggtagccgaccctcagcagatcttgcgcggctgtcctcaccagtcgccaacggcctcctcgcccagtcgaccttctcagacagcacccctcgacagcacccaagcaaccgaccgaagtgagcagtgactcagttagattcacagtgtacggaagggagccacttaatacttagtaaaacaccatcagagttgggagaagactgtggattgctatagtcctggtcaagggttgatgcctgctagtttcaaagttagatctgtacctttagatggcaatagcgaagcatttgaggaggttcttgacccagattttggagagtcagctattggacgtgtagcacctgttgactctggtctttggtggataattctgttaagggcatatggaaaaattactggagactatgctctacaagaaagggttgatgtgcagacaggcatcaggctaatactgaatttgtgcttgtctgatggatttgacatgtttcctacattgcttgtaactgatggatcatgtatgattgatcggcggatgggaatccatggtcatcctctggagatccaggctctgttctattctgctttacgctgtgcccgagaaatgattggggtaaccgatggatccaagaacttgatccgtgctattaacaacaggctcagtgctctgtcatttcacatcagggagtattattgggttgatatgaagaagataaatgagatttatcgctataagactgaggagtattcccatgatgctattaacaaattcaacatctacccagagcaaattccatcttggcttgcagactggattcctgtgaaaggcggttaccttataggcaatctgcagccagctcacatggatttcaggtttttctccctagggaatctgtgggcgattgtctcatctcttgctactcaaaggcaagcagagggtattctgaaccttattgaagccaaatgggatgacatagtagccaacatgcctcttaaaatatgttaccctgcactagagtatgaggaatggcgtatcatcactggcagtgatcccaaaaacacgccctggtcgtatcataatggtggatcttggcctacattgttatggcagttcaccttggcttgtatcaagatgggtaggcgtgacttggcacggagggcagttgaggtggcagaaaagaggctctcagatgacaagtggccagagtattatgacaccaggacaggaaggttcattgggaagcaatcacggctatatcaaacttggagcattgctggatatcttagctctaagatgttattggactgtccggagatggcatccatactagtatgcgatgaagacttcgagctgctggaaggttgtgcttgcagcttgaataagaatgctcgcaccaaatgctcacgtcgtgcggccaagtcgcaggttcttgtgtagttccatgcctgttcttgacccaaaagctgcaacgctccttcaacttgttgtaattgttcgtcacagaagctggcactagttactagttacttaagcagaatgatcacaaaccacctatgccgatttttttggcgagttcgtggttgatccatttatacaggagtatatgttgttgtctgtacattttatctaatggattttatgtatcctgctggtcaactcaagttgattggtagttttttttatgtaagcagacagcatgtaaatatcaccgctcgttacaagtgtactaaaagaaaagttagagagacataatgacggaatgag

SEQ ID NO: 7388 - DNA, 5606 bp, Zea Mays
cggacacggattgagtggatacgacgagtcacgagtgtattcaaataaattcaacttttttgaaagttcacaggagcattatatttcttatatattaaagccggacagaaacgtgaacgacgagggcatccacgtcgtcaaaaaaaaattgggtcgtccgatcgccagtcaaaagatgatgtctcctctcactccctcgctcgctccgcctctccacgctactggatacttccgatgcctgttccgctgtttctcttctcccgtgtcttctcccgtttacctgccgtgtgcgactactaggaggtcgccgccgccgtacgctcagcttctctgcgccggcgacaagcacccaccacaccaggattgtgtttattggatttgagtgtctgattgtgtcagtcaaatttgagttcatcacatccagcccccgcaaccccgtccgtgggcttccccatgcgctgtgtggcactacggtagccgaccctcagcagatcttgcgcggctgtcctcaccagtcgccaacggcctcctcgcccagtcgaccttctcagacagcacccctcgacagcacccaagcaaccgaccgaagtgagcagtgactcagttaggtaagttcagagataatgtttcattttttctacgaattttatgaatacatgctcctcttatatgaactgcaactatctctaccctagaacagacatcaacatgtacatgactattaaatttcctgttacattgttctacctatattgtaacaaatgtcctttcactgttgtcattatgtcaacttagttaattatatgggcactaatatattttttatttataaatacaccaacaatttacgaggagctgcgcccattcgttttcaaaattctaattgtaatgtccacttcttcagtaggtaagttcagaaataatgtttcattttttctacgaattttatgaatacatgctcctcttatatgaactgccactatctctaccctagaacagacatcaacatgtacatgactattaaatttcctattacattgttctacctatattgtagcatatgtcctttcactgttgatttgttcgcttcacacaaaaaatagtgaacgtcgattccagcccaaactttcgtttggtccacccagtcttgctgtagacactgtagttaaaatgctctaccaactttattcaggtctcttattcctagacctgcaatctcctttgccatggtcgatttcaataatttaaaacatgttgataatgagtgccatatatattcttagcgactcttgatcaagttcatatatgaatgaatcacagattcacagtgtacggaagggagccacttaatacttagtaaaacaccatcaggtaaccactttgtagttcaagtgagctgaatcgcccaaattcaagatagtgtatctctacatgctagtatgatttctttaaatatgcattgtgtgagtatatgctagatcacaatcttttactttcacaataggttcttgctgtcagtgaccacaatttggtttagttacaatgactatagcatgacctttacgatcatgccctcaagcatccagttttttttaccatatggatatgtgtggatacaatagcagttagttttattgtctatcccaattaagaatggccacaatgtagcatttgattgacatacacctctaatatatcgtacataagcaagaatatgtgaatacagtagcggtttgtttcattacctgaatttatttattaagaatggccataaaaaagggtgtttcgttacctatatatgaacacatactacactatatacaaattcaaaccaagtgtaactctggcatattgtttctaaaaacactaaccgttagttcatgtgatgttcatcctctttgagatttcatcagactgtgtttctaacaatggacaaaaaaggaataactaatgagttcaaacaatactattatgtccttcactaggaaactggtcagtacatagtttgcctctttatatataatataaatttaacaatgcaatttatagcttctttctccgatatatacaagctaaaaaaataagtgttcaactgtgtaggaacagtgagatcaatgattcaatgcctgcacctagatatgacatgtggtgattctgttgactgtactttaaactcaagttgtgaacaactaaactcaaactatgagtaattcattgtaacatataactgttgtcttttttacaatgttcactattgtcttgtgcatgtatcgggtttgttatgctcctagaaccttcgtagcgacagccgccgaacctcgtggcgcaaaaacaattttttttttgaaaaacaggtattatgctggtaaaggcttatgtggctgtagacatgttcaactaatatcttttttccgcatatttgtcaatgatccaatttgttattttcaaactttatttaccatgaagattactaattgtatattgttataattcaagtttggttatatcccttcatcatataaaaagtatcctacaatcaaaaattacgcgcgctgggcgcgcgccaaccactagtatcatttaagagaaagcaagttcgatactacaaggactcacaagccacacttttgagggccatttcttctttactagattgaatacttgcactggccagtttaatttaccataaaattcctctatatatttcacttgtatgcatgctgtcgcgatcattctcctttgtctagtgctgtgattttacaaggaagctagacagtagtcgtattaccgtttgcattctcggtttgaggcaaccgaattccctttccaacttaatttccaaagctgcatccaaacctcctttgcaaataggcacaaaaatgcaccgtcgttaatcgctattaatcacacaaaacatacgttggaatttggattgtattgctactttttgtatcttcaagcttgtctgctgtgatatccttgcctgaaccaagagccaagggataatggttttttgaaaagaaaaaaaaattaaatgtgaaagagggcaaaagaaaatttcggccacgtgaaccacatcttccttcgccacatccggagctcatgtttattaactgccacgagcccacaaacgtggcgcgccctgcgccgtacgatgccacagtagcctatattttacactttcccaaaccaaaaactatcctgtctgtcttaatcccgttccaatcgctgttacctgataattaccgcagcgatcgaaacgaaccagcctcaaacccatttccttcccgtgcttccttgttcctcctcatcccaaaattcgcaagcgccgattccaatcaggaaaccggaaacctttcttcctccgcaattcaatccggcgggccccgaagccggcgccaatggcggccgccgccatctctcacctccgccggggcgcgcagcaccacgcagtgctatgcatctcgctgtcgcgccgccgcttctcctcctccgccgtggccgcggcctccccgctcgccgcggccgcgcgccgcctcctctccacgacggcagactccgccaccgcgtccacgtcgggggagcactacaagccgccgcccttcgaccccttccgcgccgccaccctatcgccctctgctccgccgctagagtcggcccggctcgaggatgagcccccgagcagtccgccgccgcaggatgaggcggccgcgtccgtggcggcgcacgagcaggcgacgctggcctgccaggagctggaattggagggcctcaaggcgggggtggaggcggtgaagagcagggaggagtcgccggaggagaaggaggcgtggtggctgctcagccgagcggtcgtcaactactgcggtagcgccgtcgggacggtggccgcgaacgatccgtccaccagccagatgctcaattatgaccaggtgttcattagggacttcgtgccatcggccatcgcgttcctcctcaagggtgagagcgatattgtgaagaacttcctgctccacacgttgcagctccagagttgggagaagactgtggattgctatagtcctggtcaagggttgatgcctgctagtttcaaagttagatctgtacctttagatggcaatagcgaagcatttgaggaggttcttgacccagattttggagagtcagctattggacgtgtagcacctgttgactctggtctttggtggataattctgttaagggcatatggaaaaattactggagactatgctctacaagaaagggttgatgtgcagacaggcatcaggctaatactgaatttgtgcttgtctgatggatttgacatgtttcctacattgcttgtaactgatggatcatgtatgattgatcggcggatgggaatccatggtcatcctctggagatccaggctctgttctattctgctttacgctgtgcccgagaaatgattggggtaaccgatggatccaagaacttgatccgtgctattaacaacaggctcagtgctctgtcatttcacatcagggagtattattgggttgatatgaagaagataaatgagatttatcgctataagactgaggagtattcccatgatgctattaacaaattcaacatctacccagagcaaattccatcttggcttgcagactggattcctgtgaaaggcggttaccttataggcaatctgcagccagctcacatggatttcaggtttttctccctagggaatctgtgggcgattgtctcatctcttgctactcaaaggcaagcagagggtattctgaaccttattgaagccaaatgggatgacatagtagccaacatgcctcttaaaatatgttaccctgcactagagtatgaggaatggcgtatcatcactggcagtgatcccaaaaacacgccctggtcgtatcataatggtggatcttggcctacattgttatggcagttcaccttggcttgtatcaagatgggtaggcgtgacttggcacggagggcagttgaggtggcagaaaagaggctctcagatgacaagtggccagagtattatgacaccaggacaggaaggttcattgggaagcaatcacggctatatcaaacttggagcattgctggatatcttagctctaagatgttattggactgtccggagatggcatccatactagtatgcgatgaagacttcgagctgctggaaggttgtgcttgcagcttgaataagaatgctcgcaccaaatgctcacgtcgtgcggccaagtcgcaggttcttgtgtagttccatgcctgttcttgacccaaaagctgcaacgctccttcaacttgttgtaattgttcgtcacagaagctggcactagttactagttacttaagcagaatgatcacaaaccacctatgccgatttttttggcgagttcgtggttgatccatttatacaggagtatatgttgttgtctgtacattttatctaatggattttatgtatcctgctggtcaactcaagttgattggtagttttttttatgtaagcagacagcatgtaaatatcaccgctcgttacaagtgtactaaaagaaaagttagagagacataatgacggaatgag

SEQ ID NO: 7389 - DNA, 3954 bp, Zea Mays
acgctactggatacttccgatgcctgttccgctgtttctcttctcccgtgtcttctcccgtttacctgccgtgtgcgactactaggaggtcgccgccgccgtacgctcagcttctctgcgccggcgacaagcacccaccacaccaggattgtgtttattggatttgagtgtctgattgtgtcagtcaaatttgagttcatcacatccagcccccgcaaccccgtccgtgggcttccccatgcgctgtgtggcactacggtagccgaccctcagcagatcttgcgcggctgtcctcaccagtcgccaacggcctcctcgcccagtcgaccttctcagacagcacccctcgacagcacccaagcaaccgaccgaagtgagcagtgactcagttaggtaagttcagagataatgtttcattttttctacgaattttatgaatacatgctcctcttatatgaactgcaactatctctaccctagaacagacatcaacatgtacatgactattaaatttcctgttacattgttctacctatattgtaacaaatgtcctttcactgttgtcattatgtcaacttagttaattatatgggcactaatatattttttatttataaatacaccaacaatttacgaggagctgcgcccattcgttttcaaaattctaattgtaatgtccacttcttcagtaggtaagttcagaaataatgtttcattttttctacgaattttatgaatacatgctcctcttatatgaactgccactatctctaccctagaacagacatcaacatgtacatgactattaaatttcctattacattgttctacctatattgtagcatatgtcctttcactgttgatttgttcgcttcacacaaaaaatagtgaacgtcgattccagcccaaactttcgtttggtccacccagtcttgctgtagacactgtagttaaaatgctctaccaactttattcaggtctcttattcctagacctgcaatctcctttgccatggtcgatttcaataatttaaaacatgttgataatgagtgccatatatattcttagcgactcttgatcaagttcatatatgaatgaatcacagattcacagtgtacggaagggagccacttaatacttagtaaaacaccatcaggtaaccactttgtagttcaagtgagctgaatcgcccaaattcaagatagtgtatctctacatgctagtatgatttctttaaatatgcattgtgtgagtatatgctagatcacaatcttttactttcacaataggttcttgctgtcagtgaccacaatttggtttagttacaatgactatagcatgacctttacgatcatgccctcaagcatccagttttttttaccatatggatatgtgtggatacaatagcagttagttttattgtctatcccaattaagaatggccacaatgtagcatttgattgacatacacctctaatatatcgtacataagcaagaatatgtgaatacagtagcggtttgtttcattacctgaatttatttattaagaatggccataaaaaagggtgtttcgttacctatatatgaacacatactacactatatacaaattcaaaccaagtgtaactctggcatattgtttctaaaaacactaaccgttagttcatgtgatgttcatcctctttgagatttcatcagactgtgtttctaacaatggacaaaaaaggaataactaatgagttcaaacaatactattatgtccttcactaggaaactggtcagtacatagtttgcctctttatatataatataaatttaacaatgcaatttatagcttctttctccgatatatacaagctaaaaaaataagtgttcaactgtgtaggaacagtgagatcaatgattcaatgcctgcacctagatatgacatgtggtgattctgttgactgtactttaaactcaagttgtgaacaactaaactcaaactatgagtaattcattgtaacatataactgttgtcttttttacaatgttcactattgtcttgtgcatgtatcgggtttgttatgctcctagaaccttcgtagcgacagccgccgaacctcgtggcgcaaaaacaattttttttttgaaaaacaggtattatgctggtaaaggcttatgtggctgtagacatgttcaactaatatcttttttccgcatatttgtcaatgatccaatttgttattttcaaactttatttaccatgaagattactaattgtatattgttataattcaagtttggttatatcccttcatcatataaaaagtatcctacaatcaaaaattacgcgcgctgggcgcgcgccaaccactagtatcatttaagagaaagcaagttcgatactacaaggactcacaagccacacttttgagggccatttcttctttactagattgaatacttgcactggccagtttaatttaccataaaattcctctatatatttcacttgtatgcatgctgtcgcgatcattctcctttgtctagtgctgtgattttacaaggaagctagacagtagtcgtattaccgtttgcattctcggtttgaggcaaccgaattccctttccaacttaatttccaaagctgcatccaaacctcctttgcaaataggcacaaaaatgcaccgtcgttaatcgctattaatcacacaaaacatacgttggaatttggattgtattgctactttttgtatcttcaagcttgtctgctgtgatatccttgcctgaaccaagagccaagggataatggttttttgaaaagaaaaaaaaattaaatgtgaaagagggcaaaagaaaatttcggccacgtgaaccacatcttccttcgccacatccggagctcatgtttattaactgccacgagcccacaaacgtggcgcgccctgcgccgtacgatgccacagtagcctatattttacactttcccaaaccaaaaactatcctgtctgtcttaatcccgttccaatcgctgttacctgataattaccgcagcgatcgaaacgaaccagcctcaaacccatttccttcccgtgcttccttgttcctcctcatcccaaaattcgcaagcgccgattccaatcaggaaaccggaaacctttcttcctccgcaattcaatccggcgggccccgaagccggcgccaatggcggccgccgccatctctcacctccgccggggcgcgcagcaccacgcagtgctatgcatctcgctgtcgcgccgccgcttctcctcctccgccgtggccgcggcctccccgctcgccgcggccgcgcgccgcctcctctccacgacggcagactccgccaccgcgtccacgtcgggggagcactacaagccgccgcccttcgaccccttccgcgccgccaccctatcgccctctgctccgccgctagagtcggcccggctcgaggatgagcccccgagcagtccgccgccgcaggatgaggcggccgcgtccgtggcggcgcacgagcaggcgacgctggcctgccaggagctggaattggagggcctcaaggcgggggtggaggcggtgaagagcagggaggagtcgccggaggagaaggaggcgtggtggctgctcagccgagcggtcgtcaactactgcggtagcgccgtcgggacggtggccgcgaacgatccgtccaccagccagatgctcaattatgaccaggtgttcattagggacttcgtgccatcggccatcgcgttcctcctcaagggtgagagcgatattgtgaagaacttcctgctccacacgttgcagctccagtccagcaatactgaaaactgctcaagtgccatttctgtcagaagagggatgcattgatcatagtgaccaatgaccattccagcagctgccaggaggattcaaatgctgagccaaaatcacataaaaaaacaggggtac

SEQ ID NO: 7390 - DNA, 1128 bp, Zea Mays
gagtggttcgccctcgccgactcaagtaagatggtgatggaccgcatcacgggtactaacaccaccagttttatcatcaagtttgtgctttcatgcgtcgatctctagtagaaaactcagatagtgagcctgacttcgaagagaccgaacaaaaaacaataaatgagccacatgtcaatgttagaagtgaacctcttacaacacgtcgttgtgcccttcaaccgtggatggatggtagcagtagcagcaacagtactgttgacctcccagatggtgtacctccagctccttcgagaagcaagaatgacaggctttctaaagaggaaatgattgcaacgatggatgaagttgttcagggacgcaagatgcaagtggaaaaagccactaaagagagtgaagattgagagaaatcttctctcaccttttcaataaatatttggcatgtttctgttttcaagagtcatcaactatgtttgatttttgcaggcggaagctataagaaaaatattgggcatggactctgacaagaagaaagaagagaggaacaaaaattaacattttcctttcctattttttctctgttttaaataggtctgaagtccattgcaagtaaaatatgcctatatggagttggaaagattggagcacaaactcttttttgaaatgctctcccaaaaagaggacacatgctgaaatgatgaatttgttttcaaaatatgggagtataaaggatttgcagattttgagaggttctcagcgaatgagcaaagttaaatcatcttggttcatattaggaacggagcatcaccgtaatcacttttagcttcctctttctaacttgcttatcaactatggatgttgcagctggttgtgcctttctaaaataagaaacaaaagagcaagctatggctgttatagaagctttaaatggaacacacaaaatagaggtttgtataaataaaagattcaaaaagaatctttttcttaatgatggtattatttgccttctcataaaacatattacatacccctaccactcctaacaggattatgtagctcaatgatatatgaattgtaaaccctagtatttgattcttgggacttgagtcactcaagaaataataatag

SEQ ID NO: 7391 - DNA, 1973 bp, Zea Mays
cccctctctcccaaccaaccacgctcctcgcatgtgtcaaaccaaaacctgtagtgtagggagaaaccatggagttggcggcgtcacgtccaagtatgcctacatcggaggcccaattcccgagcaggcactaccatcaccgtcgcagagagagagccctttgctcccaccgccggcttaagcgactgctagcatggtctgctgcaaggagcaccagaggatctacactgagtggttcgccctcgccgactcaagtaagatggtgatggaccgcatcacgggtactaacaccaccagttttatcatcaagtttgtgctttcatgcgtcgatctctagtaggtgagcgtggggccactggtctcctcctactcctctcctggtttgggtgatatcatctaggattatcgttgacgaaaggatagtgatatttccctgattagggatttgcgtgaggaggtgtgggcgatagcggattccaagctgcaggcgtacctcagattcgttgagtttttcatagcaatgtagatccgtcccaatcatatgcattagacatagcatgtgcatctgacaatcaaacatgaggttaaacttttggtttggtggactgacgatctaacacgatcgatatacaaaatgcatctcatgtctctggcccaagcagggaacgagatcacacaagacagcctaaaacatgaaggtagttggttgtgagctaaactttaccttccttttccccttctatgagttcatttgggcatggatgtttgaactcaattgtttatggtgcttcatgtagacctcaacaccttagatttgcctgtgatggaaggtgtcaatgagcttctggctataagtctaaaatcttcagattttgtgtcattcaaatgtatttgcccctttaaacacaatactatgatggattgttgcgacattatgatgtattgtttctttctagaaaactcagatagtgagcctgacttcgaagagaccgaacaaaaaacaataaatgagccacatgtcaatgttagaagtgaacctcttacaacacgtcgttgtgcccttcaaccgtggatggatggtagcagtagcagcaacagtactgttgacctcccagatggtgtacctccagctccttcgagaagcaagaatgacaggctttctaaagaggaaatgattgcaacgatggatgaagttgttcagggacgcaagatgcaagtggaaaaagccactaaagagagtgaagattgagagaaatcttctctcaccttttcaataaatatttggcatgtttctgttttcaagagtcatcaactatgtttgatttttgcaggcggaagctataagaaaaatattgggcatggactctgacaagaagaaagaagagaggaacaaaaattaacattttcctttcctattttttctctgttttaaataggtctgaagtccattgcaagtaaaatatgcctatatggagttggaaagattggagcacaaactcttttttgaaatgctctcccaaaaagaggacacatgctgaaatgatgaatttgttttcaaaatatgggagtataaaggatttgcagattttgagaggttctcagcgaatgagcaaagttaaatcatcttggttcatattaggaacggagcatcaccgtaatcacttttagcttcctctttctaacttgcttatcaactatggatgttgcagctggttgtgcctttctaaaataagaaacaaaagagcaagctatggctgttatagaagctttaaatggaacacacaaaatagaggtttgtataaataaaagattcaaaaagaatctttttcttaatgatggtattatttgccttctcataaaacatattacatacccctaccactcctaacaggattatgtagctcaatgatatatgaattgtaaaccctagtatttgattcttgggacttgagtcactcaagaaataataatag

SEQ ID NO: 7392 - DNA, 1360 bp, Zea Mays
ctctcccctctctcccaaccaaccacgctcctcgcatgtgtcaaaccaaaacctgtagtgtagggagaaaccatggagttggcggcgtcacgtccaagtatgcctacatcggaggcccaattcccgagcaggcactaccatcaccgtcgcagagagagagccctttgctcccaccgccggcttaagcgactgctagcatggtctgctgcaaggagcaccagaggatctacactgagtggttcgccctcgccgactcaagggctctatgcagatggtgatggaccgcatcacgggtactaacaccaccagttttatcatcaagtttgtgctttcatgcgtcgatctctagtagatagtgagcctgacttcgaagagaccgaacaaaaaacaataaatgagccacatgtcaatgttagaagtgaacctcttacaacacgtcgttgtgcccttcaaccgtggatggatggtagcagtagcagcaacagtactgttgacctcccagatggtgtacctccagctccttcgagaagcaagaatgacaggctttctaaagaggaaatgattgcaacgatggatgaagttgttcagggacgcaagatgcaagtggaaaaagccactaaagagagtgaagattgagagaaatcttctctcaccttttcaataaatatttggcatgtttctgttttcaagagtcatcaactatgtttgatttttgcaggcggaagctataagaaaaatattgggcatggactctgacaagaagaaagaagagaggaacaaaaattaacattttcctttcctattttttctctgttttaaataggtctgaagtccattgcaagtaaaatatgcctatatggagttggaaagattggagcacaaactcttttttgaaatgctctcccaaaaagaggacacatgctgaaatgatgaatttgttttcaaaatatgggagtataaaggatttgcagattttgagaggttctcagcgaatgagcaaagttaaatcatcttggttcatattaggaacggagcatcaccgtaatcacttttagcttcctctttctaacttgcttatcaactatggatgttgcagctggttgtgcctttctaaaataagaaacaaaagagcaagctatggctgttatagaagctttaaatggaacacacaaaatagaggtttgtataaataaaagattcaaaaagaatctttttcttaatgatggtattatttgccttctcataaaacatattacatacccctaccactcctaacaggattatgtagctcaatgatatatgaattgtaaaccctagtatttgattcttgggacttgagtcactcaagaaataataatag

SEQ ID NO: 7393 - DNA, 1372 bp, Zea Mays
cctctctcccctctctcccaaccaaccacgctcctcgcatgtgtcaaaccaaaacctgtagtgtagggagaaaccatggagttggcggcgtcacgtccaagtatgcctacatcggaggcccaattcccgagcaggcactaccatcaccgtcgcagagagagagccctttgctcccaccgccggcttaagcgactgctagcatggtctgctgcaaggagcaccagaggatctacactgagtggttcgccctcgccgactcaagggctctatgcagatggtgatggaccgcatcacgggtactaacaccaccagttttatcatcaagtttgtgctttcatgcgtcgatctctagtagaaaactcagatagtgagcctgacttcgaagagaccgaacaaaaaacaataaatgagccacatgtcaatgttagaagtgaacctcttacaacacgtcgttgtgcccttcaaccgtggatggatggtagcagtagcagcaacagtactgttgacctcccagatggtgtacctccagctccttcgagaagcaagaatgacaggctttctaaagaggaaatgattgcaacgatggatgaagttgttcagggacgcaagatgcaagtggaaaaagccactaaagagagtgaagattgagagaaatcttctctcaccttttcaataaatatttggcatgtttctgttttcaagagtcatcaactatgtttgatttttgcaggcggaagctataagaaaaatattgggcatggactctgacaagaagaaagaagagaggaacaaaaattaacattttcctttcctattttttctctgttttaaataggtctgaagtccattgcaagtaaaatatgcctatatggagttggaaagattggagcacaaactcttttttgaaatgctctcccaaaaagaggacacatgctgaaatgatgaatttgttttcaaaatatgggagtataaaggatttgcagattttgagaggttctcagcgaatgagcaaagttaaatcatcttggttcatattaggaacggagcatcaccgtaatcacttttagcttcctctttctaacttgcttatcaactatggatgttgcagctggttgtgcctttctaaaataagaaacaaaagagcaagctatggctgttatagaagctttaaatggaacacacaaaatagaggtttgtataaataaaagattcaaaaagaatctttttcttaatgatggtattatttgccttctcataaaacatattacatacccctaccactcctaacaggattatgtagctcaatgatatatgaattgtaaaccctagtatttgattcttgggacttgagtcactcaagaaataataatag

SEQ ID NO: 7394 - DNA, 1892 bp, Zea Mays
cctctctcccctctctcccaaccaaccacgctcctcgcatgtgtcaaaccaaaacctgtagtgtagggagaaaccatggagttggcggcgtcacgtccaagtatgcctacatcggaggcccaattcccgagcaggcactaccatcaccgtcgcagagagagagccctttgctcccaccgccggcttaagcgactgctagcatggtctgctgcaaggagcaccagaggatctacactgagtggttcgccctcgccgactcaagtaaggggctctatgcagatggtgatggaccgcatcacgggtactaacaccaccagttttatcatcaagtttgtgctttcatgcgtcgatctctagtagggatttgcgtgaggaggtgtgggcgatagcggattccaagctgcaggcgtacctcagattcgttgagtttttcatagcaatgtagatccgtcccaatcatatgcattagacatagcatgtgcatctgacaatcaaacatgaggttaaacttttggtttggtggactgacgatctaacacgatcgatatacaaaatgcatctcatgtctctggcccaagcagggaacgagatcacacaagacagcctaaaacatgaaggtagttggttgtgagctaaactttaccttccttttccccttctatgagttcatttgggcatggatgtttgaactcaattgtttatggtgcttcatgtagacctcaacaccttagatttgcctgtgatggaaggtgtcaatgagcttctggctataagtctaaaatcttcagattttgtgtcattcaaatgtatttgcccctttaaacacaatactatgatggattgttgcgacattatgatgtattgtttctttctagaaaactcagatagtgagcctgacttcgaagagaccgaacaaaaaacaataaatgagccacatgtcaatgttagaagtgaacctcttacaacacgtcgttgtgcccttcaaccgtggatggatggtagcagtagcagcaacagtactgttgacctcccagatggtgtacctccagctccttcgagaagcaagaatgacaggctttctaaagaggaaatgattgcaacgatggatgaagttgttcagggacgcaagatgcaagtggaaaaagccactaaagagagtgaagattgagagaaatcttctctcaccttttcaataaatatttggcatgtttctgttttcaagagtcatcaactatgtttgatttttgcaggcggaagctataagaaaaatattgggcatggactctgacaagaagaaagaagagaggaacaaaaattaacattttcctttcctattttttctctgttttaaataggtctgaagtccattgcaagtaaaatatgcctatatggagttggaaagattggagcacaaactcttttttgaaatgctctcccaaaaagaggacacatgctgaaatgatgaatttgttttcaaaatatgggagtataaaggatttgcagattttgagaggttctcagcgaatgagcaaagttaaatcatcttggttcatattaggaacggagcatcaccgtaatcacttttagcttcctctttctaacttgcttatcaactatggatgttgcagctggttgtgcctttctaaaataagaaacaaaagagcaagctatggctgttatagaagctttaaatggaacacacaaaatagaggtttgtataaataaaagattcaaaaagaatctttttcttaatgatggtattatttgccttctcataaaacatattacatacccctaccactcctaacaggattatgtagctcaatgatatatgaattgtaaaccctagtatttgattcttgggacttgagtcactcaagaaataataatag

SEQ ID NO: 7395 - DNA, 1929 bp, Zea Mays
caaaacccttcctttaacctcccctctctcctcattgtgccccctctctcccctctctcccaaccaaccacgctcctcgcatgtgtcaaaccaaaacctgtagtgtagggagaaaccatggagttggcggcgtcacgtccaagtatgcctacatcggaggcccaattcccgagcaggcactaccatcaccgtcgcagagagagagccctttgctcccaccgccggcttaagcgactgctagcatggtctgctgcaaggagcaccagaggatctacactgagtggttcgccctcgccgactcaagggctctatgcagatggtgatggaccgcatcacgggtactaacaccaccagttttatcatcaagtttgtgctttcatgcgtcgatctctagtagggatttgcgtgaggaggtgtgggcgatagcggattccaagctgcaggcgtacctcagattcgttgagtttttcatagcaatgtagatccgtcccaatcatatgcattagacatagcatgtgcatctgacaatcaaacatgaggttaaacttttggtttggtggactgacgatctaacacgatcgatatacaaaatgcatctcatgtctctggcccaagcagggaacgagatcacacaagacagcctaaaacatgaaggtagttggttgtgagctaaactttaccttccttttccccttctatgagttcatttgggcatggatgtttgaactcaattgtttatggtgcttcatgtagacctcaacaccttagatttgcctgtgatggaaggtgtcaatgagcttctggctataagtctaaaatcttcagattttgtgtcattcaaatgtatttgcccctttaaacacaatactatgatggattgttgcgacattatgatgtattgtttctttctagaaaactcagatagtgagcctgacttcgaagagaccgaacaaaaaacaataaatgagccacatgtcaatgttagaagtgaacctcttacaacacgtcgttgtgcccttcaaccgtggatggatggtagcagtagcagcaacagtactgttgacctcccagatggtgtacctccagctccttcgagaagcaagaatgacaggctttctaaagaggaaatgattgcaacgatggatgaagttgttcagggacgcaagatgcaagtggaaaaagccactaaagagagtgaagattgagagaaatcttctctcaccttttcaataaatatttggcatgtttctgttttcaagagtcatcaactatgtttgatttttgcaggcggaagctataagaaaaatattgggcatggactctgacaagaagaaagaagagaggaacaaaaattaacattttcctttcctattttttctctgttttaaataggtctgaagtccattgcaagtaaaatatgcctatatggagttggaaagattggagcacaaactcttttttgaaatgctctcccaaaaagaggacacatgctgaaatgatgaatttgttttcaaaatatgggagtataaaggatttgcagattttgagaggttctcagcgaatgagcaaagttaaatcatcttggttcatattaggaacggagcatcaccgtaatcacttttagcttcctctttctaacttgcttatcaactatggatgttgcagctggttgtgcctttctaaaataagaaacaaaagagcaagctatggctgttatagaagctttaaatggaacacacaaaatagaggtttgtataaataaaagattcaaaaagaatctttttcttaatgatggtattatttgccttctcataaaacatattacatacccctaccactcctaacaggattatgtagctcaatgatatatgaattgtaaaccctagtatttgattcttgggacttgagtcactcaagaaataataatag

SEQ ID NO: 7396 - DNA, 1924 bp, Zea Mays
caaaacccttcctttaacctcccctctctcctcattgtgccccctctctcccctctctcccaaccaaccacgctcctcgcatgtgtcaaaccaaaacctgtagtgtagggagaaaccatggagttggcggcgtcacgtccaagtatgcctacatcggaggcccaattcccgagcaggcactaccatcaccgtcgcagagagagagccctttgctcccaccgccggcttaagcgactgctagcatggtctgctgcaaggagcaccagaggatctacactgagtggttcgccctcgccgactcaagggctctatgcagatggtgatggaccgcatcacgggtactaacaccaccagttttatcatcaagtttgtgctttcatgcgtcgatctctagtagggatttgcgtgaggaggtgtgggcgatagcggattccaagctgcaggcgtacctcagattcgttgagtttttcatagcaatgtagatccgtcccaatcatatgcattagacatagcatgtgcatctgacaatcaaacatgaggttaaacttttggtttggtggactgacgatctaacacgatcgatatacaaaatgcatctcatgtctctggcccaagcagggaacgagatcacacaagacagcctaaaacatgaaggtagttggttgtgagctaaactttaccttccttttccccttctatgagttcatttgggcatggatgtttgaactcaattgtttatggtgcttcatgtagacctcaacaccttagatttgcctgtgatggaaggtgtcaatgagcttctggctataagtctaaaatcttcagattttgtgtcattcaaatgtatttgcccctttaaacacaatactatgatggattgttgcgacattatgatgtattgtttctttctagaaaactcagatagtgagcctgacttcgaagagaccgaacaaaaaacaataaatgagccacatgtcaatgttagaagtgaacctcttacaacacgtcgttgtgcccttcaaccgtggatggatggtagcagtagcagcaacagtactgttgacctcccagatggtgtacctccagctccttcgagaaaatgacaggctttctaaagaggaaatgattgcaacgatggatgaagttgttcagggacgcaagatgcaagtggaaaaagccactaaagagagtgaagattgagagaaatcttctctcaccttttcaataaatatttggcatgtttctgttttcaagagtcatcaactatgtttgatttttgcaggcggaagctataagaaaaatattgggcatggactctgacaagaagaaagaagagaggaacaaaaattaacattttcctttcctattttttctctgttttaaataggtctgaagtccattgcaagtaaaatatgcctatatggagttggaaagattggagcacaaactcttttttgaaatgctctcccaaaaagaggacacatgctgaaatgatgaatttgttttcaaaatatgggagtataaaggatttgcagattttgagaggttctcagcgaatgagcaaagttaaatcatcttggttcatattaggaacggagcatcaccgtaatcacttttagcttcctctttctaacttgcttatcaactatggatgttgcagctggttgtgcctttctaaaataagaaacaaaagagcaagctatggctgttatagaagctttaaatggaacacacaaaatagaggtttgtataaataaaagattcaaaaagaatctttttcttaatgatggtattatttgccttctcataaaacatattacatacccctaccactcctaacaggattatgtagctcaatgatatatgaattgtaaaccctagtatttgattcttgggacttgagtcactcaagaaataataatag

SEQ ID NO: 7397 - DNA, 1618 bp, Zea Mays
gggcactcgtggtggcacgtgcacgttcatgctaatatatggaaacagataggctagctgctaggtaggaaaccatcccagctaaccagagccgcctacgctgatgagtgagaaagagatcgagcgagatagtactttttagtggttattaagcatcattcgttcccggccgtagtatatgcagcttgccatcacatatacacattacacactctcatgtctgaagcgcactggcaagagctgccgcctccggtggctgaactacctccggcccgacctccggcgcggcaacatcacgccgcaggagcagctgatgatcctggagctgcactcgcgctggggcaaccgctggtccaagatcgcgcagcacctccccgggcgcaccgacaacgagatcaagaactactggcgcacgcgcgtgcagaagcacgccaagcagctcaaatgcgacgtcaacagccagcagttcaaggacgtgatgcgctacctctggatgccccgcctcgtcgagcgcatccaggccgccgcagccaacaataacgccagcggcgccggggttccgccagctggcgccgccgcggacgacacgccgctctcgtcgtcgtggcagcacggcggcggcgccgacgacgacggcggcctctacgcgtcgccggagctgcccacggacgcctgctggcctcccgcagactgctactactacccagccgccgctgaccaccagctactgaacaaccccgccgccgccgccgtcttcccggacctgtcaagcaccacggccgggtcgtcctctccgtcctcggattccggcgcggggacagcacaaccctggcccgcgccgctgggtggcgcagagtggttgaccaccggcgcctgctgcgacgcctccagcgccgccgccgccctgggcgggcagcagcaacaatcgtgcctggtcggggagacgtcgtgggcgtcatccgagctccccgagctgggcgtcgcggacttcgagatcggcagcttcgacgtggagagcatctggagcatggacgacagcctgtggttcacgcaggcgcagggcgtgtgaatccaagccaccaacacacgcggcgcgcgggcacggaaatcgatccacgttacggcatcatatatcggcggtggacatgcacccgcgtccatcggacacaagcagtacgtcagccgccgagggcgcctagctagctagcagaggagcagagcctgctgaagacacggggtagaagaaggagagacagagagggatattatttggaggaagccaagacgacggcgtacagtactcagttcaagatgctgttcttgggccgcccttgccttgccttgcctccggcaggagggactattcctccactccagttctactccgtttcttactaattctgttctcctgccttaattccgtagcggcaagtagctagtagtagggtatatacgcgcgcgccaaagaagaagacgaaaaaagaagtccagaaaaaataacgtagcttagcgttaataaggtgtttgtacgtcgcccgtctaattaatttttactcattcttttttgagtaaatacatagtatatatagtacatgaacgactgaaagttactgacgat

SEQ ID NO: 7398 - DNA, 1234 bp, Zea Mays
cccaagtcggtttcaattcctatcatccaccatggcatatgtgcaacaactagagagcagcaagctaaaacttgcaagcctggagcaagaactccagaaagctcgacaacagggaatcttcatatccagttctggagatcaaactcatgctatgagtggaaatggagctatgaccttcgatttagaatattctcgatggcaagaggaagaaaataagcagataaatgagctgaggactgcagtaaatgctcatgcaagtgaaagtgacctccgtcttatcgtcgatgggataatggcacattatgatgagatattcaggctgaagggtattgctgcaaaggctgatgtgttccatatactttcagctccttgtgaatcagcttgagcctctaactgagcagcaattgatggggctatccaatctccagcaatcctcccagcaggctgaggatgcattgtcacaaggcatggaagcattgcagcaatccttggcagaaacgctggctgggtcccttggtccatcaggatcttccggaaacgtcgcaaactatatgggtcaaatggctatggccatgggaaaacttggcacactcgagaatttccttcgtcaggctgacaatctacgacagcagaccttgcatcagatgcaacgcatcctgacaattcgacaagccgctcgcgcgcttcttgcaatacacgactacttttcacgtctacgcgccctgagttctctttggctcgctaggccgcgagagtagcatcacccacgttggagtcactccatgggccgatctgtgaatgtggggctgctggctgcaaactcgcaacgcatttgcagatggctggagggtcagttctctttgtacaagttgtattaacatcttctggtctcatattgcgcttcagtgttgtacaagttagggtaaagcttgcatttaacttgtaagttatcatggattcatgattgacatattgtacaattgtattagcaataagaatagaagtacataaatgctggaaggactatccagcgtctatattggttggaaacgagcagcagaagcttgtcatgtcgattttgaatagtcggttgaagtgttctttttggggtctatagagaacaaagaaagcttcaggagaaatgtataggtattcaccagtctaccatagtgtgtgcttcggggagctccttgtgatggtaaaatttgataacgaggatgagttcagtgacatt

SEQ ID NO: 7399 - DNA, 1996 bp, Zea Mays
caaacgaaggcgcggagacgtgctgcagagcctgcagaggcttttcttccccccaccccacccatcgcgtgtgagtccacggtgtgatgtcacggagcggtggcggctttcccgattcactgtgcgggagaaatccccgtgcagccttcttccacctcctcctactctccgctattcgtcttcgctgatttctgccgctccaattccatcgcttccctgctttagaaccttctctgctagcttctccccgtcacagcttttggtgcctcgtcatcggcgaccaaaccgccggcgaccggataaactaagccagctccttcgctccgaaagtcgtctctcgtagagagcacttgctcacctgctccccgcccccctctgctggcgctggacttgctcggagtggagatccatccggacctggttcgatttcttcatttcggttgcttctctgctcagtgggtggataactggattgtggattttgctaactacatgctgggttatcagcctatcataaggaaagcaaagaagagacaacaaagcaatttgttgtctctttcttaggagctggcgagtactcggcatggcagatgctagttcgaggactgacacctcgactgttttagacatggatgataagaatcaaaggttagaaaatggacagagtggagctatggccctggcttcgaattcatctgatcggtctgacagatctgacaaacctatggaccaaaaggttttacgacggcttgcccaaaatcgtgaggcagcaaggaaaagtcggctgaggaaaaaggcatatgtgcaacaactagagagcagcaagctaaaacttgcaagcctggagcaagaactccagaaagctcgacaacagggaatcttcatatccagttctggagatcaaactcatgctatgagtggaaatggagctatgaccttcgatttagaatattctcgatggcaagaggaagaaaataagcagataaatgagctgaggactgcagtaaatgctcatgcaagtgaaagtgacctccgtcttatcgtcgatgggataatggcacattatgatgagatattcaggctgaagggtattgctgcaaaggctgatgtgttccatatactttcagctccttgtgaatcagcttgagcctctaactgagcagcaattgatggggctatccaatctccagcaatcctcccagcaggctgaggatgcattgtcacaaggcatggaagcattgcagcaatccttggcagaaacgctggctgggtcccttggtccatcaggatcttccggaaacgtcgcaaactatatgggtcaaatggctatggccatgggaaaacttggcacactcgagaatttccttcgtcaggctgacaatctacgacagcagaccttgcatcagatgcaacgcatcctgacaattcgacaagccgctcgcgcgcttcttgcaatacacgactacttttcacgtctacgcgccctgagttctctttggctcgctaggccgcgagagtagcatcacccacgttggagtcactccatgggccgatctgtgaatgtggggctgctggctgcaaactcgcaacgcatttgcagatggctggagggtcagttctctttgtacaagttgtattaacatcttctggtctcatattgcgcttcagtgttgtacaagttagggtaaagcttgcatttaacttgtaagttatcatggattcatgattgacatattgtacaattgtattagcaataagaatagaagtacataaatgctggaaggactatccagcgtctatattggttggaaacgagcagcagaagcttgtcatgtcgattttgaatagtcggttgaagtgttctttttggggtctatagagaacaaagaaagcttcaggagaaatgtataggtattcaccagtctaccatagtgtgtgcttcggggagctccttgtgatggtaaaatttgataacgaggatgagttcagtgacatt

SEQ ID NO: 7400 - DNA, 2192 bp, Zea Mays
caaacgaaggcgcggagacgtgctgcagagcctgcagaggcttttcttccccccaccccacccatcgcgtgtgagtccacggtgtgatgtcacggagcggtggcggctttcccgattcactgtgcgggagaaatccccgtgcagccttcttccacctcctcctactctccgctattcgtcttcgctgatttctgccgctccaattccatcgcttccctgctttagaaccttctctgctagcttctccccgtcacagcttttggtgcctcgtcatcggcgaccaaaccgccggcgaccggataaactaagccagctccttcgctccgaaagtcgtctctcgtagagagcacttgctcacctgctccccgcccccctctgctggcgctggacttgctcggagtggagatccatccggacctggttcgatttcttcatttcgggttcgattcggtttttctatcccagagcgaaagatcaatatcacctgacacaacataacgatttcgtggaagccgagattaagaacatgcagttaactctgaccggttgctgtttttggtaacggttgcttctctgctcagtgggtggataactggattgtggattttgctaactacatgctgggttatcagcctatcataaggaaagcaaagaagagacaacaaagcaatttgttgtctctttcttaggagctggcgagtactcggcatggcagatgctagttcgaggactgacacctcgactgttttagacatggatgataagaatcaaaggttagaaaatggacagagtggagctatggccctggcttcgaattcatctgatcggtctgacagatctgacaaacctatggaccaaaaggttttacgacggcttgcccaaaatcgtgaggcagcaaggaaaagtcggctgaggaaaaaggcatatgtgcaacaactagagagcagcaagctaaaacttgcaagcctggagcaagaactccagaaagctcgacaacagggaatcttcatatccagttctggagatcaaactcatgctatgagtggaaatggagctatgaccttcgatttagaatattctcgatggcaagaggaagaaaataagcagataaatgagctgaggactgcagtaaatgctcatgcaagtgaaagtgacctccgtcttatcgtcgatgggataatggcacattatgatgagatattcaggctgaagggtattgctgcaaaggctgatgtgttccatatactttcaggcatgtggaaaacacctgctgaaaggtgcttcttgtggcttgggggtttccgttcgtctgagcttctaaagctccttgtgaatcagcttgagcctctaactgagcagcaattgatggggctatccaatctccagcaatcctcccagcaggctgaggatgcattgtcacaaggcatggaagcattgcagcaatccttggcagaaacgctggctgggtcccttggtccatcaggatcttccggaaacgtcgcaaactatatgggtcaaatggctatggccatgggaaaacttggcacactcgagaatttccttcgtcaggctgacaatctacgacagcagaccttgcatcagatgcaacgcatcctgacaattcgacaagccgctcgcgcgcttcttgcaatacacgactacttttcacgtctacgcgccctgagttctctttggctcgctaggccgcgagagtagcatcacccacgttggagtcactccatgggccgatctgtgaatgtggggctgctggctgcaaactcgcaacgcatttgcagatggctggagggtcagttctctttgtacaagttgtattaacatcttctggtctcatattgcgcttcagtgttgtacaagttagggtaaagcttgcatttaacttgtaagttatcatggattcatgattgacatattgtacaattgtattagcaataagaatagaagtacataaatgctggaaggactatccagcgtctatattggttggaaacgagcagcagaagcttgtcatgtcgattttgaatagtcggttgaagtgttctttttggggtctatagagaacaaagaaagcttcaggagaaatgtataggtattcaccagtctaccatagtgtgtgcttcggggagctccttgtgatggtaaaatttgataacgaggatgagttcagtgacatt

SEQ ID NO: 7401 - DNA, 2099 bp, Zea Mays
caaacgaaggcgcggagacgtgctgcagagcctgcagaggcttttcttccccccaccccacccatcgcgtgtgagtccacggtgtgatgtcacggagcggtggcggctttcccgattcactgtgcgggagaaatccccgtgcagccttcttccacctcctcctactctccgctattcgtcttcgctgatttctgccgctccaattccatcgcttccctgctttagaaccttctctgctagcttctccccgtcacagcttttggtgcctcgtcatcggcgaccaaaccgccggcgaccggataaactaagccagctccttcgctccgaaagtcgtctctcgtagagagcacttgctcacctgctccccgcccccctctgctggcgctggacttgctcggagtggagatccatccggacctggttcgatttcttcatttcgggttcgattcggtttttctatcccagagcgaaagatcaatatcacctgacacaacataacgatttcgtggaagccgaggttgcttctctgctcagtgggtggataactggattgtggattttgctaactacatgctgggttatcagcctatcataaggaaagcaaagaagagacaacaaagcaatttgttgtctctttcttaggagctggcgagtactcggcatggcagatgctagttcgaggactgacacctcgactgttttagacatggatgataagaatcaaaggttagaaaatggacagagtggagctatggccctggcttcgaattcatctgatcggtctgacagatctgacaaacctatggaccaaaaggttttacgacggcttgcccaaaatcgtgaggcagcaaggaaaagtcggctgaggaaaaaggcatatgtgcaacaactagagagcagcaagctaaaacttgcaagcctggagcaagaactccagaaagctcgacaacagggaatcttcatatccagttctggagatcaaactcatgctatgagtggaaatggagctatgaccttcgatttagaatattctcgatggcaagaggaagaaaataagcagataaatgagctgaggactgcagtaaatgctcatgcaagtgaaagtgacctccgtcttatcgtcgatgggataatggcacattatgatgagatattcaggctgaagggtattgctgcaaaggctgatgtgttccatatactttcaggcatgtggaaaacacctgctgaaagctccttgtgaatcagcttgagcctctaactgagcagcaattgatggggctatccaatctccagcaatcctcccagcaggctgaggatgcattgtcacaaggcatggaagcattgcagcaatccttggcagaaacgctggctgggtcccttggtccatcaggatcttccggaaacgtcgcaaactatatgggtcaaatggctatggccatgggaaaacttggcacactcgagaatttccttcgtcaggctgacaatctacgacagcagaccttgcatcagatgcaacgcatcctgacaattcgacaagccgctcgcgcgcttcttgcaatacacgactacttttcacgtctacgcgccctgagttctctttggctcgctaggccgcgagagtagcatcacccacgttggagtcactccatgggccgatctgtgaatgtggggctgctggctgcaaactcgcaacgcatttgcagatggctggagggtcagttctctttgtacaagttgtattaacatcttctggtctcatattgcgcttcagtgttgtacaagttagggtaaagcttgcatttaacttgtaagttatcatggattcatgattgacatattgtacaattgtattagcaataagaatagaagtacataaatgctggaaggactatccagcgtctatattggttggaaacgagcagcagaagcttgtcatgtcgattttgaatagtcggttgaagtgttctttttggggtctatagagaacaaagaaagcttcaggagaaatgtataggtattcaccagtctaccatagtgtgtgcttcggggagctccttgtgatggtaaaatttgataacgaggatgagttcagtgacatt

SEQ ID NO: 7402 - DNA, 2029 bp, Zea Mays
caaacgaaggcgcggagacgtgctgcagagcctgcagaggcttttcttccccccaccccacccatcgcgtgtgagtccacggtgtgatgtcacggagcggtggcggctttcccgattcactgtgcgggagaaatccccgtgcagccttcttccacctcctcctactctccgctattcgtcttcgctgatttctgccgctccaattccatcgcttccctgctttagaaccttctctgctagcttctccccgtcacagcttttggtgcctcgtcatcggcgaccaaaccgccggcgaccggataaactaagccagctccttcgctccgaaagtcgtctctcgtagagagcacttgctcacctgctccccgcccccctctgctggcgctggacttgctcggagtggagatccatccggacctggttcgatttcttcatttcgggttcgattcggtttttctatcccagagcgaaagatcaatatcacctgacacaacataacgatttcgtggaagccgaggttgcttctctgctcagtgggtggataactggattgtggattttgctaactacatgctgggttatcagcctatcataaggaaagcaaagaagagacaacaaagcaatttgttgtctctttcttaggagctggcgagtactcggcatggcagatgctagttcgaggactgacacctcgactgttttagacatggatgataagaatcaaaggaaaatggacagagtggagctatggccctggcttcgaattcatctgatcggtctgacagatctgacaaacctatggaccaaaaggttttacgacggcttgcccaaaatcgtgaggcagcaaggaaaagtcggctgaggaaaaaggcatatgtgcaacaactagagagcagcaagctaaaacttgcaagcctggagcaagaactccagaaagctcgacaacagggaatcttcatatccagttctggagatcaaactcatgctatgagtggaaatggagctatgaccttcgatttagaatattctcgatggcaagaggaagaaaataagcagataaatgagctgaggactgcagtaaatgctcatgcatgtggaaaacacctgctgaaaggtgcttcttgtggcttgggggtttccgttcgtctgagcttctaaagctccttgtgaatcagcttgagcctctaactgagcagcaattgatggggctatccaatctccagcaatcctcccagcaggctgaggatgcattgtcacaaggcatggaagcattgcagcaatccttggcagaaacgctggctgggtcccttggtccatcaggatcttccggaaacgtcgcaaactatatgggtcaaatggctatggccatgggaaaacttggcacactcgagaatttccttcgtcaggctgacaatctacgacagcagaccttgcatcagatgcaacgcatcctgacaattcgacaagccgctcgcgcgcttcttgcaatacacgactacttttcacgtctacgcgccctgagttctctttggctcgctaggccgcgagagtagcatcacccacgttggagtcactccatgggccgatctgtgaatgtggggctgctggctgcaaactcgcaacgcatttgcagatggctggagggtcagttctctttgtacaagttgtattaacatcttctggtctcatattgcgcttcagtgttgtacaagttagggtaaagcttgcatttaacttgtaagttatcatggattcatgattgacatattgtacaattgtattagcaataagaatagaagtacataaatgctggaaggactatccagcgtctatattggttggaaacgagcagcagaagcttgtcatgtcgattttgaatagtcggttgaagtgttctttttggggtctatagagaacaaagaaagcttcaggagaaatgtataggtattcaccagtctaccatagtgtgtgcttcggggagctccttgtgatggtaaaatttgataacgaggatgagttcagtgacatt

SEQ ID NO: 7403 - DNA, 1963 bp, Zea Mays
caaaccagcaaacgaaggcgcggagacgtgctgcagagcctgcagaggcttttcttccccccaccccacccatcgcgtgtgagtccacggtgtgatgtcacggagcggtggcggctttcccgattcactgtgcgggagaaatccccgtgcagccttcttccacctcctcctactctccgctattcgtcttcgctgatttctgccgctccaattccatcgcttccctgctttagaaccttctctgctagcttctccccgtcacagcttttggtgcctcgtcatcggcgaccaaaccgccggcgaccggataaactaagccagctccttcgctccgaaagtcgtctctcgtagagagcacttgctcacctgctccccgcccccctctgctggcgctggacttgctcggagtggagatccatccggacctggttcgatttcttcatttcggttgcttctctgctcagtgggtggataactggattgtggattttgctaactacatgctgggttatcagcctatcataaggaaagcaaagaagagacaacaaagcaatttgttgtctctttcttaggagctggcgagtactcggcatggcagatgctagttcgaggactgacacctcgactgttttagacatggatgataagaatcaaaggttagaaaatggacagagtggagctatggccctggcttcgaattcatctgatcggtctgacagatctgacaaacctatggaccaaaaggttttacgacggcttgcccaaaatcgtgaggcagcaaggaaaagtcggctgaggaaaaaggcatatgtgcaacaactagagagcagcaagctaaaacttgcaagcctggagcaagaactccagaaagctcgacaacagggaatcttcatatccagttctggagatcaaactcatgctatgagtggaaatggagctatgaccttcgatttagaatattctcgatggcaagaggaagaaaataagcagataaatgagctgaggactgcagtaaatgctcatgcatgtggaaaacacctgctgaaaggtgcttcttgtggcttgggggtttccgttcgtctgagcttctaaagctccttgtgaatcagcttgagcctctaactgagcagcaattgatggggctatccaatctccagcaatcctcccagcaggctgaggatgcattgtcacaaggcatggaagcattgcagcaatccttggcagaaacgctggctgggtcccttggtccatcaggatcttccggaaacgtcgcaaactatatgggtcaaatggctatggccatgggaaaacttggcacactcgagaatttccttcgtcaggctgacaatctacgacagcagaccttgcatcagatgcaacgcatcctgacaattcgacaagccgctcgcgcgcttcttgcaatacacgactacttttcacgtctacgcgccctgagttctctttggctcgctaggccgcgagagtagcatcacccacgttggagtcactccatgggccgatctgtgaatgtggggctgctggctgcaaactcgcaacgcatttgcagatggctggagggtcagttctctttgtacaagttgtattaacatcttctggtctcatattgcgcttcagtgttgtacaagttagggtaaagcttgcatttaacttgtaagttatcatggattcatgattgacatattgtacaattgtattagcaataagaatagaagtacataaatgctggaaggactatccagcgtctatattggttggaaacgagcagcagaagcttgtcatgtcgattttgaatagtcggttgaagtgttctttttggggtctatagagaacaaagaaagcttcaggagaaatgtataggtattcaccagtctaccatagtgtgtgcttcggggagctccttgtgatggtaaaatttgataacgaggatgagttcagtgacatt

SEQ ID NO: 7404 - DNA, 2036 bp, Zea Mays
gttttgtcaaaccagcaaacgaaggcgcggagacgtgctgcagagcctgcagaggcttttcttccccccaccccacccatcgcgtgtgagtccacggtgtgatgtcacggagcggtggcggctttcccgattcactgtgcgggagaaatccccgtgcagccttcttccacctcctcctactctccgctattcgtcttcgctgatttctgccgctccaattccatcgcttccctgctttagaaccttctctgctagcttctccccgtcacagcttttggtgcctcgtcatcggcgaccaaaccgccggcgaccggataaactaagccagctccttcgctccgaaagtcgtctctcgtagagagcacttgctcacctgctccccgcccccctctgctggcgctggacttgctcggagtggagatccatccggacctggttcgatttcttcatttcggttgcttctctgctcagtgggtggataactggattgtggattttgctaactacatgctgggttatcagcctatcataaggaaagcaaagaagagacaacaaagcaatttgttgtctctttcttaggagctggcgagtactcggcatggcagatgctagttcgaggactgacacctcgactgttttagacatggatgataagaatcaaaggttagaaaatggacagagtggagctatggccctggcttcgaattcatctgatcggtctgacagatctgacaaacctatggaccaaaaggttttacgacggcttgcccaaaatcgtgaggcagcaaggaaaagtcggctgaggaaaaaggcatatgtgcaacaactagagagcagcaagctaaaacttgcaagcctggagcaagaactccagaaagctcgacaacagggaatcttcatatccagttctggagatcaaactcatgctatgagtggaaatggagctatgaccttcgatttagaatattctcgatggcaagaggaagaaaataagcagataaatgagctgaggactgcagtaaatgctcatgcaagtgaaagtgacctccgtcttatcgtcgatgggataatggcacattatgatgagatattcaggctgaagggtattgctgcaaaggctgatgtgttccatatactttcaggcatgtggaaaacacctgctgaaagctccttgtgaatcagcttgagcctctaactgagcagcaattgatggggctatccaatctccagcaatcctcccagcaggctgaggatgcattgtcacaaggcatggaagcattgcagcaatccttggcagaaacgctggctgggtcccttggtccatcaggatcttccggaaacgtcgcaaactatatgggtcaaatggctatggccatgggaaaacttggcacactcgagaatttccttcgtcaggctgacaatctacgacagcagaccttgcatcagatgcaacgcatcctgacaattcgacaagccgctcgcgcgcttcttgcaatacacgactacttttcacgtctacgcgccctgagttctctttggctcgctaggccgcgagagtagcatcacccacgttggagtcactccatgggccgatctgtgaatgtggggctgctggctgcaaactcgcaacgcatttgcagatggctggagggtcagttctctttgtacaagttgtattaacatcttctggtctcatattgcgcttcagtgttgtacaagttagggtaaagcttgcatttaacttgtaagttatcatggattcatgattgacatattgtacaattgtattagcaataagaatagaagtacataaatgctggaaggactatccagcgtctatattggttggaaacgagcagcagaagcttgtcatgtcgattttgaatagtcggttgaagtgttctttttggggtctatagagaacaaagaaagcttcaggagaaatgtataggtattcaccagtctaccatagtgtgtgcttcggggagctccttgtgatggtaaaatttgataacgaggatgagttcagtgacatt

SEQ ID NO: 7405 - DNA, 2115 bp, Zea Mays
gtttcgtcaaaccagagacgagagaagttttgtcaaaccagcaaacgaaggcgcggagacgtgctgcagagcctgcagaggcttttcttccccccaccccacccatcgcgtgtgagtccacggtgtgatgtcacggagcggtggcggctttcccgattcactgtgcgggagaaatccccgtgcagccttcttccacctcctcctactctccgctattcgtcttcgctgatttctgccgctccaattccatcgcttccctgctttagaaccttctctgctagcttctccccgtcacagcttttggtgcctcgtcatcggcgaccaaaccgccggcgaccggataaactaagccagctccttcgctccgaaagtcgtctctcgtagagagcacttgctcacctgctccccgcccccctctgctggcgctggacttgctcggagtggagatccatccggacctggttcgatttcttcatttcgggttcgattcggtttttctatcccagagcgaaagatcaatatcacctgacacaacataacgatttcgtggaagccgaggttgcttctctgctcagtgggtggataactggattgtggattttgctaactacatgctgggttatcagcctatcataaggaaagcaaagaagagacaacaaagcaatttgttgtctctttcttaggagctggcgagtactcggcatggcagatgctagttcgaggactgacacctcgactgttttagacatggatgataagaatcaaaggttagaaaatggacagagtggagctatggccctggcttcgaattcatctgatcggtctgacagatctgacaaacctatggaccaaaaggttttacgacggcttgcccaaaatcgtgaggcagcaaggaaaagtcggctgaggaaaaaggcatatgtgcaacaactagagagcagcaagctaaaacttgcaagcctggagcaagaactccagaaagctcgacaacagggaatcttcatatccagttctggagatcaaactcatgctatgagtggaaatggagctatgaccttcgatttagaatattctcgatggcaagaggaagaaaataagcagataaatgagctgaggactgcagtaaatgctcatgcaagtgaaagtgacctccgtcttatcgtcgatgggataatggcacattatgatgagatattcaggctgaagggtattgctgcaaaggctgatgtgttccatatactttcagctccttgtgaatcagcttgagcctctaactgagcagcaattgatggggctatccaatctccagcaatcctcccagcaggctgaggatgcattgtcacaaggcatggaagcattgcagcaatccttggcagaaacgctggctgggtcccttggtccatcaggatcttccggaaacgtcgcaaactatatgggtcaaatggctatggccatgggaaaacttggcacactcgagaatttccttcgtcaggctgacaatctacgacagcagaccttgcatcagatgcaacgcatcctgacaattcgacaagccgctcgcgcgcttcttgcaatacacgactacttttcacgtctacgcgccctgagttctctttggctcgctaggccgcgagagtagcatcacccacgttggagtcactccatgggccgatctgtgaatgtggggctgctggctgcaaactcgcaacgcatttgcagatggctggagggtcagttctctttgtacaagttgtattaacatcttctggtctcatattgcgcttcagtgttgtacaagttagggtaaagcttgcatttaacttgtaagttatcatggattcatgattgacatattgtacaattgtattagcaataagaatagaagtacataaatgctggaaggactatccagcgtctatattggttggaaacgagcagcagaagcttgtcatgtcgattttgaatagtcggttgaagtgttctttttggggtctatagagaacaaagaaagcttcaggagaaatgtataggtattcaccagtctaccatagtgtgtgcttcggggagctccttgtgatggtaaaatttgataacgaggatgagttcagtgacatt

SEQ ID NO: 7406 - DNA, 2137 bp, Zea Mays
gttttactccgtatacttccgtttttctctgccacatgtggtagggggagacgaggaaaaaatgtttcgtcaaaccagagacgagagaagttttgtcaaaccagcaaacgaaggcgcggagacgtgctgcagagcctgcagaggcttttcttccccccaccccacccatcgcgtgtgagtccacggtgtgatgtcacggagcggtggcggctttcccgattcactgtgcgggagaaatccccgtgcagccttcttccacctcctcctactctccgctattcgtcttcgctgatttctgccgctccaattccatcgcttccctgctttagaaccttctctgctagcttctccccgtcacagcttttggtgcctcgtcatcggcgaccaaaccgccggcgaccggataaactaagccagctccttcgctccgaaagtcgtctctcgtagagagcacttgctcacctgctccccgcccccctctgctggcgctggacttgctcggagtggagatccatccggacctggttcgatttcttcatttcgggttcgattcggtttttctatcccagagcgaaagatcaatatcacctgacacaacataacgatttcgtggaagccgaggttgcttctctgctcagtgggtggataactggattgtggattttgctaactacatgctgggttatcagcctatcataaggaaagcaaagaagagacaacaaagcaatttgttgtctctttcttaggagctggcgagtactcggcatggcagatgctagttcgaggactgacacctcgactgttttagacatggatgataagaatcaaaggttagaaaatggacagagtggagctatggccctggcttcgaattcatctgatcggtctgacagatctgacaaacctatggaccaaaaggttttacgacggcttgcccaaaatcgtgaggcagcaaggaaaagtcggctgaggaaaaaggcatatgtgcaacaactagagagcagcaagctaaaacttgcaagcctggagcaagaactccagaaagctcgacaacagggaatcttcatatccagttctggagatcaaactcatgctatgagtggaaatggagctatgaccttcgatttagaatattctcgatggcaagaggaagaaaataagcagataaatgagctgaggactgcagtaaatgctcatgcatgtggaaaacacctgctgaaaggtgcttcttgtggcttgggggtttccgttcgtctgagcttctaaagctccttgtgaatcagcttgagcctctaactgagcagcaattgatggggctatccaatctccagcaatcctcccagcaggctgaggatgcattgtcacaaggcatggaagcattgcagcaatccttggcagaaacgctggctgggtcccttggtccatcaggatcttccggaaacgtcgcaaactatatgggtcaaatggctatggccatgggaaaacttggcacactcgagaatttccttcgtcaggctgacaatctacgacagcagaccttgcatcagatgcaacgcatcctgacaattcgacaagccgctcgcgcgcttcttgcaatacacgactacttttcacgtctacgcgccctgagttctctttggctcgctaggccgcgagagtagcatcacccacgttggagtcactccatgggccgatctgtgaatgtggggctgctggctgcaaactcgcaacgcatttgcagatggctggagggtcagttctctttgtacaagttgtattaacatcttctggtctcatattgcgcttcagtgttgtacaagttagggtaaagcttgcatttaacttgtaagttatcatggattcatgattgacatattgtacaattgtattagcaataagaatagaagtacataaatgctggaaggactatccagcgtctatattggttggaaacgagcagcagaagcttgtcatgtcgattttgaatagtcggttgaagtgttctttttggggtctatagagaacaaagaaagcttcaggagaaatgtataggtattcaccagtctaccatagtgtgtgcttcggggagctccttgtgatggtaaaatttgataacgaggatgagttcagtgacatt

SEQ ID NO: 7407 - DNA, 1188 bp, Zea Mays
caaacgaaggcgcggagacgtgctgcagagcctgcagaggcttttcttccccccaccccacccatcgcgtgtgagtccacggtgtgatgtcacggagcggtggcggctttcccgattcactgtgcgggagaaatccccgtgcagccttcttccacctcctcctactctccgctattcgtcttcgctgatttctgccgctccaattccatcgcttccctgctttagaaccttctctgctagcttctccccgtcacagcttttggtgcctcgtcatcggcgaccaaaccgccggcgaccggataaactaagccagctccttcgctccgaaagtcgtctctcgtagagagcacttgctcacctgctccccgcccccctctgctggcgctggacttgctcggagtggagatccatccggacctggttcgatttcttcatttcgggttcgattcggtttttctatcccagagcgaaagatcaatatcacctgacacaacataacgatttcgtggaagccgaggttgcttctctgctcagtgggtggataactggattgtggattttgctaactacatgctgggttatcagcctatcataaggaaagcaaagaagagacaacaaagcaatttgttgtctctttcttaggagctggcgagtactcggcatggcagatgctagttcgaggactgacacctcgactgttttagacatggatgataagaatcaaaggttagaaaatggacagagtggagctatggccctggcttcgaattcatctgatcggtctgacagatctgacaaacctatggaccaaaaggttttacgacggcttgcccaaaatcgtgaggcagcaaggaaaagtcggctgaggaaaaaggcatatgtgcaacaactagagagcagcaagctaaaacttgcaagcctggagcaagaactccagaaagctcgacaacagggaatcttcatatccagttctggagatcaaactcatgctatgagtggaaatggagctatgaccttcgatttagaatattctcgatggcaagaggaagaaaataagcagataaatgagctgaggactgcagtaaatgctcatgcatgtggaaaacacctgctgaaaggtgcttcttgtggcttgggggtttccgttcgtctgagcttctaaagatatcaggactgtaatttacaagg

SEQ ID NO: 7408 - DNA, 624 bp, Zea Mays
gtttcataggcctgccgctgctatacccagtcttggccggccgagatcccctccgcgggctgctccggagacggccaccacgcgagctggagcttgaagcgctgagcctttacctgtgcgcggaccaaaccataggatttgttcatgcacgggagaggaatcaagatctgcgcctcctagacatcgcggattgtgtccgcaaggccgtggagtttacggtccactggggcgcagcagtggctctcgccattgcgcacctaaactttggtggtaacctccatgatgccattggtctcccttatggatcgacgacagcggacttagaccttctaaatgcacacacgtcacacgacatgagttggagagtattatgggtaatttgggtactaaaattaatacatgaactactagaattaaatttgggtatctagagttactatgtgaaattattactctatcctcattgatacgacaacagctatacatgtcatgtcactactctctacgtaaatgaatttttattccatatcttcttttattttctctctctctcttttatgatcaagctcataaatcgtctcgtattataaatcgcctcgtattataaagagacatttgttacca

SEQ ID NO: 7409 - DNA, 697 bp, Zea Mays
ccaccattcgctctgcctccatggtctccacggtctgagccgccagcatcgagggggagggtcggagggacacgagcggatccgaggcggcctccatggtctgcgccgccaccatccgctctgccgcccttcgctccacttcgaagactacttgcagagctggagcttgaagcgctgagcctttacctgtgcgcggaccaaaccataggatttgttcatgcacgggagaggaatcaagatctgcgcctcctagacatcgcggattgtgtccgcaaggccgtggagtttacggtccactggggcgcagcagtggctctcgccattgcgcacctaaactttggtggtaacctccatgatgccattggtctcccttatggatcgacgacagcggacttagaccttctaaatgcacacacgtcacacgacatgagttggagagtattatgggtaatttgggtactaaaattaatacatgaactactagaattaaatttgggtatctagagttactatgtgaaattattactctatcctcattgatacgacaacagctatacatgtcatgtcactactctctacgtaaatgaatttttattccatatcttcttttattttctctctctctcttttatgatcaagctcataaatcgtctcgtattataaatcgcctcgtattataaagagacatttgttacca

SEQ ID NO: 7410 - DNA, 688 bp, Zea Mays
cgccaccattcgctctgcctccatggtctccacggtctgagccgccagcatcgagggggagggtcggagggacacgagcggatccgaggcggcctccatggtctgcgccgccaccatccgctctgccgcccttcgctccacttcgaagagctggagcttgaagcgctgagcctttacctgtgcgcggaccaaaccataggatttgttcatgcacgggagaggaatcaagatctgcgcctcctagacatcgcggattgtgtccgcaaggccgtggagtttacggtccactggggcgcagcagtggctctcgccattgcgcacctaaactttggtggtaacctccatgatgccattggtctcccttatggatcgacgacagcggacttagaccttctaaatgcacacacgtcacacgacatgagttggagagtattatgggtaatttgggtactaaaattaatacatgaactactagaattaaatttgggtatctagagttactatgtgaaattattactctatcctcattgatacgacaacagctatacatgtcatgtcactactctctacgtaaatgaatttttattccatatcttcttttattttctctctctctcttttatgatcaagctcataaatcgtctcgtattataaatcgcctcgtattataaagagacatttgttacca

SEQ ID NO: 7411 - DNA, 7280 bp, Zea Mays
caatacaggaggagtaacaggcctaatcaatatatactgacaatgctcataccatacacttaggctctgtttggatccaccccagctaaactttagccagcacctctgggatttgctttcagattttgaactgcagcttgacatagatgataaacaccttttcagcttagcctcaaatggcaaatattcggctaaatcttcttacaaaggccttttccttggctcaagttcctttgcatattataagatggtgtggaaatcatgggccccgcccaaatgccggtttttcatttggctagttactcagaaaagatgctggacagcgaataggcttgcaaaacgaggtttggatcacccggagaaatgtcttctgtgtgaccaagaggctgaaactatggaccacctgacttgtgtctttgcaagagaattctggtatcttttgctgagacagtttgggttgcaactccctcgcaccatagatggctgcttcctccttcctaggctggtgggaaaaggcagcaggagtagtaagtgggcttatcaaaaagggtctaaactccctcatcattttgggtgcttgagcgatttgaaatcaccagaatagatgggttttttatggttggaatttaaatataactctaacctttatctgggcaaaagaggagatgcatcggtgggaaatagcggggcaaaagacatttcttatctggcagcccccttagctgagtcctagggacttccctagtgtgtagtgtgtgggttatgttttcctagatggattcctttctgtatgcgtgcttctggccctcgtaaggttttttttttgtatcgggccttctttagaccctggttaccttttcttcttaatataatgaggtgcagttctcctgcgcatttcgagaaaaaaaactttagccaactaatatgaccagctaaagtttagctagggctgtttggatcctctagctaataggtgtatattgaccatccatctccattgtgctgaggagcacgaggcaagaaccctccgctgccaggatatgtgcgaccccaccaccagtgtggagcgtgagcggccctccgctgccggatgccacggccttgtctggggaggcgccatgccgctgggtccgccggggaacagtgctaccagctggtgtggcccgcttgtgggcggaggctggtgaaaatgcccaagcgtggtggaacggagcccgagggctcagatgtggaaaagacaggagggtaatttggtcattgagcacttttagctgggttggaacatataatgagataatggggttcttattagctaagaagcatttggctgatattttagctaggctgtttggatccactacagcttaatttagtcataaagtttagctggtggatccaaacaggtccttagctaaggaaacagatgactggttttaatttatatgctcaacaagtctatagcggaccaattggtgtcaggacaaaggaggtaggtagtgactgaagtggtggacaagaaagttgttgaaccaaatcctaggccatcaaacatcacattttaccattatagagcttttccctctattagaaagtttgaatgaataccaccaggcagaaacaattcaattttcagcctgcaagatcatccagcttctaatctagcctttcattgttgagaaagtgcagaccaagtgacactaatacaagatactcagttgcctcaaaatagtggagaccacacaaatcatgagccttgcatcctattaggacattcttgcaaagaaatttactgaaggaagaaaccttgtggcatgaaaggaaaaacagtcagtagtaaaaggaaaagtaaatctcttttccaaacagaacacaagaacagggtaaaataaaaagtatcgacaagctgaatattagattcaagattgttatggatggtactgttctagcatcagaggaaatccaccaatttaaagaaactcatatcacatttgttagaataatttatacaaggaagacaacaataagataactttgcagcttgaaatataatcaaagaacaatatagcacagcaagttatcgaagtgttagaatgaatggtgggacactttaaataagagtaaaagtagtaaatccactgtgtctgttcagtcgatgtgaaaatacacattaaaaataacatcaacaaataatgcttcatctgtgtagtcctactgaaaatccacaaaaggaacagctccaattccagataaagttcataaaaacaattgtcgcgttatatgaaagaccaattaaccattcagcttgcagccacagttttatcatgcatgttttagtaaatgaatcatgggctttttagttgctagtccctcagttccgacttctgaatgatacatcactttagctttgtcctaagtcaaacttctctaactttgaccaagtttttagaaaaaaatatattaatacatacaagttaaataaatgcactatcaaaacacatggagaatttaatgacattcatttaatgttgaattgttgatgcgtttttctataaacttagtcaaagatagagaagtttgtcctggatcaaaactaaagtgaactctaatttggaacagagatacagcgcttaagttagaatttgaatgctacagaaattgtttggtccgcagctacagttgtggcacacaaaaatgccataatttagtaataacatagtacacataattgacacaaattgtttgccacagttgtggcaaaaaaaacacatgtctgataaagcagctaaacaaatcttataacaggcaggtcaagggttcaaagctaagaaaaatctgcctaacctcaaataaggtcacatagcaaaacactgggatgaaaggttaaactagcctaactgtatactagttgcttacactatatgtacttgtttttcccagttctgtgtcaactctgcattttttgtggtcatactctgcacggcaagaagagtaggaccatatatagaacaacttgcaacacattacagaaagaaaaaaaagaatatatactatcctaaaaaatcggtcggggagagaatgaccactctcccggtattatattaagaagagaccgaaacattaatcccggccgagaaaaccttcgaacctgggcccccatcactcacgggtcggtgtcaaccgttcactctgcaacggtccaaccggagggtggcgcacaggacattgtaacccaagagcggatgggacacaacaaggagatttttttaactaagcccgaaaattcgccctgaggggaatcaaacctgggacttagaggtgctactcggaagccataaccactaagctagaggccctttcgcaagaatatactatcctattctgaaccaaatacaaatgccgctagttctttatcattctgaaaaataaaaaatattgccatcttctgaaaccttgtaacaaatgttactactccctccgtcccagtatataactgtaacaacctctggttcaaagactaagaaatgtatttaattctctctatcaacattaatactactgcattgatgtacgtgtgtctagagagagcacgccttatactatgggacaaatatattatgagacaagttacaccttatattataggaccgagggagtaggtctttacatcattattaactaaaacagtttctggagcaattaacaataaattaccaagcatatttatgtgaatgtttttagttttctcacaagccctacatacataatgccacaagctgcatcatgaaaggaaaggctcacacagacgcacagtgatctagttgtacagagcttgttggagcatcaatctcaacactaatttctcacatcactattaaaccatctaatatatgattagaaaatcaagcgagagttcaagaaacatcactctgttattatgaccaatgaacaacttgagtacactggaagctcccagttcagcaacggactgtctgacagcttaacagcttaagtatcatcaagaaaatattctgacaaaatctaccgctgataacgaccaaggaccaaccaaagttagagcaactccaagagcggtcttaaccagagtccttatttcaaatataggactttaggactcaaaaaatgctccaacagaggccttaatttaacaaaaaacgtgaaacaggatcgggctccgtctccacggtcccaaatatcggacccgaagagagcggccctatccacgttcccacgtttttttccaacgcctggacctttctttttctcccacgccgccgccgtttcctgcgtctcttccctcggtcgttcccatcttctctcgatcatcctcatcctcgccgtcatggatggaaggccacggtctcttcctcattcacgcccgacgtccaaggctcgacgaacttccatggagacggccctagatgcgatcgggagatcgcctcctgcctctcgcccggatccgcgaaggtctgcaatgctaccaggtgctgcggctcctcagtcgatccaagcacaggcacttcgtcatcgaacgatggcaactaatgtcaatctccattcatcatccagggcaccggctatataccagcaagatcccttggggactgctgatgattacagcgcattgcctggttactacacttccctactaagccaacaaacagaagatgtttttccatatgaaaataatttagacagtgagtgtgaagtcatggagtccccgccaataactgagttgaactcactgccaaaatcaaagggtcggtccaagaatttagtgaagatgaagatatcttattggtttcagcatatctcaatataagtaaagatgctattgttggaagagatcaaaaagagggtaggttttgggaaagaattgagaattactttcatgacaacaagacatttgagacagatcgcaacgcatcatcgttgaagcatcgatgggctataattcataaagaggtgagtgtatttcaagcataccatgaagccatagaaagaaagaatgggctatatctttgtgcttgtcgatgaatgctgataagtttgatgttccaacatgtgaaacccaaccatttgtctcagcgtcgctcttctcatagggcggctcaagacgacctgcgtctctttcatcttctattatcatattatgcattattatgcatgctttcataatgttccgaagtgtagctacatcccaaaaccttgctggacctcgaacaatggcaaatcgagcctgcagtacaccaaatgcacgttcaacatctttcctcagcgactcttgtgcagcagtaaaattttggtccttctcatttgcaggagccttgattgatttcacaaaggctgaccaatttggatagatcccatctgctagatagtagcccatatcatacttgtgcccattaattgtgtagttcactgctggagctttgccttcaacaagtctatcaaaaagatgagatctgtgcaaaacattaatatcattgagtgaccctggtagaccaaagaatgcatgccatatccataaatcatgagacgcaactgcctctagtataatagttggttctttcacatgaccacaatatgtgccttggtaagctgttggacaattcttccacttccaatgcatacaatcaatactaccaagcattccaggaaatccacgttgttcggcaatactaagtaacctagctgtgtcatcttcatttggagctctcaagtattgtgggccaaaaacctcacagacagccttgacaaatttccgtaagctctcaatagcagtgctttcaccaatcctcaagtactcatcaacataatctgctggaacaccataagctagctgtctaaaagctgctgtcaccttctgtagacatgaaaaaccgagaacaccagctgcatttctatcttgaacaaagtattcatcatgcttctctacggctttagctatccgcttgaaaagagaggaactcatccgaaaacgacgccgaaaaaacttctcgggatatgttggattttcagcaaagtaatcttgaaataattttctatcatgttcttgtctactccggtcatgaactttatgtccaaaaactgaacctcgacgctttttacgctggccatttttcctcttcttgtattgacccatcataagagccatgatctgatccagttcgtcatctatctcgtcatcctcctcaaggtgcctcatcgttcttttcattgcagacatccaaatgatcaagtacagtgagggtaacaaaatgatcaagtacatatatctaatcattgcagaaaattctacattcatcagaccataaatacaagtagcagaatcaaaaggattatacaatcaactataatagctactgtctactctactcacatagtacattagcttgcatactcaaattggtgatcgtgttgaggagggcttaccgcacatggtctgacatatcttgtggcactgacagaacagagaacgagcgtacgtgaagaacggtggccttttgcagcaggatggtctgcgcaccctcttccgcggagatggatgccaccctctgtagggaagaacgacggcgccctagaacatggatacgttcgtgtgtgcactagggatttgagggagatccgagggagggtagctgggaatcgtgattttgggcaggaagcagagcgcgcgcgggaaaacagagcgcgcgagccgaaaaacagaattagttgctaagcactacatttgaggccctgctgttggagttaaccaattaaattacgaataaattggtccctaaaacaaaatttaggacctaaatttagggccccttcttggagttgctcttagcatttgcgttctgacgggtgcaaaaacgtttcgccgcatttcgagcacaaactagtagttaagctactaaagtactaagtgagcaacttacaaataacttcacgaaattgcacgcgcacggcagcaaaattggttcatagagaaaagacgcttgtcggttggcatcaatcacaagcgaattaggacgataccaaaccttgccagcgacctccagatcgcgaccactcgtcgcattggaccctaacccaaccaaccaaaatcatgggcatcttcagatcacccgaccacctcccgagcaaacaagcatcgaaaccaaaccatagattgatcaaacgagcaagcaaaccgaaatagcggtgcgggatctcgtgatctgacctggggcacgaacatccgcggcgagagcgagtggccaggactcccg

SEQ ID NO: 7412 - DNA, 601 bp, Zea Mays
gcggccggtcagtccaggcagccaccaatggctgagttcctccgctccatttaccggagcgatctggggggtgggggagcggcggagccaggagctagccagctgattggtgagcctcccgtacggccgtaatatcacatatatatcagtttgagtgttgtgtgttgatagagtggattacaaggaactggccatcgtcagtgaactcgagccgcagctcgccatcatcgaaaccggagtaaaccaagacgagattcagttgtgctgaggtctgcatagaagtataaagaggcaaggacgaaaagggaaccgaagacgaaccagttaccaagggagagacatggagcacagggtgaacagtggagcgtggggtgccatttttaatttgtaaaccacttgaccggttatggcctgaatttcataaggaccaaagtagcggtaggatataggttgtgacagaccctggaagtcaccgaagattgagcacaaggttgcagtttcaaccaaactctatctatcgtccactgcaaattggtgttatgtacgataattttgtcagcataactttccatatgtaatattacctccgtttttgaatatt

SEQ ID NO: 7413 - DNA, 1887 bp, Zea Mays
ccagcgcaccttgcttgctacaacatgacgtatctctgaatggtccttctacaacatgacgttttcttgaaaacacaaggcaccaaaggaacatcacaaccacgggataaacagaaagcagcagcctgttgaatggtaccaaaggagtctgggcagattcgatgaacaaatagaactacaaactggatccaactgcaatcagtgtccagaacacgcaaagccgtacagattcacacagcaggggaagcacggagtttcgatgacacaaatggagataagggtggcagcagggggactcaaacgttcagcagctacagctagtacggtttcttcatggggaaaacgaaggaaacaagacctgcattgcctttctaatatgcgatgcacggtttggtttcctccttcaattcccgcggggtactataccgttaccgcaggctttactcacttggccatcatgaccttgacgaactcctcgtagttgatctggccatcaccatcgacgtcggcctcgcggatcatctcatcgacctcctcgtcggtcagcttctcgccgaggttggtcatcacgtggcggagctccgccgcagagatgaagccgttctggtccttgtcgaacaccctgaacgcctccttgagctcctcctcggagtcggtgtccttcatcttgcgggccatgaggttgaggaactccgggaagtcgatggtgccgttgccgtccgcatcgacctcgttgatcatgtcctggagctcagcctcggttgggttctgacccagtgatcgcatgacagttccgagctccttggttgtgatgcaacctgtccggtgcacagcagggagcaatttcaggtcaatctatataacattagcacagcagtgacgtcaaatgcttaaccagcctgagaagttgtcacaataaacatctggttcacaaaaggacacgactattaaaattctggtgcatagatctaacaaatggtttagaaggttgatggtcagaaaaccatttatccagaaccagcctgaaaggtaggagatgatcccaagtctttggcagagcctttacactactatggaagtaccaccaaagtataactatggatgtatcgaaattttagcacaatatttggtacctaactggctaactcctgagatataatctgggttgtgatacctccctatgccaatcattagctatacggtaaggccccgtttagaaccgctagaactaatagttagccagctaacaaattgttaactgggtttagcttgagccagctaatgactaattcttagttgtgaggtacctgacaattagctggagtttttagttgagagtgtttggaaatccacagctaattattagctctagatgttccaaacagaccctgaactaagcaggattgtcttgattttaaaaaatatccttactaaatggaaccactgcatgtgtacttcatacctaaaaactgagcgccatgcatataacaatctaacatataacatcacaatcatcacgtcacaaccattaccatttactaaatttacagaaacattctctttgcatgttcatttgatgttgaggtaaatgatataatttttgagttaagggttctaaacatagttttttctagaaacatcaatgtcatctatgcagatttttttagtatgtcaaaaaacatggattcttagcctaacatatctattgtttattggatcttatttatcatgcatgtgattgtggcatgagctgaaaggaaactgaaattgtttcagaatcatttaaggtctacaatgtctcaaaaacaaccgaagggtttggcaattttatatattgttattggacggggttgatatcacaccagcatttatgacttcataaaaaaa

SEQ ID NO: 7414 - DNA, 1999 bp, Zea Mays
gtctctccccccgtcgagcacacaacacaccctcctcgtcctccaatccaatcaacctggtagactcgcttcgcttctcccccagccgtcggacggagctcctcgcagtcgcagcagccgccgatcagcctgcgctcgggctcagcgctggaaggtgttggaagagaatagcctgaaggttcacagtaaccttcatctgtcggaagatgtatcgggctaagagggctgcattgtcaccgaaggtgaagcgccgcgtcggcaagtacgagctcgggcgcaccattggggaagggaccttcgccaaggtccggtttgctaagaacactgaaaacggggaacctgttgctatcaaaatccttgacaaggagaaggttaagaggcacagattggttgagcagattaagcgtgaaatttgtatcatgaaattagtaaggcaccctaatgttgttcgactgtttgaggtgatgggaagtaaagcaagaattttcatcgttctggaatatgttaccggcggagagcttttcgaaatcattgctactaatggaaggttgaaggaagacgaagcacgtaaatacttccagcaactgattaatgctgttgattactgccacagtaggggagtgtatcacagagacttgaagctcgagaatttgctgcttgatgctgcaggaaatctcaaagtttctgactttggtttaagtgctttaaccgagcaagtgaaggctgatggtctgcttcatacaacatgtggaacccccaattatgttgcccctgaggtgatcgaggatggaggctatgatggtgcaactgcagatatttggtcttgcggagtaatcctctttgttcttcttgctggatatttacctttcgaggatgacaacatcatcgccctatacaagaagaagctcagtttagctgcccctcttggttttcagctggggccaagaacatgattaccagaattcttgatcccaatcctacaactagaatcacgatttctcagatactggagcatccttggttcaaaaaggggtacaagcctcctgtttttgacgagaaatatcaaactagcttggatgacgtggatgctgcttttggagattcagaagaccggcatgtgaaagaggaaactgaagatcagccaacctcaatgaatgcattcgaactgatttctctaaaccaggcactgaatctggagaatttgtttgaagcaaaggaggagtataaaagagagacaagattcacctcacagtgccccccgaaagagataatcacaaagatcgaagaagctgcaaagccgcttggctttgatgttcagaagaaaaaatacaagatgcggatggagaacccgaaagcaggtagaaagggcaatctgaatgttgcaactgaggttttccaaatagccccatccctgcatgtagtcgagctcaagaaggcgaagggggacactctggagttccaaaagaagcctgtcgacccagctgaaggatgttgtgtggaagtgcgacggcgaggtggacggcaacagcgcggcagcatgaaagtgccctttgaactttccactggacggcgccggttttcctttgtacatagcttctctttcggatgatcccgtgtccattgcagagtcggttttgcaagcaagttctttggtttatttgtagtaagcccggtgaaacaaccgccctggaggctgttgtggatgagcttactggcgtgtttagttcgtttcatggtcgggaggttggatggaatggaaaccacaatcaaggctgtagtagtgtgtgtagtaacgaagtagatacatgcatcagatggtgtaagggagtaccagctgttagttcatggtttcaagcttagccccccttcaatttgttcgatgatgtattacttcacaataaacattattacttagatgtatgaggtgagcacacttggtcttttgtcctctttgtgctattttgcgtgataattgaattttagcaggggcggattcagg

SEQ ID NO: 7415 - DNA, 1752 bp, Zea Mays
gtctctccccccgtcgagcacacaacacaccctcctcgtcctccaatccaatcaacctggtagactcgcttcgcttctcccccagccgtcggacggagctcctcgcagtcgcagcagccgccgatcagcctgcgctcgggctcagcgctggaagattaagcgtgaaatttgtatcatgaaattagtaaggcaccctaatgttgttcgactgtttgaggtgatgggaagtaaagcaagaattttcatcgttctggaatatgttaccggcggagagcttttcgaaatcattgctactaatggaaggttgaaggaagacgaagcacgtaaatacttccagcaactgattaatgctgttgattactgccacagtaggggagtgtatcacagagacttgaagctcgagaatttgctgcttgatgctgcaggaaatctcaaagtttctgactttggtttaagtgctttaaccgagcaagtgaaggctgatggtctgcttcatacaacatgtggaacccccaattatgttgcccctgaggtgatcgaggatggaggctatgatggtgcaactgcagatatttggtcttgcggagtaatcctctttgttcttcttgctggatatttacctttcgaggatgacaacatcatcgccctatacaagaagatttcagaagctcagtttagctgcccctcttggttttcagctggggccaagaacatgattaccagaattcttgatcccaatcctacaactatactggagcatccttggttcaaaaaggggtacaagcctcctgtttttgacgagaaatatcaaactagcttggatgacgtggatgctgcttttggagattcagaagaccggcatgtgaaagaggaaactgaagatcagccaacctcaatgaatgcattcgaactgatttctctaaaccaggcactgaatctggagaatttgtttgaagcaaaggaggagtataaaagagagacaagattcacctcacagtgccccccgaaagagataatcacaaagatcgaagaagctgcaaagccgcttggctttgatgttcagaagaaaaaatacaagatgcggatggagaacccgaaagcaggtagaaagggcaatctgaatgttgcaactgaggttttccaaatagccccatccctgcatgtagtcgagctcaagaaggcgaagggggacactctggagttccaaaagttctacagaagcctgtcgacccagctgaaggatgttgtgtggaagtgcgacggcgaggtggacggcaacagcgcggcagcatgaaagtgccctttgaactttccactggacggcgccggttttcctttgtacatagcttctctttcggatgatcccgtgtccattgcagagtcggttttgcaagcaagttctttggtttatttgtagtaagcccggtgaaacaaccgccctggaggctgttgtggatgagcttactggcgtgtttagttcgtttcatggtcgggaggttggatggaatggaaaccacaatcaaggctgtagtagtgtgtgtagtaacgaagtagatacatgcatcagatggtgtaagggagtaccagctgttagttcatggtttcaagcttagccccccttcaatttgttcgatgatgtattacttcacaataaacattattacttagatgtatgaggtgagcacacttggtcttttgtcctctttgtgctattttgcgtgataattgaattttagcaggggcggattcagg

SEQ ID NO: 7416 - DNA, 769 bp, Zea Mays
aagccattatctttgtcactgtgtctgaaagtctgaaactcacagtatacagtgattggggcggttcttggagtaaagctcattcaagtaactttccctaatgtgggtaaaggagcccgcttaagtgttggtgctcatcatgacatggatcacaagcatttggaagaacacaattcatctccttagctcggatataactggagggattatgaaccctgcatctgcttttgcttgggcgtatgctcgaggagatcatacaacatttgaccacctactggtatattggctggcgcccctgcaagcaaccctgctgggagtatgggcggtgaccttcttcactaaaccgaagaagatcaaggagcaaaaggtagatgaaaacaagataaagaaggaatagactattcttgaattagagctagagcttcataccatcttcttagtcagataacttgtggctacacacaaggcgaaatgtttcgaagctaatctaagaaatggcaacctatcatggtcagcttctgtgaagtctccttgatgtgtattccttgtatctggcttagcttagattgtgcagaagcttgtaagcaactgctccaggcttccattcaagacattgtcgtattggaaacagtatatatggaagctaaagcttctcagagttgactcacaacctacactaatgttccacagcattgttgaaagtatcttgagttccattatctatgataatgggaaattgcaggtctcatctagtttccaggaaaacgaa

SEQ ID NO: 7417 - DNA, 1133 bp, Zea Mays
aaaacgaagtaatccgcccctagattaattggtggcttactggcttgctttctagtctccggcacaagattccctctccagcggcgcaccaccgctaccatcctccgacccccaacccgaacccgccatgtcaccggcgccgtcgcgcccccgcatccgtccgtggctggtggtgggtgacctggcactggcggccgcgtgggtttgcgcgggcgcgctggtcaagctgctcgtttacggcggactcggcctcgggggacggcccgaggccgaggccgtcaaggtctcgctctccctcgtatacatgttcctcttcgcctggctcgaggctgcctcgggtggggcctcctacaatccgctcaccgtcctcgccgctgcgctcgcctcccacggcggacccgccgtgtacctgttcaccgcgttcgcgcgaatcccagctcagctcattcaagtaactttccctaatgtgggtaaaggagcccgcttaagtgttggtgctcatcatgacatggatcacaagcatttggaagaacacaattcatctccttagctcggatataactggagggattatgaaccctgcatctgcttttgcttgggcgtatgctcgaggagatcatacaacatttgaccacctactggtatattggctggcgcccctgcaagcaaccctgctgggagtatgggcggtgaccttcttcactaaaccgaagaagatcaaggagcaaaaggtagatgaaaacaagataaagaaggaatagactattcttgaattagagctagagcttcataccatcttcttagtcagataacttgtggctacacacaaggcgaaatgtttcgaagctaatctaagaaatggcaacctatcatggtcagcttctgtgaagtctccttgatgtgtattccttgtatctggcttagcttagattgtgcagaagcttgtaagcaactgctccaggcttccattcaagacattgtcgtattggaaacagtatatatggaagctaaagcttctcagagttgactcacaacctacactaatgttccacagcattgttgaaagtatcttgagttccattatctatgataatgggaaattgcaggtctcatctagtttccaggaaaacgaa

SEQ ID NO: 7418 - DNA, 1134 bp, Zea Mays
ctcattgttaccgctaatcacgtggacagtctccggcacaagattccctctccagcggcgcaccaccgctaccatcctccgacccccaacccgaacccgccatgtcaccggcgccgtcgcgcccccgcatccgtccgtggctggtggtgggtgacctggcactggcggccgcgtgggtttgcgcgggcgcgctggtcaagctgctcgtttacggcggactcggcctcgggggacggcccgaggccgaggccgtcaaggtctcgctctccctcgtatacatgttcctcttcgcctggctcgaggctgcctcgggtggggcctcctacaatccgctcaccgtcctcgccgctgcgctcgcctcccacggcggacccgccgtgtacctgttcaccgcgttcgcgcgaatcccagctcaggtgattggggcggttcttggagtaaagctcattcaagtaactttccctaatgtgggtaaaggagcccgcttaagtgttggtgctcatcatgacatggatcacaagcatttggaagaacacaattcatctccttagctcggatataactggagggattatgaaccctgcatctgcttttgcttgggcgtatgctcgaggagatcatacaacatttgaccacctactggtatattggctggcgcccctgcaagcaaccctgctgggagtatgggcggtgaccttcttcactaaaccgaagaagatcaaggagcaaaaggtagatgaaaacaagataaagaaggaatagactattcttgaattagagctagagcttcataccatcttcttagtcagataacttgtggctacacacaaggcgaaatgtttcgaagctaatctaagaaatggcaacctatcatggtcagcttctgtgaagtctccttgatgtgtattccttgtatctggcttagcttagattgtgcagaagcttgtaagcaactgctccaggcttccattcaagacattgtcgtattggaaacagtatatatggaagctaaagcttctcagagttgactcacaacctacactaatgttccacagcattgttgaaagtatcttgagttccattatctatgataatgggaaattgcaggtctcatctagtttccaggaaaacgaa

SEQ ID NO: 7419 - DNA, 1482 bp, Zea Mays
aatcagttcagaatagaaggatataacatgatgttgttaatggtattgagtttgccaggggagaccccgagactgcatggggttcagttcgtgcagcaatggggcatccagagccctttcagctttattacgtttcaataggaaatcaagaatgttcaaagtactattataaagataactatgtgaagttctactctgcaataaaagcatcctatccagacatcaaaatcatatcaagctgtgacagatctgctatttcatcagacaacccagctgatttgtatgatgtccatgtctatacttcatcaggtgatatgttttccaaatctagaatgtttgataatacagcccgtaccggacccaaggcaattgttagtgaatatgctgtaactggaaatgatgctggccgaggaacactaatagctgctttagctgaagctgcatttctcattggattagaaaggaacagcgacgtggttgagatggcaagttgtgctccactctttgtaaacgacaatgaccaaaggtggaacccagatgctatagtctttaactcatggcagcactatggatgtccaaattactggatgctgcactttttcaaagattcaagcagcgccacacttcatccgtccactattcaactaccgaactacgaccaactggtcacatctgctatcacttggaataacccacatgatgggaacacttacatgaaaataaaggttgtaaattttggaagcaaagctgttagtctgaatatatctgtaactgggttggaaactgatattcagacatttggatccataaagacggttctcacgtcgggttggctgcgggatgagaactccttccaacagcccgacaaggtggtgccggcggcaagtccaataaccaacgcgggcaagcaaatgggtgttatattgaactcgtactccctgacctcatttgatctcctcttggactcggagtctcaggttcgagcctccatccaagcttatgattagtgtgagatgtgtcgtgtgcgtgcccacaatactcaataccgagatacgggtccccccaaggctccccacaaggctttcaatagaaaatacgatatttgtgaattattgtgaagtacaggcgtacagctggctatgtgtatgagattcaacaaatggtttctacgaccctaataaaggtataaaagcacctttcctcggatatcacacatccgttgtagtctgcactcttgacattttctcttttttagagcatgtacagtgtacctaactaccgcaaactttttgtcctggtgcactacagcgaatgtgccatatataagaataaaaagaagggaaatataaccgtatccatttgtgtgtgtaaccatgtaatcaaggcgtagggatggaggttatagactcaactgatatgttcttgttgggggtttactctgtcgaaggtccttataaaattttcactttagcataaacaaat

SEQ ID NO: 7420 - DNA, 2493 bp, Zea Mays
gacgaattatcatccgtttggccgcttcatttctctccccgcttcggtgctgcctgctggccgaccgccgaagcgacaaccgaggccaccgatcagttgactcccgtctcctcgtcgcagggtctcctcacacgagcacacgaacatcgagccctccccgcaggagcataagacgcttcgcttgttttctaaaacattgctggggttgcagcatgtgtacttgggcatagagggattgttacatcgagctagtgctttggtctctgctgtagcagagcgcaatgggcatccgggcttgttcggtttgctggttgttctatgtgctggttcttgtctgttccttgtgtcagatactttatgttggatcagtggcggctcaaactgctcagttgactgtggatgcttcacctcagaatgctcagataatccctggcaatatgtttggcatcttctttgaggaaatcaaccatgctggtgctggtggattgtgggcagagcttgtaagcaacagaggttttgaagctggtggttctaatactccttcaaacattgacccatggttgatcattggggatgaatcaaatattattgtggcaacagatcggtcatcatgttttgctagtaacccaattgcacttcgaatggaagtactttgtggagctagtgaaactaatgcttgcccatcaggaggagttggaatctacaatcctggttactggggcatggggcatggtttccgtaaagatcttgcctctatgctggcaaatctgaagcctcgatttctaaaatttccaggtggcaactatgtaatgggaaattaccttataaatgcattccgctggagtgaaactgttggaccatgggaagagagacctggccacttcaatgatgcttgggcctattggactgatgatggacttgggttttttgaatttcttcaactagcagaagaccttggcgcttgccccgtttgggtggtaaatgatggggccagcatctatgaaggagttccatcagcaacaatagctgcatttgtaaaggatgttgttaatggtattgagtttgccaggggagaccccgagactgcatggggttcagttcgtgcagcaatggggcatccagagccctttcagctttattacgtttcaataggaaatcaagaatgttcaaagtactattataaagataactatgtgaagttctactctgcaataaaagcatcctatccagacatcaaaatcatatcaagctgtgacagatctgctatttcatcagacaacccagctgatttgtatgatgtccatgtctatacttcatcaggtgatatgttttccaaatctagaatgtttgataatacagcccgtaccggacccaaggcaattgttagtgaatatgctgtaactggaaatgatgctggccgaggaacactaatagctgctttagctgaagctgcatttctcattggattagaaaggaacagcgacgtggttgagatggcaagttgtgctccactctttgtaaacgacaatgaccaaaggtggaacccagatgctatagtctttaactcatggcagcactatggatgtccaaattactggatgctgcactttttcaaagattcaagcagcgccacacttcatccgtccactattcaactaccgaactacgaccaactggtcacatctgctatcacttggaataacccacatgatgggaacacttacatgaaaataaaggttgtaaattttggaagcaaagctgttagtctgaatatatctgtaactgggttggaaactgatattcagacatttggatccataaagacggttctcacgtcgggttggctgcgggatgagaactccttccaacagcccgacaaggtggtgccggcggcaagtccaataaccaacgcgggcaagcaaatgggtgttatattgaactcgtactccctgacctcatttgatctcctcttggactcggagtctcaggttcgagcctccatccaagcttatgattagtgtgagatgtgtcgtgtgcgtgcccacaatactcaataccgagatacgggtccccccaaggctccccacaaggctttcaatagaaaatacgatatttgtgaattattgtgaagtacaggcgtacagctggctatgtgtatgagattcaacaaatggtttctacgaccctaataaaggtataaaagcacctttcctcggatatcacacatccgttgtagtctgcactcttgacattttctcttttttagagcatgtacagtgtacctaactaccgcaaactttttgtcctggtgcactacagcgaatgtgccatatataagaataaaaagaagggaaatataaccgtatccatttgtgtgtgtaaccatgtaatcaaggcgtagggatggaggttatagactcaactgatatgttcttgttgggggtttactctgtcgaaggtccttataaaattttcactttagcataaacaaat

SEQ ID NO: 7421 - DNA, 3039 bp, Zea Mays
gacgaattatcatccgtttggccgcttcatttctctccccgcttcggtgctgcctgctggccgaccgccgaagcgacaaccgaggccaccgatcagttgactcccgtctcctcgtcgcagggtctcctcacacgagcacacgaacatcgagccctccccgcaggagcataagacgcttcgcttggttttagccaatggggcacagctagagtattatacagggacaactggttacgcagacagtgcactgtgcatggtgttgcttcctggatggacaaggagaaaacgacacttgtgggttgcttgcccgcgactggagtgcaactctaacaagtaatcttcagacaatatgatacataaggatgctgctatcttcttctcatcggtttgatttgacttcacttctactcacacatcattgctctgatccaaatgctggttcctatccttgcagttttctaaaacattgctggggttgcagcatgtgtacttgggcatagagggattgttacatcgagctagtgctttggtctctgctgtagcagagcgcaatgggcatccgggcttgttcggtttgctggttgttctatgtgctggttcttgtctgttccttgtgtcagatactttatgttggatcagtggcggctcaaactgctcagttgactgtggatgcttcacctcagaatgctcagataatccctggcaatatgtttggcatcttctttgaggaaatcaaccatgctggtgctggtggattgtgggcagagcttgtaagcaacagaggttttgaagctggtggttctaatactccttcaaacattgacccatggttgatcattggggatgaatcaaatattattgtggcaacagatcggtcatcatgttttgctagtaacccaattgcacttcgaatggaagtactttgtggagctagtgaaactaatgcttgcccatcaggaggagttggaatctacaatcctggttactggggcatgaacattgaaagaacaaatgtctatagagttaccatatacatcaggtcatcagaatcggtggagctaatggtttctttaacaagttcagatggtcttcaaaatctagcctctcatacaatcatgggagacaaagaagatttcgttgagtggacgaaggttgaatttgatttgcaatcaaattatataaatactaattcaagacttcagcttacaaccaccaaaagtggcataatttggtttgatcaagtatcacttatgccatcagatacttatatggggcatggtttccgtaaagatcttgcctctatgctggcaaatctgaagcctcgatttctaaaatttccaggtggcaactatgtaatgggaaattaccttataaatgcattccgctggagtgaaactgttggaccatgggaagagagacctggccacttcaatgatgcttgggcctattggactgatgatggacttgggttttttgaatttcttcaactagcagaagaccttggcgcttgccccgtttgggtggtaaatgatggggccagcatctatgaaggagttccatcagcaacaatagctgcatttgtaaaggatgttgttaatggtattgagtttgccaggggagaccccgagactgcatggggttcagttcgtgcagcaatggggcatccagagccctttcagctttattacgtttcaataggaaatcaagaatgttcaaagtactattataaagataactatgtgaagttctactctgcaataaaagcatcctatccagacatcaaaatcatatcaagctgtgacagatctgctatttcatcagacaacccagctgatttgtatgatgtccatgtctatacttcatcaggtgatatgttttccaaatctagaatgtttgataatacagcccgtaccggacccaaggcaattgttagtgaatatgctgtaactggaaatgatgctggccgaggaacactaatagctgctttagctgaagctgcatttctcattggattagaaaggaacagcgacgtggttgagatggcaagttgtgctccactctttgtaaacgacaatgaccaaaggtggaacccagatgctatagtctttaactcatggcagcactatggatgtccaaattactggatgctgcactttttcaaagattcaagcagcgccacacttcatccgtccactattcaactaccgaactacgaccaactggtcacatctgctatcacttggaataacccacatgatgggaacacttacatgaaaataaaggttgtaaattttggaagcaaagctgttagtctgaatatatctgtaactgggttggaaactgatattcagacatttggatccataaagacggttctcacgtcgggttggctgcgggatgagaactccttccaacagcccgacaaggtggtgccggcggcaagtccaataaccaacgcgggcaagcaaatgggtgttatattgaactcgtactccctgacctcatttgatctcctcttggactcggagtctcaggttcgagcctccatccaagcttatgattagtgtgagatgtgtcgtgtgcgtgcccacaatactcaataccgagatacgggtccccccaaggctccccacaaggctttcaatagaaaatacgatatttgtgaattattgtgaagtacaggcgtacagctggctatgtgtatgagattcaacaaatggtttctacgaccctaataaaggtataaaagcacctttcctcggatatcacacatccgttgtagtctgcactcttgacattttctcttttttagagcatgtacagtgtacctaactaccgcaaactttttgtcctggtgcactacagcgaatgtgccatatataagaataaaaagaagggaaatataaccgtatccatttgtgtgtgtaaccatgtaatcaaggcgtagggatggaggttatagactcaactgatatgttcttgttgggggtttactctgtcgaaggtccttataaaattttcactttagcataaacaaat

SEQ ID NO: 7422 - DNA, 2603 bp, Zea Mays
gacgaattatcatccgtttggccgcttcatttctctccccgcttcggtgctgcctgctggccgaccgccgaagcgacaaccgaggccaccgatcagttgactcccgtctcctcgtcgcagggtctcctcacacgagcacacgaacatcgagccctccccgcaggagcataagacgcttcgcttgatactttatgttggatcagtggcggctcaaactgctcagttgactgtggatgcttcacctcagaatgctcagataatccctggcaatatgtttggcatcttctttgaggaaatcaaccatgctggtgctggtggattgtgggcagagcttgtaagcaacagaggttttgaagctggtggttctaatactccttcaaacattgacccatggttgatcattggggatgaatcaaatattattgtggcaacagatcggtcatcatgttttgctagtaacccaattgcacttcgaatggaagtactttgtggagctagtgaaactaatgcttgcccatcaggaggagttggaatctacaatcctggttactggggcatgaacattgaaagaacaaatgtctatagagttaccatatacatcaggtcatcagaatcggtggagctaatggtttctttaacaagttcagatggtcttcaaaatctagcctctcatacaatcatgggagacaaagaagatttcgttgagtggacgaaggttgaatttgatttgcaatcaaattatataaatactaattcaagacttcagcttacaaccaccaaaagtggcataatttggtttgatcaagtatcacttatgccatcagatacttatatggggcatggtttccgtaaagatcttgcctctatgctggcaaatctgaagcctcgatttctaaaatttccaggtggcaactatgtaatgggaaattaccttataaatgcattccgctggagtgaaactgttggaccatgggaagagagacctggccacttcaatgatgcttgggcctattggactgatgatggacttgggttttttgaatttcttcaactagcagaagaccttggcgcttgccccgtttgggtggtaaatgatggggccagcatctatgaaggagttccatcagcaacaatagctgcatttgtaaaggatgttgttaatggtattgagtttgccaggggagaccccgagactgcatggggttcagttcgtgcagcaatggggcatccagagccctttcagctttattacgtttcaataggaaatcaagaatgttcaaagtactattataaagataactatgtgaagttctactctgcaataaaagcatcctatccagacatcaaaatcatatcaagctgtgacagatctgctatttcatcagacaacccagctgatttgtatgatgtccatgtctatacttcatcaggtgatatgttttccaaatctagaatgtttgataatacagcccgtaccggacccaaggcaattgttagtgaatatgctgtaactggaaatgatgctggccgaggaacactaatagctgctttagctgaagctgcatttctcattggattagaaaggaacagcgacgtggttgagatggcaagttgtgctccactctttgtaaacgacaatgaccaaaggtggaacccagatgctatagtctttaactcatggcagcactatggatgtccaaattactggatgctgcactttttcaaagattcaagcagcgccacacttcatccgtccactattcaactaccgaactacgaccaactggtcacatctgctatcacttggaataacccacatgatgggaacacttacatgaaaataaaggttgtaaattttggaagcaaagctgttagtctgaatatatctgtaactgggttggaaactgatattcagacatttggatccataaagacggttctcacgtcgggttggctgcgggatgagaactccttccaacagcccgacaaggtggtgccggcggcaagtccaataaccaacgcgggcaagcaaatgggtgttatattgaactcgtactccctgacctcatttgatctcctcttggactcggagtctcaggttcgagcctccatccaagcttatgattagtgtgagatgtgtcgtgtgcgtgcccacaatactcaataccgagatacgggtccccccaaggctccccacaaggctttcaatagaaaatacgatatttgtgaattattgtgaagtacaggcgtacagctggctatgtgtatgagattcaacaaatggtttctacgaccctaataaaggtataaaagcacctttcctcggatatcacacatccgttgtagtctgcactcttgacattttctcttttttagagcatgtacagtgtacctaactaccgcaaactttttgtcctggtgcactacagcgaatgtgccatatataagaataaaaagaagggaaatataaccgtatccatttgtgtgtgtaaccatgtaatcaaggcgtagggatggaggttatagactcaactgatatgttcttgttgggggtttactctgtcgaaggtccttataaaattttcactttagcataaacaaat

SEQ ID NO: 7423 - DNA, 2405 bp, Zea Mays
gacgaattatcatccgtttggccgcttcatttctctccccgcttcggtgctgcctgctggccgaccgccgaagcgacaaccgaggccaccgatcagttgactcccgtctcctcgtcgcagggtctcctcacacgagcacacgaacatcgagccctccccgcaggagcataagacgcttcgcttgttttctaaaacattgctggggttgcagcatgtgtacttgggcatagagggattgttacatcgagctagtgctttggtctctgctgtagcagagcgcaatgggcatccgggcttgttcggtttgctggttgttctatgtgctggttcttgtctgttccttgtgtcagatactttatgttggatcagtggcggctcaaactgctcagttgactgtggatgcttcacctcagaatgctcagataatccctggcaatatgtttggcatcttctttgaggaaatcaaccatgctggtgctggtggattgtgggcagagcttgtaagcaacagaggttttgaagctggtggttctaatactccttcaaacattgacccatggttgatcattggggatgaatcaaatattattgtggcaacagatcggtcatcatgttttgctagtaacccaattgcacttcgaatggaagtactttgtggagctagtgaaactaatgcttgcccatcaggaggagttggaatctacaatcctggttactggggcatggggcatggtttccgtaaagatcttgcctctatgctggcaaatctgaagcctcgatttctaaaatttccaggtggcaactatgtaatgggaaattaccttataaatgcattccgctggagtgaaactgttggaccatgggaagagagacctggccacttcaatgatgcttgggcctattggactgatgatggacttgggttttttgaatttcttcaactagcagaagaccttggcgcttgccccgtttgggtggtaaatgatggggccagcatctatgaaggagttccatcagcaacaatagctgcatttgtaaaggatgttgttaatggtattgagtttgccaggggagaccccgagactgcatggggttcagttcgtgcagcaatggggcatccagagccctttcagctttattacgtttcaataggaaatcaagaatgttcaaagtactattataaagataactatgtgaagttctactctgcaataaaagcatcctatccagacatcaaaatcatatcaagctgtgacagatctgctatttcatcagacaacccagctgatttgtatgatgtccatgtgatatgttttccaaatctagaatgtttgataatacagcccgtaccggacccaaggcaattgttagtgaatatgctgtaactggaaatgatgctggccgaggaacactaatagctgctttagctgaagctgcatttctcattggattagaaaggaacagcgacgtggttgagatggcaagttgtgctccactctttgtaaacgacaatgaccaaaggtggaacccagatgctatagtctttaactcatggcagcactatggatgtccaaattactggatgctgcactttttcaaagattcaagcagcgccacacttcatccgtccactattcaactaccgaactacgaccaactggtcacatctgctatcacttggaataacccacatgatgggaacacttacatgaaaataaaggttgtaaattttggaagcaaagctgttagtctgaatatatctgtaactgggttggaaactgatattcagacatttggatccataaagacggttctcacgtcgggttggctgcgggatgagaactccttccaacagcccgacaaggtggtgccggcggcaagtccaataaccaacgcgggcaagcaaatgggtgttatattgaactcgtactccctgacctcatttgatctcctcttggactcggagtctcaggttcgagcctccatccaagcttatgattagtgtgagatgtgtcgtgtgcgtgcccacaatactcaataccgagatacgggtccccccaaggctccccacaaggctttcaatagaaaatacgatatttgtgaattattgtgaagtacaggcgtacagctggctatgtgtatgagattcaacaaatggtttctacgaccctaataaagagcatgtacagtgtacctaactaccgcaaactttttgtcctggtgcactacagcgaatgtgccatatataagaataaaaagaagggaaatataaccgtatccatttgtgtgtgtaaccatgtaatcaaggcgtagggatggaggttatagactcaactgatatgttcttgttgggggtttactctgtcgaaggtccttataaaattttcactttagcataaacaaat

SEQ ID NO: 7424 - DNA, 2632 bp, Zea Mays
ccagctctgacgaattatcatccgtttggccgcttcatttctctccccgcttcggtgctgcctgctggccgaccgccgaagcgacaaccgaggccaccgatcagttgactcccgtctcctcgtcgcagggtctcctcacacgagcacacgaacatcgagccctccccgcaggagcataagacgcttcgcttgttttctaaaacattgctggggttgcagcatgtgtacttgggcatagagggattgttacatcgagctagtgctttggtctctgctgtagcagagcgcaatgggcatccgggcttgttcggtttgctggttgttctatgtgctggttcttgtctgttccttgtgtcagatactttatgttggatcagtggcggctcaaactgctcagttgactgtggatgcttcacctcagaatgctcagataatccctggcaatatgtttggcatcttctttgaggaaatcaaccatgctggtgctggtggattgtgggcagagcttgtaagcaacagaggttttgaagctggtggttctaatactccttcaaacattgacccatggttgatcattggggatgaatcaaatattattgtggcaacagatcggtcatcatgttttgctagtaacccaattgcacttcgaatggaagtactttgtggagctagtgaaactaatgcttgcccatcaggaggagttggaatctacaatcctggttactggggcatgaacattgaaagaacaaatgtctatagagttaccatatacatcaggtcatcagaatcggtggagctaatggtttctttaacaagttcagatggtcttcaaaatctagcctctcatacaatcatgggagacaaagaagatttcgttgagtggacgaaggttgaatttgatttgcaatcaaattatataaatactaattcaagacttcagcttacaaccaccaaaagtggcataatttggtttgatcaagtatcacttatgccatcagatacttatatggggcatggtttccgtaaagatcttgcctctatgctggcaaatctgaagcctcgatttctaaaatttccaggtggcaactatgtaatgggaaattaccttataaatgcattccgctggagtgaaactgttggaccatgggaagagagacctggccacttcaatgatgcttgggcctattggactgatgatggacttgggttttttgaatttcttcaactagcagaagaccttggcgcttgccccgtttgggtggtaaatgatggggccagcatctatgaaggagttccatcagcaacaatagctgcatttgtaaagataactatgtgaagttctactctgcaataaaagcatcctatccagacatcaaaatcatatcaagctgtgacagatctgctatttcatcagacaacccagctgatttgtatgatgtccatgtctatacttcatcaggtgatatgttttccaaatctagaatgtttgataatacagcccgtaccggacccaaggcaattgttagtgaatatgctgtaactggaaatgatgctggccgaggaacactaatagctgctttagctgaagctgcatttctcattggattagaaaggaacagcgacgtggttgagatggcaagttgtgctccactctttgtaaacgacaatgaccaaaggtggaacccagatgctatagtctttaactcatggcagcactatggatgtccaaattactggatgctgcactttttcaaagattcaagcagcgccacacttcatccgtccactattcaactaccgaactacgaccaactggtcacatctgctatcacttggaataacccacatgatgggaacacttacatgaaaataaaggttgtaaattttggaagcaaagctgttagtctgaatatatctgtaactgggttggaaactgatattcagacatttggatccataaagacggttctcacgtcgggttggctgcgggatgagaactccttccaacagcccgacaaggtggtgccggcggcaagtccaataaccaacgcgggcaagcaaatgggtgttatattgaactcgtactccctgacctcatttgatctcctcttggactcggagtctcaggttcgagcctccatccaagcttatgattagtgtgagatgtgtcgtgtgcgtgcccacaatactcaataccgagatacgggtccccccaaggctccccacaaggctttcaatagaaaatacgatatttgtgaattattgtgaagtacaggcgtacagctggctatgtgtatgagattcaacaaatggtttctacgaccctaataaaggtataaaagcacctttcctcggatatcacacatccgttgtagtctgcactcttgacattttctcttttttagagcatgtacagtgtacctaactaccgcaaactttttgtcctggtgcactacagcgaatgtgccatatataagaataaaaagaagggaaatataaccgtatccatttgtgtgtgtaaccatgtaatcaaggcgtagggatggaggttatagactcaactgatatgttcttgttgggggtttactctgtcgaaggtccttataaaattttcactttagcataaacaaat

SEQ ID NO: 7425 - DNA, 2715 bp, Zea Mays
cttggcccctccagctctgacgaattatcatccgtttggccgcttcatttctctccccgcttcggtgctgcctgctggccgaccgccgaagcgacaaccgaggccaccgatcagttgactcccgtctcctcgtcgcagggtctcctcacacgagcacacgaacatcgagccctccccgcaggagcataagacgcttcgcttgttttctaaaacattgctggggttgcagcatgtgtacttgggcatagagggattgttacatcgagctagtgctttggtctctgctgtagcagagcgcaatgggcatccgggcttgttcggtttgctggttgttctatgtgctggttcttgtctgttccttgtgtcagatactttatgttggatcagtggcggctcaaactgctcagttgactgtggatgcttcacctcagaatgctcagataatccctggcaatatgtttggcatcttctttgaggaaatcaaccatgctggtgctggtggattgtgggcagagcttgtaagcaacagaggttttgaagctggtggttctaatactccttcaaacattgacccatggttgatcattggggatgaatcaaatattattgtggcaacagatcggtcatcatgttttgctagtaacccaattgcacttcgaatggaagtactttgtggagctagtgaaactaatgcttgcccatcaggaggagttggaatctacaatcctggttactggggcatgaacattgaaagaacaaatgtctatagagttaccatatacatcaggtcatcagaatcggtggagctaatggtttctttaacaagttcagatggtcttcaaaatctagcctctcatacaatcatgggagacaaagaagatttcgttgagtggacgaaggttgaatttgatttgcaatcaaattatataaatactaattcaagacttcagcttacaaccaccaaaagtggcataatttggtttgatcaagtatcacttatgccatcagatacttatatggggcatggtttccgtaaagatcttgcctctatgctggcaaatctgaagcctcgatttctaaaatttccaggtggcaactatgtaatgggaaattaccttataaatgcattccgctggagtgaaactgttggaccatgggaagagagacctggccacttcaatgatgcttgggcctattggactgatgatggacttgggttttttgaatttcttcaactagcagaagaccttggcgcttgccccgtttgggtggtaaatgatggggccagcatctatgaaggagttccatcagcaacaatagctgcatttgtaaaggatgttgttaatggtattgagtttgccaggggagaccccgagactgcatggggttcagttcgtgcagcaatggggcatccagagccctttcagctttattacgtttcaataggaaatcaagaatgttcaaagtactattataaagataactatgtgaagttctactctgcaataaaagcatcctatccagacatcaaaatcatatcaagctgtgacagatctgctatttcatcagacaacccagctgatttgtatgatgtccatgtctatacttcatcaggtgatatgttttccaaatctagaatgtttgataatacagcccgtaccggacccaaggcaattgttagtgaatatgctgtaactggaaatgatgctggccgaggaacactaatagctgctttagctgaagctgcatttctcattggattagaaaggaacagcgacgtggttgagatggcaagttgtgctccactctttgtaaacgacaatgaccaaaggtggaacccagatgctatagtctttaactcatggcagcactatggatgtccaaattactggatgctgcactttttcaaagattcaagcagcgccacacttcatccgtccactattcaactaccgaactacgaccaactggtcacatctgctatcacttggaataacccacatgatgggaacacttacatgaaaataaaggttgtaaattttggaagcaaagctgttagtctgaatatatctgtaactgggttggaaactgatattcagacatttggatccataaagacggttctcacgtcgggttggctgcgggatgagaactccttccaacagcccgacaaggtggtgccggcggcaagtccaataaccaacgcgggcaagcaaatgggtgttatattgaactcgtactccctgacctcatttgatctcctcttggactcggagtctcaggttcgagcctccatccaagcttatgattagtgtgagatgtgtcgtgtgcgtgcccacaatactcaataccgagatacgggtccccccaaggctccccacaaggctttcaatagaaaatacgatatttgtgaattattgtgaagtacaggcgtacagctggctatgtgtatgagattcaacaaatggtttctacgaccctaataaagagcatgtacagtgtacctaactaccgcaaactttttgtcctggtgcactacagcgaatgtgccatatataagaataaaaagaagggaaatataaccgtatccatttgtgtgtgtaaccatgtaatcaaggcgtagggatggaggttatagactcaactgatatgttcttgttgggggtttactctgtcgaaggtccttataaaattttcactttagcataaacaaat

SEQ ID NO: 7426 - DNA, 3221 bp, Zea Mays
gtttgttctaacgattcgaaattctctcctcacttgtcttccttataaaaccagactctgcataacatcttggcatgagtagccatagtttgttagagcattcccccaaggaatataacaccattgtgtgacgagcaacccttcaccaaaaactaaggactgataaactgcaagagaccgttcctatcaggattgtggagtctgcaaccagatatcaatgcataacagaattgaagaggtatgagatgtaatgtgtgcatgttatttggtttgctcaaacaaaggagaaaaaaagagagatctcctcatgcgtcctaacatttgagactgcaatgtcttcatgccagatgtatcatcatcaacaacagcttcagagccacagtcatttcctgtcttctaggcagacattccctccagaaaggcacatgcttctgcaaggagggagcattccagcagagccagggcttgtgctttccactgatgctaaacctaggttaaaatggacacctgaactacatgagcgttttgtggaggcggtaaaccaacttggtgggcctgacaaagctacaccgaagacaatcatgagactcatgggtgtccccggactaacactataccaccttaagagtcatcttcaggctaagcaaaaacatccatgcccaagctaatggtgtaaatgcaaaaaatgtgattggttgcaccatggcaatggacaaaccacttgaaggaaatggatcaccagctagccacttaaaccttggaacccagacaaacaaatctgtgcacataggtgaagcccttcagatgcaaattgaagtacagcgccgactgcatgagcaactagaggtacagaagcataaaaaataaatcatattactaactaaattaccatttaaacattccttacaaagacataactgattcatccctagcagagttattgtgtaaaagactggagtagattgtctggacaaatatatagcaaaatttatcccaaaccaggctttaagtagatctaggacactcatcaaatgaaggtttattttgccatgaaagtacctgatgtacagacatccaaataaagaaaaattacgtagcttcaccatcagttggtaaacttcagggacatggtcagatcatatataatgttacatgtcaaaaaaatggcatcccaatcaccattcctttaagaaaaaaacatcacttataattgctccaatagtccaatcaactcaattgttttagccaagcactagttcctatattaccgatagagtaaaaagtccaagagaaagtatgtaatatatgtaggggtggtaatggatcacgatccaaatatttcttcacaatttgtttgagcctttaatcaattttagttcaaagatgaataaaaatagagccgatccaatctgatttttaaattttatagtgtaaaatttagagcctattgccacccctaaatgtatgcatatctttagctttagagcatccacatattttgtccttcacacaatgaacatctatagctcatttatcaacaaaagtatatgctggacaccagcatatgacttctaagaggctcacaatgcaagagggcctagtcatggtggtctaggaacataatcttgtcatacgtttaactgaacacagttttaaaaagaacaagtaaaaactaatgatgctaaaataagtttaaacaaactgaccaattgtaaatccagattttattcttttcatgtcacaagctctttactgttaatggtcaagtactgataatgtgataccttacacataaacgacgcctttcaacaggtacaaagacatttgcaactccgcattgaagcacaagggaagtacctacaatctgtgctagaaaaggcacaggagacactttcaaagcagaatgcagggtcagtcggtgtagaaaccgcgaagatgcaactgtcagaattagtctcaaaagtatcgacagaatgcctccagcatgcatttacaggctttgaggagattgatggttcccaaattctacaaggccataccatccaacttggcgatgggtcagttgacagctgcttaactgcctgtgacggctcacagaaagatcaagatatcctgtcaatcagtctttccgctcacagaggaaaggagataggaggcatgacctttgatatacaagagaaagaaagaggaagagaggatttgtttcttgacaagctaagcatgacgcctccaggccaactagacaggcgtgagagaggaagttttagtatgacacggaaggcagcaaaactggatctgaacatcaatgataccactgatgggccacagaactgcaagaaaattgacttgaatgggttcaactggacctaggaagagttagcaaaagaccttgcaaattaaatctgacttgattcatcaagagtgacaagcttataagcttgagattggctccttctgccaagatagcagcaaagagaggaagtgaaaccgaatgagttattccaaagaccagcagcatcgacatatcctccatggcaggacctgggtgatcctcggaacagctgcgctgtcggcccatcacgattcagcgaaataagtgatgaaattacaataagtagggcatgtagattggtagagtgtatttgagagagtctagtgttctcctccggctataccttattgtgattctgtacacaagcatataaatacaacgatttttgtcacaagtgattgttgctgggattggcaaatgcccaggaatgttttgccatcagctaagcgtgcctacaccctgctgccaaatcatgaatctacaagacagcaactggtgcacaaaacataagggacggacggatgcatatgcatcgtacaaaacacctgcaccgtgtccttgttggattatacataatggtttcaatgtttcgtttcatgcggctatgaagcgggaatgggacagatttactcccaacacgcaaatccaataaggtatcacgaccgctcttcgatgacaaggcagataaatcgtaaatcagctgctaagctgcgaaggtaaataaatcgatcgtacctcccaactgatctaggtggcggcggccgttcgatgagtgcagaaggggatcttctcctgctaaacaatcaccgccgccgccgccgcctctttcctcacaaaagctaaacaacatttgctccaaccaatttgtcggtttgatatgaagttcgtg

SEQ ID NO: 7427 - DNA, 2267 bp, Zea Mays
ccaggcttgagtgtttgttctaacgattcgaaattctctcctcacttgtcttccttataaaaccagactctgcataacatcttggcatgagtagccatagtttgttagagcattcccccaaggaatataacaccattgtgtgacgagcaacccttcaccaaaaactaaggactgataaactgcaagagaccgttcctatcaggattgtggagtctgcaaccagatatcaatgcataacagaattgaagaggtatgagatgtaatgtgtgcatgttatttggtttgctcaaacaaaggagaaaaaaagagagatctcctcatgcgtcctaacatttgagactgcaatgtcttcatgccagatgtatcatcatcaacaacagcttcagagccacagtcatttcctgtcttctaggcagacattccctccagaaaggcacatgcttctgcaaggagggagcattccagcagagccagggcttgtgctttccactgatgctaaacctaggttaaaatggacacctgaactacatgagcgttttgtggaggcggtaaaccaacttggtgggcctgacaaagctacaccgaagacaatcatgagactcatgggtgtccccggactaacactataccaccttaagagtcatcttcaggctaagcaaaaacatccatgcccaagctaatggtgtaaatgcaaaaaatgtgattggttgcaccatggcaatggacaaaccacttgaaggaaatggatcaccagctagccacttaaaccttggaacccagacaaacaaatctgtgcacataggtgaagcccttcagatgcaaattgaagtacagcgccgactgcatgagcaactagaggtacaaagacatttgcaactccgcattgaagcacaagggaagtacctacaatctgtgctagaaaaggcacaggagacactttcaaagcagaatgcagggtcagtcggtgtagaaaccgcgaagatgcaactgtcagaattagtctcaaaagtatcgacagaatgcctccagcatgcatttacaggctttgaggagattgatggttcccaaattctacaaggccataccatccaacttggcgatgggtcagttgacagctgcttaactgcctgtgacggctcacagaaagatcaagatatcctgtcaatcagtctttccgctcacagaggaaaggagataggaggcatgacctttgatatacaagagaaagaaagaggaagagaggatttgtttcttgacaagctaagcatgacgcctccaggccaactagacaggcgtgagagaggaagttttagtatgacacggaaggcagcaaaactggatctgaacatcaatgataccactgatgggccacagaactgcaagaaaattgacttgaatgggttcaactggacctaggaagagttagcaaaagaccttgcaaattaaatctgacttgattcatcaagagtgacaagcttataagcttgagattggctccttctgccaagatagcagcaaagagaggaagtgaaaccgaatgagttattccaaagaccagcagcatcgacatatcctccatggcaggacctgggtgatcctcggaacagctgcgctgtcggcccatcacgattcagcgaaataagtgatgaaattacaataagtagggcatgtagattggtagagtgtatttgagagagtctagtgttctcctccggctataccttattgtgattctgtacacaagcatataaatacaacgatttttgtcacaagtgattgttgctgggattggcaaatgcccaggaatgttttgccatcagctaagcgtgcctacaccctgctgccaaatcatgaatctacaagacagcaactggtgcacaaaacataagggacggacggatgcatatgcatcgtacaaaacacctgcaccgtgtccttgttggattatacataatggtttcaatgtttcgtttcatgcggctatgaagcgggaatgggacagatttactcccaacacgcaaatccaataaggtatcacgaccgctcttcgatgacaaggcagataaatcgtaaatcagctgctaagctgcgaaggtaaataaatcgatcgtacctcccaactgatctaggtggcggcggccgttcgatgagtgcagaaggggatcttctcctgctaaacaatcaccgccgccgccgccgcctctttcctcacaaaagctaaacaacatttgctccaaccaatttgtcggtttgatatgaagttcgtg

SEQ ID NO: 7428 - DNA, 2340 bp, Zea Mays
cttttatctgcaagaagaataaacttaacaaatatgtatgcttgcaaaccccttactcctcttaatatcaactatatttgttagtgctggaatcagaatactaatgtgtttgcagaattgacaaataaaaagattggtgcgcatagggtccacaggtaccttaaggaataaggataatatctttatacctcttttcagttgctgccaggattggtccaggcttgagtgtttgttctaacgattcgaaattctctcctcacttgtcttccttataaaaccagactctgcataacatcttggcatgagtagccatagtttgttagagcattcccccaaggaatataacaccattgtgtgacgagcaacccttcaccaaaaactaaggactgataaactgcaagagaccgttcctatcaggattgtggagtctgcaaccagatatcaatgcataacagaattgaagaggtatgagatgtaatgtgtgcatgttatttggtttgctcaaacaaaggagaaaaaaagagagatctcctcatgcgtcctaacatttgagactgcaatgtcttcatgccagatgtatcatcatcaacaacagcttcagagccacagtcatttcctgtcttctaggcagacattccctccagaaaggcacatgcttctgcaaggagggagcattccagcagagccagggcttgtgctttccactgatgctaaacctagcagttatcggcctccaattaagcttaatactgaatgccctttctgctcttcagtgattggttgcaccatggcaatggacaaaccacttgaaggaaatggatcaccagctagccacttaaaccttggaacccagacaaacaaatctgtgcacataggtgaagcccttcagatgcaaattgaagtacagcgccgactgcatgagcaactagaggtacaaagacatttgcaactccgcattgaagcacaagggaagtacctacaatctgtgctagaaaaggcacaggagacactttcaaagcagaatgcagggtcagtcggtgtagaaaccgcgaagatgcaactgtcagaattagtctcaaaagtatcgacagaatgcctccagcatgcatttacaggctttgaggagattgatggttcccaaattctacaaggccataccatccaacttggcgatgggtcagttgacagctgcttaactgcctgtgacggctcacagaaagatcaagatatcctgtcaatcagtctttccgctcacagaggaaaggagataggaggcatgacctttgatatacaagagaaagaaagaggaagagaggatttgtttcttgacaagctaagcatgacgcctccaggccaactagacaggcgtgagagaggaagttttagtatgacacggaaggcagcaaaactggatctgaacatcaatgataccactgatgggccacagaactgcaagaaaattgacttgaatgggttcaactggacctaggaagagttagcaaaagaccttgcaaattaaatctgacttgattcatcaagagtgacaagcttataagcttgagattggctccttctgccaagatagcagcaaagagaggaagtgaaaccgaatgagttattccaaagaccagcagcatcgacatatcctccatggcaggacctgggtgatcctcggaacagctgcgctgtcggcccatcacgattcagcgaaataagtgatgaaattacaataagtagggcatgtagattggtagagtgtatttgagagagtctagtgttctcctccggctataccttattgtgattctgtacacaagcatataaatacaacgatttttgtcacaagtgattgttgctgggattggcaaatgcccaggaatgttttgccatcagctaagcgtgcctacaccctgctgccaaatcatgaatctacaagacagcaactggtgcacaaaacataagggacggacggatgcatatgcatcgtacaaaacacctgcaccgtgtccttgttggattatacataatggtttcaatgtttcgtttcatgcggctatgaagcgggaatgggacagatttactcccaacacgcaaatccaataaggtatcacgaccgctcttcgatgacaaggcagataaatcgtaaatcagctgctaagctgcgaaggtaaataaatcgatcgtacctcccaactgatctaggtggcggcggccgttcgatgagtgcagaaggggatcttctcctgctaaacaatcaccgccgccgccgccgcctctttcctcacaaaagctaaacaacatttgctccaaccaatttgtcggtttgatatgaagttcgtg

SEQ ID NO: 7429 - DNA, 2788 bp, Zea Mays
tatgcttattccaatattccatgctttgcttttgtgcagtcccaaggaaggcatcactaaggaaataagttcctttcactttatttatatgaagaacttttattgaattcttcttctagatgaatctggtcaaaaagaaatttaaaacttgctctcgtatggatgataaaaattattctcctgtcgtctatgtgccatgcttgtataacctgaaggcatacatttgctattgaatccatgattgcttaacatacagaatcctaaccaatgctgtcctttgatttcatgatacaggtatggtggagagtggaattagtgctgaacatataagatatagtaggcctacaagtgcaaaggcattattacaaactacatctcaaaagttcttcctgagaacaaggttcccacttttatctgcaagaagaataaacttaacaaatatgtatgcttgcaaaccccttactcctcttaatatcaactatatttgttagtgctggaatcagaatactaatgtgtttgcagaattgacaaataaaaagattggtgcgcatagggtccacaggtaccttaaggaataaggataatatctttatacctcttttcagttgctgccaggattggtccaggcttgagtgtttgttctaacgattcgaaattctctcctcacttgtcttccttataaaaccagactctgcataacatcttggcatgagtagccatagtttgttagagcattcccccaaggaatataacaccattgtgtgacgagcaacccttcaccaaaaactaaggactgataaactgcaagagaccgttcctatcaggattgtggagtctgcaaccagatatcaatgcataacagaattgaagagatgtatcatcatcaacaacagcttcagagccacagtcatttcctgtcttctaggcagacattccctccagaaaggcacatgcttctgcaaggagggagcattccagcagagccagggcttgtgctttccactgatgctaaacctaggttaaaatggacacctgaactacatgagcgttttgtggaggcggtaaaccaacttggtgggcctgacaaagctacaccgaagacaatcatgagactcatgggtgtccccggactaacactataccaccttaagagtcatcttcagaaatacaggctaagcaaaaacatccatgcccaagctaatggtgtaaatgcaaaaaatgtgattggttgcaccatggcaatggacaaaccacttgaaggaaatggatcaccagctagccacttaaaccttggaacccagacaaacaaatctgtgcacataggtgaagcccttcagatgcaaattgaagtacagcgccgactgcatgagcaactagaggtacaaagacatttgcaactccgcattgaagcacaagggaagtacctacaatctgtgctagaaaaggcacaggagacactttcaaagcagaatgcagggtcagtcggtgtagaaaccgcgaagatgcaactgtcagaattagtctcaaaagtatcgacagaatgcctccagcatgcatttacaggctttgaggagattgatggttcccaaattctacaaggccataccatccaacttggcgatgggtcagttgacagctgcttaactgcctgtgacggctcacagaaagatcaagatatcctgtcaatcagtctttccgctcacagaggaaaggagataggaggcatgacctttgatatacaagagaaagaaagaggaagagaggatttgtttcttgacaagctaagcatgacgcctccaggccaactagacaggcgtgagagaggaagttttagtatgacacggaaggcagcaaaactggatctgaacatcaatgataccactgatgggccacagaactgcaagaaaattgacttgaatgggttcaactggacctaggaagagttagcaaaagaccttgcaaattaaatctgacttgattcatcaagagtgacaagcttataagcttgagattggctccttctgccaagatagcagcaaagagaggaagtgaaaccgaatgagttattccaaagaccagcagcatcgacatatcctccatggcaggacctgggtgatcctcggaacagctgcgctgtcggcccatcacgattcagcgaaataagtgatgaaattacaataagtagggcatgtagattggtagagtgtatttgagagagtctagtgttctcctccggctataccttattgtgattctgtacacaagcatataaatacaacgatttttgtcacaagtgattgttgctgggattggcaaatgcccaggaatgttttgccatcagctaagcgtgcctacaccctgctgccaaatcatgaatctacaagacagcaactggtgcacaaaacataagggacggacggatgcatatgcatcgtacaaaacacctgcaccgtgtccttgttggattatacataatggtttcaatgtttcgtttcatgcggctatgaagcgggaatgggacagatttactcccaacacgcaaatccaataaggtatcacgaccgctcttcgatgacaaggcagataaatcgtaaatcagctgctaagctgcgaaggtaaataaatcgatcgtacctcccaactgatctaggtggcggcggccgttcgatgagtgcagaaggggatcttctcctgctaaacaatcaccgccgccgccgccgcctctttcctcacaaaagctaaacaacatttgctccaaccaatttgtcggtttgatatgaagttcgtg

SEQ ID NO: 7430 - DNA, 4860 bp, Zea Mays
cttaacaagcaacagctgaatgcaatccccgcgcaaagattaaagctctccgttcccctccccttgctcgctttcgtcggattcaaggcgaaagataaagctacggccagaaagagtttattccatgttccgacgcgcagtggtctcagcttatgcacctgacgaccggccataagtgaacacaattccccagccaatgctcacggaatcatgcacagggtgatttttggttttgggacgaaataaatgcacaggcatgcctcccttgaacaggaatgggggtacagatcatatcatatcatatcgggaggatggttttcttatcctaatggatggaacaatggcctataagcatagggatccctggaacaacttgagagaagactggtttaatcacgaaatggcaaggaaacttttattttcaaagaagatgctactgccttggaccactcgtactagttgcttttcaaagaatgcctgtcaagcttttattttgaaaaggcccgagaggatcttaatgcaatccattatatctgatttaccatgtcaatgatttcatttctgaggtacaacttaccaggtggcacaccttgcatttgtgactcgcaatagccataacaaatggaatcatggaaaaaaaatactagactattcccttgtggaaaagctggactacagaacaaatcaaccggaagggactcttacagcacaaaattgtagcacctcactatgtactgaaaaaaaacactctagataagacaaaggtaagcgccgcctattccatatcactggacttcatggcagttagcggtatcaaacattgacactgagccagttttgctcgagtatggaggggagaataaacaaggctaaccatgtcggttcagataagcatgtttcaaagcaaaagcaacatagagcagtgaagtaaaggaactaaccgtcatttttaagccccaactttctgcgccttatgtagaacagatagtagccaaactcagaggactccatacagatgcacagcccatcggattcgtctacccactttccgtttccctgatagccgaacaagtacaaaacttatatgaggagacaaaagagaatcatatgcttattccaatattccatgctttgcttttgtgcagtcccaaggaaggcatcactaaggaaataagttcctttcactttatttatatgaagaacttttattgaattcttcttctagatgaatctggtcaaaaagaaatttaaaacttgctctcgtatggatgataaaaattattctcctgtcgtctatgtgccatgcttgtataacctgaaggcatacatttgctattgaatccatgattgcttaacatacagaatcctaaccaatgctgtcctttgatttcatgatacaggtatggtggagagtggaattagtgctgaacatataagatatagtaggcctacaagtgcaaaggcattattacaaactacatctcaaaagttcttcctgagaacaaggttcccacttttatctgcaagaagaataaacttaacaaatatgtatgcttgcaaaccccttactcctcttaatatcaactatatttgttagtgctggaatcagaatactaatgtgtttgcagaattgacaaataaaaagattggtgcgcatagggtccacaggtaccttaaggaataaggataatatctttatacctcttttcagttgctgccaggattggtccaggcttgagtgtttgttctaacgattcgaaattctctcctcacttgtcttccttataaaaccagactctgcataacatcttggcatgagtagccatagtttgttagagcattcccccaaggaatataacaccattgtgtgacgagcaacccttcaccaaaaactaaggactgataaactgcaagagaccgttcctatcaggattgtggagtctgcaaccagatatcaatgcataacagaattgaagagatgtatcatcatcaacaacagcttcagagccacagtcatttcctgtcttctaggcagacattccctccagaaaggcacatgcttctgcaaggagggagcattccagcagagccagggcttgtgctttccactgatgctaaacctaggttaaaatggacacctgaactacatgagcgttttgtggaggcggtaaaccaacttggtgggcctgacaaagctacaccgaagacaatcatgagactcatgggtgtccccggactaacactataccaccttaagagtcatcttcagaaatacaggctaagcaaaaacatccatgcccaagctaatggtgtaaatgcaaaaaatgtgattggttgcaccatggcaatggacaaaccacttgaaggaaatggatcaccagctagccacttaaaccttggaacccagacaaacaaatctgtgcacataggtgaagcccttcagatgcaaattgaagtacagcgccgactgcatgagcaactagaggtacagaagcataaaaaataaatcatattactaactaaattaccatttaaacattccttacaaagacataactgattcatccctagcagagttattgtgtaaaagactggagtagattgtctggacaaatatatagcaaaatttatcccaaaccaggctttaagtagatctaggacactcatcaaatgaaggtttattttgccatgaaagtacctgatgtacagacatccaaataaagaaaaattacgtagcttcaccatcagttggtaaacttcagggacatggtcagatcatatataatgttacatgtcaaaaaaatggcatcccaatcaccattcctttaagaaaaaaacatcacttataattgctccaatagtccaatcaactcaattgttttagccaagcactagttcctatattaccgatagagtaaaaagtccaagagaaagtatgtaatatatgtaggggtggtaatggatcacgatccaaatatttcttcacaatttgtttgagcctttaatcaattttagttcaaagatgaataaaaatagagccgatccaatctgatttttaaattttatagtgtaaaatttagagcctattgccacccctaaatgtatgcatatctttagctttagagcatccacatattttgtccttcacacaatgaacatctatagctcatttatcaacaaaagtatatgctggacaccagcatatgacttctaagaggctcacaatgcaagagggcctagtcatggtggtctaggaacataatcttgtcatacgtttaactgaacacagttttaaaaagaacaagtaaaaactaatgatgctaaaataagtttaaacaaactgaccaattgtaaatccagattttattcttttcatgtcacaagctctttactgttaatggtcaagtactgataatgtgataccttacacataaacgacgcctttcaacaggtacaaagacatttgcaactccgcattgaagcacaagggaagtacctacaatctgtgctagaaaaggcacaggagacactttcaaagcagaatgcagggtcagtcggtgtagaaaccgcgaagatgcaactgtcagaattagtctcaaaagtatcgacagaatgcctccagcatgcatttacaggctttgaggagattgatggttcccaaattctacaaggccataccatccaacttggcgatgggtcagttgacagctgcttaactgcctgtgacggctcacagaaagatcaagatatcctgtcaatcagtctttccgctcacagaggaaaggagataggaggcatgacctttgatatacaagagaaagaaagaggaagagaggatttgtttcttgacaagctaagcatgacgcctccaggccaactagacaggcgtgagagaggaagttttagtatgacacggaaggcagcaaaactggatctgaacatcaatgataccactgatgggccacagaactgcaagaaaattgacttgaatgggttcaactggacctaggaagagttagcaaaagaccttgcaaattaaatctgacttgattcatcaagagtgacaagcttataagcttgagattggctccttctgccaagatagcagcaaagagaggaagtgaaaccgaatgagttattccaaagaccagcagcatcgacatatcctccatggcaggacctgggtgatcctcggaacagctgcgctgtcggcccatcacgattcagcgaaataagtgatgaaattacaataagtagggcatgtagattggtagagtgtatttgagagagtctagtgttctcctccggctataccttattgtgattctgtacacaagcatataaatacaacgatttttgtcacaagtgattgttgctgggattggcaaatgcccaggaatgttttgccatcagctaagcgtgcctacaccctgctgccaaatcatgaatctacaagacagcaactggtgcacaaaacataagggacggacggatgcatatgcatcgtacaaaacacctgcaccgtgtccttgttggattatacataatggtttcaatgtttcgtttcatgcggctatgaagcgggaatgggacagatttactcccaacacgcaaatccaataaggtatcacgaccgctcttcgatgacaaggcagataaatcgtaaatcagctgctaagctgcgaaggtaaataaatcgatcgtacctcccaactgatctaggtggcggcggccgttcgatgagtgcagaaggggatcttctcctgctaaacaatcaccgccgccgccgccgcctctttcctcacaaaagctaaacaacatttgctccaaccaatttgtcggtttgatatgaagttcgtg

SEQ ID NO: 7431 - DNA, 1948 bp, Zea Mays
ggagtcaggagaatccccggccgcccgtgcctttccgcctcaccacacgagtcacacggctcacacccacaccgcgccgcacccgtcccagcacccaactcaaccgctgctatcagctccagatccgaccgcctcgatcgggacgcgagcatctccatagcgaccaaccggccgccgcgggtgaccaacccagccgcgctttcccccgtcagatcccctcctagccagccatggccgagccccgttccgccctccgcccgcattgccactgttagtgccatggccaccgcctgccggagcccgctcgtctggctcttcgcgctcgccgccgcgctattcttcctctcctggtacctcctcctcaactccgccgcgggcccaaccgccgcccgccgccccaaccaggggctccgcctcggcggccccggtaggaaatgcgaccccgcggaggcgctgctgcgagtgttcatgtacgacctgccccccgagttccacttcggactgctcgactggaagcccccgggcttcggcggcggcgtgtggcccgacgtcagggacggcgtgccggactacccgggggggctcaaccttcagcacagcatcgagtactggctcaccctcgacctcttggcctccgagcagggcgcgcccacgccctgcgcagcggcgcgggtgcgccacgcggcggacgccgacgtcgtcttcgtgcctttcttcgcctcgctcagcttcaaccgccactcccgggtggtgccgcccgcgcggaacagcgaggaccgcgcgctgcaacggaggctcctcgagttcctcgccgcgcggcctgagtggcgcaggaccggcgggcgggaccacgtcgtgctcgcgcatcaccccaacggtatgctcgacgcgcgctacaggttctggccctgcgtcttcgtgctctgcgacttcgggaggtacccgcccagcgtcgccaacctcgacaaggacatcatcgcgccctatcggcacctcgtcgccaacttcgctaatgacaccgccggatacgacgaccggccgacgctgctctacttccaaggcgccatctacaggaaggatggtggttccattcggcaagaactgtattaccttctgaaagacgagaaagatgtgcatttctcatttggaagtgtagctggtaatgggatcgagcaggcaacacaaggtatgcggtcatccaagttctgcctcaacattgcaggtgacactccatcctccaaccgcctcttcgactccattgtcagtcactgtgttcccgtcatcatcagcgatgagattgagctcccgtttgaggatgtcctcgactattcaaagttcagcgtcatagtacgtggcgcagatgcagtcaagaaggggtttctaaagagcctgatcaaagggatcagccaagaagagtggacacgcatgtggaacaagctaaaggaagtagaaaagcacttcgagtaccaatacccatctcagactgatgatgccgtgcagatgatatggaaggctattgctcggaaggtgccctctatccgtctgaagattaacagactacggagattttctcggtttgatactaataggacagatgaaactctacccagtccttcttggctacagaatcaggcttcttgatttttggactagcaaactccagctttcaccatgttttcaatcctgccgaaacaagagttgatactgaagaccaaaccttaatcgcatgactgggggcagatgttacagctgcagacattaacggagagtaaagttgaaacactctagcataacagaattacatatccaatggcacatcatttttcttcatttttcttacttaagattcatccaaaatgtccttggctgcagactaaggacaatgaattttgtatgaaaagctgtacattctaggcggcaatataattactgaccagttaaaaaaaca

SEQ ID NO: 7432 - DNA, 2412 bp, Zea Mays
tagctgtgtagatctatgatgccaaggcaaaaggccctcatgtgaatactacaagtagcagtacaaggaagagagccaatctgcccgtgactgccagtgagttgctcgggtgtggtggttagttgaggtcacgatgatgggaggcgggctgatgatggatcagagcgtggtgttccctggcgtccacaacttcgtggatctcctgcagcagaacggcgacaagaacctgggcttcgcctcactcatgccgcagacgtcctccggcgaccagtgcgtgatgggggagggtgatctcgtggacccaccgccagacagcttcccggacgccgtggaggacgacagcgatgacgacgttgaggacatcgaggagctggagcgccgcatgtggcgcgaccgcatgaagctgaagcggctcagggagctgcagcagagccgcggcaaggatcccatggctagcggtgggggcctggccgacggctcatccaagccaaggcagtcgcaggagcaggcccggcgcaagaagatgtcgcgcgcgcaggacggcatcctcaagtacatgctcaagatgatggaggtgtgccgcgcgcaggggtttgtgtacgggatcattccggagaagggcaagccggtgagcggcgcctccgacaacctccgtgcctggtggaaggagaaggtccgcttcgaccgcaacggcccggccgccatcgccaagtatcaggccgacaacgccgtcccgggcgccgagaatgagctcgcctcgggcgctgccagccctcattccttgcaggagctgcaggacaccacactcggctcgctgctctcagcactcatgcagcactgcgaccccccacagcggcgctacccgctggagaagggcgttcctccaccgtggtggcctaccggcgacgaggagtggtggccggagcttggcattcccaaggaccagggcccacctccctacaagaagccccatgaccttaagaaggcctggaagtccaagtgcctccaggacaagatgactgccaaggagatctcgacctggctggcggtcgtcaagcaggaagaggagctgtacctgaagatgcaccctggcgcacgcccgccggcatccactggtggcatcgccagtgccatatctttcaacaccacctcaagcgagtacgacgtggacatcgttgatgagtgcaagggggatgaggctggcaaccagaagacagcagtcactgacccaacctccttcaaccttggtgcggctatcctaagtgacaagttcctcatgccgacgccgatgaaggaggagaccgctgacgtcgagttcatccagaagaggaacgcccccgctcctgctgagccagagctaatgctaaacaaccgggtgtacacctgcaacaacgtccagtgcccgcacagtgactacagctatggattccttgaccggaatgcccgcaacagccaccagtacacctgtaagtacaacgatccgatcactcagagcgccgagaacaagcctctgccagcaccgccgcaaccacaagccttccagccggccttcagccaagccaatcaggcagcgaacaatctggacttcagcctgcctatggacgggcagaggtccatcgccgagctgatgaacatgtacgacaccaacttcatgacgagcaagaccatgagcagtagtgacagcgtcaccatcatggagaggccgaacgcgatgccccagaggatccagatggacgagggcttcttcggacagggcaacggagtcttcgacgacgtcaatagcatgatgcagcaacaacagcagcaggcaccacccgtggtgcagcagcagcagcagcagcagttcttcatccgcgacgacacgccattcatgagccagatgggcgacatcaccagcacggcggagttcaggttcggctctggtttcaacatgtctagcaccgccgccgccgctgattacccaggcgcggcgcagaagaacgacgggaccaattggttctactgaagaataaaacttgtagggctcctcgttataagcttcggattcctccatggatctcccaagttgtcaagtcttataggtcttcgttatataggttttgcagtagctgcaagacggctggaacctggaactggtttatacttgtatgtccggccagccataaacctctcttatttgcaaacttaatgttattcctagctttaagttgttagtctcagtctgctgtccatgtatatggctgttaaaatgcttgtgcttgtttctgtactacctgctgtttggtgtctgaatgaagtgttttcttcagtggttctgctcgacgtgtctgctcactgttgatgaggcacatcatcgctgctgctcttcacacaaacaacatgactgacatattcaaatattttgagcgtcca

SEQ ID NO: 7433 - DNA, 2519 bp, Zea Mays
ccagcgtaatagctgcggctaaatccacgacagagttccaagtttcggttggatctcaataccacaattagtcaaaggctcagctcgttctacggttctaggaagtgtctaacagccgggtgtgatggaaacattctgttcctgcatcatcttcggaggcgcaaaatttgaccagttttcgttaggtgaatacttggagaaaaaggtcccccacaccccccacgcaggtgaatactacaagtagcagtacaaggaagagagccaatctgcccgtgactgccagtgagttgctcgggtgtggtggttagttgaggtcacgatgatgggaggcgggctgatgatggatcagagcgtggtgttccctggcgtccacaacttcgtggatctcctgcagcagaacggcgacaagaacctgggcttcgcctcactcatgccgcagacgtcctccggcgaccagtgcgtgatgggggagggtgatctcgtggacccaccgccagacagcttcccggacgccgtggaggacgacagcgatgacgacgttgaggacatcgaggagctggagcgccgcatgtggcgcgaccgcatgaagctgaagcggctcagggagctgcagcagagccgcggcaaggatcccatggctagcggtgggggcctggccgacggctcatccaagccaaggcagtcgcaggagcaggcccggcgcaagaagatgtcgcgcgcgcaggacggcatcctcaagtacatgctcaagatgatggaggtgtgccgcgcgcaggggtttgtgtacgggatcattccggagaagggcaagccggtgagcggcgcctccgacaacctccgtgcctggtggaaggagaaggtccgcttcgaccgcaacggcccggccgccatcgccaagtatcaggccgacaacgccgtcccgggcgccgagaatgagctcgcctcgggcgctgccagccctcattccttgcaggagctgcaggacaccacactcggctcgctgctctcagcactcatgcagcactgcgaccccccacagcggcgctacccgctggagaagggcgttcctccaccgtggtggcctaccggcgacgaggagtggtggccggagcttggcattcccaaggaccagggcccacctccctacaagaagccccatgaccttaagaaggcctggaagtccaagtgcctccaggacaagatgactgccaaggagatctcgacctggctggcggtcgtcaagcaggaagaggagctgtacctgaagatgcaccctggcgcacgcccgccggcatccactggtggcatcgccagtgccatatctttcaacaccacctcaagcgagtacgacgtggacatcgttgatgagtgcaagggggatgaggctggcaaccagaagacagcagtcactgacccaacctccttcaaccttggtgcggctatcctaagtgacaagttcctcatgccgacgccgatgaaggaggagaccgctgacgtcgagttcatccagaagaggaacgcccccgctcctgctgagccagagctaatgctaaacaaccgggtgtacacctgcaacaacgtccagtgcccgcacagtgactacagctatggattccttgaccggaatgcccgcaacagccaccagtacacctgtaagtacaacgatccgatcactcagagcgccgagaacaagcctctgccagcaccgccgcaaccacaagccttccagccggccttcagccaagccaatcaggcagcgaacaatctggacttcagcctgcctatggacgggcagaggtccatcgccgagctgatgaacatgtacgacaccaacttcatgacgagcaagaccatgagcagtagtgacagcgtcaccatcatggagaggccgaacgcgatgccccagaggatccagatggacgagggcttcttcggacagggcaacggagtcttcgacgacgtcaatagcatgatgcagcaacaacagcagcaggcaccacccgtggtgcagcagcagcagcagcagcagttcttcatccgcgacgacacgccattcatgagccagatgggcgacatcaccagcacggcggagttcaggttcggctctggtttcaacatgtctagcaccgccgccgccgctgattacccaggcgcggcgcagaagaacgacgggaccaattggttctactgaagaataaaacttgttttgcagtagctgcaagacggctggaacctggaactggtttatacttgtatgtccggccagccataaacctctcttatttgcaaacttaatgttattcctagctttaagttgttagtctcagtctgctgtccatgtatatggctgttaaaatgcttgtgcttgtttctgtactacctgctgtttggtgtctgaatgaagtgttttcttcagtggttctgctcgacgtgtctgctcactgttgatgaggcacatcatcgctgctgctcttcacacaaacaacatgactgacatattcaaatattttgagcgtcca

SEQ ID NO: 7434 - DNA, 2327 bp, Zea Mays
acagcagcagagcaccatcagcaccagcacgcccacttgcctcctattatttgcgccagagggcagggcagggcagggcaggggccttggcgctacccccgttcttatccccacctcgtgcctcccctcctccccccttcccctctctcgcccctcctccctccgtctcgtctcccaggtcatggcaaaagctggagcaccgggaaaaataacaagtgggagataaacaggaagagctaggtgaatacttggagaaaaaggtcccccacaccccccacgcaggtgaatactacaagtagcagtacaaggaagagagccaatctgcccgtgactgccagtgagttgctcgggtgtggtggttagttgaggtcacgatgatgggaggcgggctgatgatggatcagagcgtggtgttccctggcgtccacaacttcgtggatctcctgcagcagaacggcgacaagaacctgggcttcgcctcactcatgccgcagacgtcctccggcgaccagtgcgtgatgggggagggtgatctcgtggacccaccgccagacagcttcccggacgccgtggaggacgacagcgatgacgacgttgaggacatcgaggagctggagcgccgcatgtggcgcgaccgcatgaagctgaagcggctcagggagctgcagcagagccgcggcaaggatcccatggctagcggtgggggcctggccgacggctcatccaagccaaggcagtcgcaggagcaggcccggcgcaagaagatgtcgcgcgcgcaggacggcatcctcaagtacatgctcaagatgatggaggtgtgccgcgcgcaggggtttgtgtacgggatcattccggagaagggcaagccggtgagcggcgcctccgacaacctccgtgcctggtggaaggagaaggtccgcttcgaccgcaacggcccggccgccatcgccaagtatcaggccgacaacgccgtcccgggcgccgagaatgagctcgcctcgggcgctgccagccctcattccttgcaggagctgcaggacaccacactcggctcgctgctctcagcactcatgcagcactgcgaccccccacagcggcgctacccgctggagaagggcgttcctccaccgtggtggcctaccggcgacgaggagtggtggccggagcttggcattcccaaggaccagggcccacctccctacaagaagccccatgaccttaagaaggcctggaaggtgagcgtgctcaccgctgtcatcaagcacatgtcaccagacatagagaagatccgacgcctcgttcgccagtccaagtgcctccaggacaagatgactgccaaggagatctcgacctggctggcggtcgtcaagcaggaagaggagctgtacctgaagatgcaccctggcgcacgcccgccggcatccactggtggcatcgccagtgccatatctttcaacaccacctcaagcgagtacgacgtggacatcgttgatgagtgcaagggggatgaggctggcaaccagaagacagcagtcactgacccaacctccttcaaccttggtgcggctatcctaagtgacaagttcctcatgccgacgccgatgaaggaggagaccgctgacgtcgagttcatccagaagaggaacgcccccgctcctgctgagccagagctaatgctaaacaaccgggtgtacacctgcaacaacgtccagtgcccgcacagtgactacagctatggattccttgaccggaatgcccgcaacagccaccagtacacctgtaagtacaacgatccgatcactcagagcgccgagaacaagcctctgccagcaccgccgcaaccacaagccttccagccggccttcagccaagccaatcaggcagcgaacaatctggacttcagcctgcctatggacgggcagaggtccatcgccgagctgatgaacatgtacgacaccaacttcatgacgagcaagaccatgagcagtagtgacagcgtcaccatcatggagaggccgaacgcgatgccccagaggatccagatggacgagggcttcttcggacagggcaacggagtcttcgacgacgtcaatagcatgatgcagcaacaacagcagcaggcaccacccgtggtgcagcagcagcagcagcagcagttcttcatccgcgacgacacgccattcatgagccagatgggcgacatcaccagcacggcggagttcagtggttctgctcgacgtgtctgctcactgttgatgaggcacatcatcgctgctgctcttcacacaaacaacatgactgacatattcaaatattttgagcgtcca

SEQ ID NO: 7435 - DNA, 2377 bp, Zea Mays
acagcagcagagcaccatcagcaccagcacgcccacttgcctcctattatttgcgccagagggcagggcagggcagggcaggggccttggcgctacccccgttcttatccccacctcgtgcctcccctcctccccccttcccctctctcgcccctcctccctccgtctcgtctcccaggtcatggcaaaagctggagcaccgggaaaaataacaagtgggagataaacaggaagagctaggtgaatacttggagaaaaaggtcccccacaccccccacgcaggtgaatactacaagtagcagtacaaggaagagagccaatctgcccgtgactgccagtgagttgctcgggtgtggtggttagttgaggtcacgatgatgggaggcgggctgatgatggatcagagcgtggtgttccctggcgtccacaacttcgtggatctcctgcagcagaacggcgacaagaacctgggcttcgcctcactcatgccgcagacgtcctccggcgaccagtgcgtgatgggggagggtgatctcgtggacccaccgccagacagcttcccggacgccgtggaggacgacagcgatgacgacgttgaggacatcgaggagctggagcgccgcatgtggcgcgaccgcatgaagctgaagcggctcagggagctgcagcagagccgcggcaaggatcccatggctagcggtgggggcctggccgacggctcatccaagccaaggcagtcgcaggagcaggcccggcgcaagaagatgtcgcgcgcgcaggacggcatcctcaagtacatgctcaagatgatggaggtgtgccgcgcgcaggggtttgtgtacgggatcattccggagaagggcaagccggtgagcggcgcctccgacaacctccgtgcctggtggaaggagaagcacatgtcaccagacatagagaagatccgacgcctcgttcgccagtccaagtgcctccaggacaagatgactgccaaggagatctcgacctggctggcggtcgtcaagcaggaagaggagctgtacctgaagatgcaccctggcgcacgcccgccggcatccactggtggcatcgccagtgccatatctttcaacaccacctcaagcgagtacgacgtggacatcgttgatgagtgcaagggggatgaggctggcaaccagaagacagcagtcactgacccaacctccttcaaccttggtgcggctatcctaagtgacaagttcctcatgccgacgccgatgaaggaggagaccgctgacgtcgagttcatccagaagaggaacgcccccgctcctgctgagccagagctaatgctaaacaaccgggtgtacacctgcaacaacgtccagtgcccgcacagtgactacagctatggattccttgaccggaatgcccgcaacagccaccagtacacctgtaagtacaacgatccgatcactcagagcgccgagaacaagcctctgccagcaccgccgcaaccacaagccttccagccggccttcagccaagccaatcaggcagcgaacaatctggacttcagcctgcctatggacgggcagaggtccatcgccgagctgatgaacatgtacgacaccaacttcatgacgagcaagaccatgagcagtagtgacagcgtcaccatcatggagaggccgaacgcgatgccccagaggatccagatggacgagggcttcttcggacagggcaacggagtcttcgacgacgtcaatagcatgatgcagcaacaacagcagcaggcaccacccgtggtgcagcagcagcagcagcagcagttcttcatccgcgacgacacgccattcatgagccagatgggcgacatcaccagcacggcggagttcaggttcggctctggtttcaacatgtctagcaccgccgccgccgctgattacccaggcgcggcgcagaagaacgacgggaccaattggttctactgaagaataaaacttgtagggctcctcgttataagcttcggattcctccatggatctcccaagttgtcaagtcttataggtcttcgttatataggttttgcagtagctgcaagacggctggaacctggaactggtttatacttgtatgtccggccagccataaacctctcttatttgcaaacttaatgttattcctagctttaagttgttagtctcagtctgctgtccatgtatatggctgttaaaatgcttgtgcttgtttctgtactacctgctgtttggtgtctgaatgaagtgttttcttcagtggttctgctcgacgtgtctgctcactgttgatgaggcacatcatcgctgctgctcttcacacaaacaacatgactgacatattcaaatattttgagcgtcca

SEQ ID NO: 7436 - DNA, 1450 bp, Zea Mays
attgaatatgtggaatgattatagtcaacatcgttcatgatatatcaagaatgtttggaagaggatctcctaggatgaacttgatccaagctgcaactatgaaaaaaatatcccccagatctactactaacaagcgcaagaagagaacatcaccaaaagataaagagaaagagttaaagagagactacaaggctcttaaagaggcaaggcaacaaagcggggtatcatgggatgagaggttgtgtagaatagaagcagaagaacccatttggaataacctcaccactagtaacgagagacttaagaagtttcggactaaatctttcccactatttgaggctttaggagagctatatgatggaaatattgctgagggaaccatgaattttacttctattgagccttctcgacctcctgtcacacaaccttgtcaaggtgctgctacacagccttctcaagctgctttcacacttacacaaccttctcaaatcgctttcacacaaccttctctagctgctttcgcacgaccttctcgaaccgcttttagacatccttctctagccgctttcccacagccttctcaagccgcttttgcacagccttctcaaaccattttcacacagccttctgaagccactttcacacagccttctgaagccactttcacacagccttctgaagccactttcacacagccttctcaagccgctttcacacaaccttctcaagctaatatctcacaagccatttgtgatgaagatgatgagctcagagtattggatccaccagcccctgcatcagtgagcaaaagggcaaaaaatgttggtactggtaattcaagaacaagaattaacaagcgtacacaagatgggaatgtggttgagatgatgggaaggtttctagaaatgaaagaaaaacaagctgaggcggatgaaagggccacaactaatgcaaatgaggatgatttccctattcaaacatgcattgctattgtggatggaatggaagagttttctgatgatgagaaggttgattcttatgatgtttttaaggatgcccaaaaccgggccattttcatgactgccaaagatgctacgcgcataaaatggttgaggaagaagattgcaagaacatgatatgatatatgaagctaaagtaatgaaggatgattttgtagtatcgtccagcataaagaaagaaagctgcaatttgtgctattgtcagagatggatatttaactttagcaatttgcaacttttaagtaatctgttaaattaaagatgagatcttgcagacttttcttattacctaatggattctcttattagctgattcaaatctaatcatgcatattgtagtaaggactatgtatgttgaatcaatgactctggttcaattttaaatatcacatgtgttttaagtttcttaattttatggcttatcttctgat

SEQ ID NO: 7437 - DNA, 2143 bp, Zea Mays
cagaaaagcaagccccctataggaatcgaaaaggcacactaagtcaaaatgattccatgttcccgagggaaaatattatcttgtcgatggaggatatgctaacacaccatcattccttgcaccgtatcgtggtgttagatatcacttgaaagaatttggccatggtcaccaacggccaagaaactataaggaattgtttaatcaccgacatgctttattgcggaaccacatagagagagcaataggagttttgaagaagcgttttctcattctaaaagttggaacacaccacccaattaggaaccaagtgaaaatagcagctgcggcagtgttgttccataatattatacggatgcacaacggggatgaaggttggttgaatagccaaacaagtaacatatcgccagaaacttttgttgatcttcctggaggagacaattactatagcaatgatgttgtgtcacttaatagccaagtggataatgggaactctgttagagatatgattgcattgaatatgtggaatgattatagtcaacatcgttcatgatatatcaagaatgtttggaagaggatctcctaggatgaacttgatccaagctgcaactatgaaaaaaatatcccccagatctactactaacaagcgcaagaagagaacatcaccaaaagttggtcgtcttagagcaaactggaatagtggactagaaaagggtttagttgaaattcttcaagatcacaacaatgattgttataagggtcaaaatgggtggtcatcggaagcatggaatagaattgtcaagttattccatgagaaattctcttatgtcacatttacaaaatgccaaatccaagataaagagaaagagttaaagagagactacaaggctcttaaagaggcaaggcaacaaagcggggtatcatgggatgagaggttgtgtagaatagaagcagaagaacccatttggaataacctcaccactagtaacgagagacttaagaagtttcggactaaatctttcccactatttgaggctttaggagagctatatgatggaaatattgctgagggaaccatgaattttacttctattgagccttctcgacctcctgtcacacaaccttgtcaaggtgctgctacacagccttctcaagctgctttcacacttacacaaccttctcaaatcgctttcacacaaccttctctagctgctttcgcacgaccttctcgaaccgcttttagacatccttctctagccgctttcccacagccttctcaagccgcttttgcacagccttctcaaaccattttcacacagccttctgaagccactttcacacagccttctgaagccactttcacacagccttctgaagccactttcacacagccttctcaagccgctttcacacaaccttctcaagctaatatctcacaagccatttgtgatgaagatgatgagctcagagtattggatccaccagcccctgcatcagtgagcaaaagggcaaaaaatgttggtactggtaattcaagaacaagaattaacaagcgtacacaagatgggaatgtggttgagatgatgggaaggtttctagaaatgaaagaaaaacaagctgaggcggatgaaagggccacaactaatgcaaatgaggatgatttccctattcaaacatgcattgctattgtggatggaatggaagagttttctgatgatgagaaggttgattcttatgatgtttttaaggatgcccaaaaccgggccattttcatgactgccaaagatgctacgcgcataaaatggttgaggaagaagattgcaagaacatgatatgatatatgaagctaaagtaatgaaggatgattttgtagtatcgtccagcataaagaaagaaagctgcaatttgtgctattgtcagagatggatatttaactttagcaatttgcaacttttaagtaatctgttaaattaaagatgagatcttgcagacttttcttattacctaatggattctcttattagctgattcaaatctaatcatgcatattgtagtaaggactatgtatgttgaatcaatgactctggttcaattttaaatatcacatgtgttttaagtttcttaattttatggcttatcttctgat

SEQ ID NO: 7438 - DNA, 2130 bp, Zea Mays
cagaaaagcaagccccctataggaatcgaaaaggcacactaagtcaaaatgattccatgttcccgagggaaaatattatcttgtcgatggaggatatgctaacacaccatcattccttgcaccgtatcgtggtgttagatatcacttgaaagaatttggccatggtcaccaacggccaagaaactataaggaattgtttaatcaccgacatgctttattgcggaaccacatagagagagcaataggagttttgaagaagcgttttctcattctaaaagttggaacacaccacccaattaggaaccaagtgaaaatagcagctgcggcagtgttgttccataatattatacggatgcacaacggggatgaaggttggttgaatagccaaacaagtaacatatcgccagaaacttttgttgatcttcctggaggagacaattactatagcaatgatgttgtgtcacttaatagccaagtggataatgggaactctgttagagatatgattgcattgaatatgtggaatgattatagtcaacatcgttcatgatatatcaagaatgtttggaagaggatctcctaggatgaacttgatccaagctgcaactatgaaaaaaatatcccccagatctactactaacaagcgcaagaagagaacatcaccaaaagagcaaactggaatagtggactagaaaagggtttagttgaaattcttcaagatcacaacaatgattgttataagggtcaaaatgggtggtcatcggaagcatggaatagaattgtcaagttattccatgagaaattctcttatgtcacatttacaaaatgccaaatccaagataaagagaaagagttaaagagagactacaaggctcttaaagaggcaaggcaacaaagcggggtatcatgggatgagaggttgtgtagaatagaagcagaagaacccatttggaataacctcaccactagtaacgagagacttaagaagtttcggactaaatctttcccactatttgaggctttaggagagctatatgatggaaatattgctgagggaaccatgaattttacttctattgagccttctcgacctcctgtcacacaaccttgtcaaggtgctgctacacagccttctcaagctgctttcacacttacacaaccttctcaaatcgctttcacacaaccttctctagctgctttcgcacgaccttctcgaaccgcttttagacatccttctctagccgctttcccacagccttctcaagccgcttttgcacagccttctcaaaccattttcacacagccttctgaagccactttcacacagccttctgaagccactttcacacagccttctgaagccactttcacacagccttctcaagccgctttcacacaaccttctcaagctaatatctcacaagccatttgtgatgaagatgatgagctcagagtattggatccaccagcccctgcatcagtgagcaaaagggcaaaaaatgttggtactggtaattcaagaacaagaattaacaagcgtacacaagatgggaatgtggttgagatgatgggaaggtttctagaaatgaaagaaaaacaagctgaggcggatgaaagggccacaactaatgcaaatgaggatgatttccctattcaaacatgcattgctattgtggatggaatggaagagttttctgatgatgagaaggttgattcttatgatgtttttaaggatgcccaaaaccgggccattttcatgactgccaaagatgctacgcgcataaaatggttgaggaagaagattgcaagaacatgatatgatatatgaagctaaagtaatgaaggatgattttgtagtatcgtccagcataaagaaagaaagctgcaatttgtgctattgtcagagatggatatttaactttagcaatttgcaacttttaagtaatctgttaaattaaagatgagatcttgcagacttttcttattacctaatggattctcttattagctgattcaaatctaatcatgcatattgtagtaaggactatgtatgttgaatcaatgactctggttcaattttaaatatcacatgtgttttaagtttcttaattttatggcttatcttctgat

SEQ ID NO: 7439 - DNA, 2026 bp, Zea Mays
ggatgttgggccgatacacgctaatacccggggggcagaaaaatccccacccgaggcgtggaagacaccgtcgctctcctcgcgtgcgagcgccgccactgcatcttcccatcgatctccgccgaccccgcatcttcccatacgagctgtgtttctccaagttcgctgctggccatatcgacgtcgtcatcctcgatccagacgagtgcgtgtgccatctccacgggtcttcgacagatttagcaagaatgtttggaagaggatctcctaggatgaacttgatccaagctgcaactatgaaaaaaatatcccccagatctactactaacaagcgcaagaagagaacatcaccaaaagttggtcgtcttagagcaaactggaatagtggactagaaaagggtttagttgaaattcttcaagatcacaacaatgattgttataagggtcaaaatgggtggtcatcggaagcatggaatagaattgtcaagttattccatgagaaattctcttatgtcacatttacaaaatgccaaatccaagataaagagaaagagttaaagagagactacaaggctcttaaagaggcaaggcaacaaagcggggtatcatgggatgagaggttgtgtagaatagaagcagaagaacccatttggaataacctcaccactagtaacgagagacttaagaagtttcggactaaatctttcccactatttgaggctttaggagagctatatgatggaaatattgctgagggaaccatgaattttacttctattgagccttctcgacctcctgtcacacaaccttgtcaaggtgctgctacacagccttctcaagctgctttcacacttacacaaccttctcaaatcgctttcacacaaccttctctagctgctttcgcacgaccttctcgaaccgcttttagacatccttctctagccgctttcccacagccttctcaagccgcttttgcacagccttctcaaaccattttcacacagccttctgaagccactttcacacagccttctgaagccactttcacacagccttctgaagccactttcacacagccttctcaagccgctttcacacaaccttctcaagctaatatctcacaagccatttgtgatgaagatgatgagctcagagtattggatccaccagcccctgcatcagtgagcaaaagggcaaaaaatgttggtactggtaattcaagaacaagaattaacaagcgtacacaagatgggaatgtggttgagatgatgggaaggtttctagaaatgaaagaaaaacaagctgaggcggatgaaagggccacaactaatgcaaatgaggatgatttccctattcaaacatgcattgctattgtggatggaatggaagagttttctgatgatgagaaggttgattcttatgatgtttttaaggatgcccaaaaccgggccattttcatgactgccaaagatgctacgcgcataaaatggttgaggaagaagattgcaagaacatgatatgctaggctgtgtgtgttttttttctttctttcctcctgaacttgcaaagggcgctatgccacctgtgttcaaatgatacacagcatccaaagagaaagcatgaggaggaaacatgatgcactcctgcctggcaacagatcctccacatgtctgcactcttacatcactggacacactttattcttggcagatagtaatatatgaagctaaagtaatgaaggatgattttgtagtatcgtccagcataaagaaagaaagctgcaatttgtgctattgtcagagatggatatttaactttagcaatttgcaacttttaagtaatctgttaaattaaagatgagatcttgcagacttttcttattacctaatggattctcttattagctgattcaaatctaatcatgcatattgtagtaaggactatgtatgttgaatcaatgactctggttcaattttaaatatcacatgtgttttaagtttcttaattttatggcttatcttctgat

SEQ ID NO: 7440 - DNA, 1843 bp, Zea Mays
ggatgttgggccgatacacgctaatacccggggggcagaaaaatccccacccgaggcgtggaagacaccgtcgctctcctcgcgtgcgagcgccgccactgcatcttcccatcgatctccgccgaccccgcatcttcccatacgagctgtgtttctccaagttcgctgctggccatatcgacgtcgtcatcctcgatccagacgagtgcgtgtgccatctccacgggtcttcgacagatttagcaagaatgtttggaagaggatctcctaggatgaacttgatccaagctgcaactatgaaaaaaatatcccccagatctactactaacaagcgcaagaagagaacatcaccaaaagataaagagaaagagttaaagagagactacaaggctcttaaagaggcaaggcaacaaagcggggtatcatgggatgagaggttgtgtagaatagaagcagaagaacccatttggaataacctcaccactagtaacgagagacttaagaagtttcggactaaatctttcccactatttgaggctttaggagagctatatgatggaaatattgctgagggaaccatgaattttacttctattgagccttctcgacctcctgtcacacaaccttgtcaaggtgctgctacacagccttctcaagctgctttcacacttacacaaccttctcaaatcgctttcacacaaccttctctagctgctttcgcacgaccttctcgaaccgcttttagacatccttctctagccgctttcccacagccttctcaagccgcttttgcacagccttctcaaaccattttcacacagccttctgaagccactttcacacagccttctgaagccactttcacacagccttctgaagccactttcacacagccttctcaagccgctttcacacaaccttctcaagctaatatctcacaagccatttgtgatgaagatgatgagctcagagtattggatccaccagcccctgcatcagtgagcaaaagggcaaaaaatgttggtactggtaattcaagaacaagaattaacaagcgtacacaagatgggaatgtggttgagatgatgggaaggtttctagaaatgaaagaaaaacaagctgaggcggatgaaagggccacaactaatgcaaatgaggatgatttccctattcaaacatgcattgctattgtggatggaatggaagagttttctgatgatgagaaggttgattcttatgatgtttttaaggatgcccaaaaccgggccattttcatgactgccaaagatgctacgcgcataaaatggttgaggaagaagattgcaagaacatgatatgctaggctgtgtgtgttttttttctttctttcctcctgaacttgcaaagggcgctatgccacctgtgttcaaatgatacacagcatccaaagagaaagcatgaggaggaaacatgatgcactcctgcctggcaacagatcctccacatgtctgcactcttacatcactggacacactttattcttggcagatagtaatatatgaagctaaagtaatgaaggatgattttgtagtatcgtccagcataaagaaagaaagctgcaatttgtgctattgtcagagatggatatttaactttagcaatttgcaacttttaagtaatctgttaaattaaagatgagatcttgcagacttttcttattacctaatggattctcttattagctgattcaaatctaatcatgcatattgtagtaaggactatgtatgttgaatcaatgactctggttcaattttaaatatcacatgtgttttaagtttcttaattttatggcttatcttctgat

SEQ ID NO: 7441 - DNA, 1795 bp, Zea Mays
ggatgttgggccgatacacgctaatacccggggggcagaaaaatccccacccgaggcgtggaagacaccgtcgctctcctcgcgtgcgagcgccgccactgcatcttcccatcgatctccgccgaccccgcatcttcccatacgagctgtgtttctccaagttcgctgctggccatatcgacgtcgtcatcctcgatccagacgagtgcgtgtgccatctccacgggtcttcgacagatttagcaagaatgtttggaagaggatctcctaggatgaacttgatccaagctgcaactatgaaaaaaatatcccccagatctactactaacaagcgcaagaagagaacatcaccaaaagataaagagaaagagttaaagagagactacaaggctcttaaagaggcaaggcaacaaagcggggtatcatgggatgagaggttgtgtagaatagaagcagaagaacccatttggaataacctcaccactagtaacgagagacttaagaagtttcggactaaatctttcccactatttgaggctttaggagagctatatgatggaaatattgctgagggaaccatgaattttacttctattgagccttctcgacctcctgtcacacaaccttgtcaaggtgctgctacacagccttctcaagctgctttcacacttacacaaccttctcaaatcgctttcacacaaccttctctagctgctttcgcacgaccttctcgaaccgcttttagacatccttctctagccgctttcccacagccttctcaagccgcttttgcacagccttctcaaaccattttcacacagccttctgaagccactttcacacagccttctgaagccactttcacacagccttctgaagccactttcacacagccttctcaagccgctttcacacaaccttctcaagctaatatctcacaagccatttgtgatgaagatgatgagctcagagtattggatccaccagcccctgcatcagtgagcaaaagggcaaaaaatgttggtactggtaattcaagaacaagaattaacaagcgtacacaagatgggaatgtggttgagatgatgggaaggtttctagaaatgaaagaaaaacaagctgaggcggatgaaagggccacaactaatgcaaatgaggatgatttccctattcaaacatgcattgctattgtggatggaatggaagagttttctgatgatgagaaggttgattcttatgatgtttttaaggatgcccaaaaccgggccattttcatgactgccaaagatgctacgcgcataaaatggttgaggaagaagattgcaagaacatgatatgctaggctgtgtgtgttttttttctttctttcctcctgaacttgcaaagggcgctatgccacctgtgttcaaatgatacacagcatccaaagagaaagcatgaggaggaaacatgatgcactcctgcctggcaacagatcctccacatatatatgaagctaaagtaatgaaggatgattttgtagtatcgtccagcataaagaaagaaagctgcaatttgtgctattgtcagagatggatatttaactttagcaatttgcaacttttaagtaatctgttaaattaaagatgagatcttgcagacttttcttattacctaatggattctcttattagctgattcaaatctaatcatgcatattgtagtaaggactatgtatgttgaatcaatgactctggttcaattttaaatatcacatgtgttttaagtttcttaattttatggcttatcttctgat

SEQ ID NO: 7442 - DNA, 2339 bp, Zea Mays
cgtggatgttgggccgatacacgctaatacccggggggcagaaaaatccccacccgaggcgtggaagacaccgtcgctctcctcgcgtgcgagcgccgccactgcatcttcccatcgatctccgccgaccccgcatcttcccatacgagctgtgtttctccaagttcgctgctggccatatcgacgtcgtcatcctcgatccagacgagtgcgtgtgccatctccacgggtcttcgacagatttaggattccatgttcccgagggaaaatattatcttgtcgatggaggatatgctaacacaccatcattccttgcaccgtatcgtggtgttagatatcacttgaaagaatttggccatggtcaccaacggccaagaaactataaggaattgtttaatcaccgacatgctttattgcggaaccacatagagagagcaataggagttttgaagaagcgttttctcattctaaaagttggaacacaccacccaattaggaaccaagtgaaaatagcagctgcggcagtgttgttccataatattatacggatgcacaacggggatgaaggttggttgaatagccaaacaagtaacatatcgccagaaacttttgttgatcttcctggaggagacaattactatagcaatgatgttgtgtcacttaatagccaagtggataatgggaactctgttagagatatgattgcattgaatatgtggaatgattatagtcaacatcgttcatgatatatcaagaatgtttggaagaggatctcctaggatgaacttgatccaagctgcaactatgaaaaaaatatcccccagatctactactaacaagcgcaagaagagaacatcaccaaaagttggtcgtcttagagcaaactggaatagtggactagaaaagggtttagttgaaattcttcaagatcacaacaatgattgttataagggtcaaaatgggtggtcatcggaagcatggaatagaattgtcaagttattccatgagaaattctcttatgtcacatttacaaaatgccaaatccaagataaagagaaagagttaaagagagactacaaggctcttaaagaggcaaggcaacaaagcggggtatcatgggatgagaggttgtgtagaatagaagcagaagaacccatttggaataacctcaccactagtaacgagagacttaagaagtttcggactaaatctttcccactatttgaggctttaggagagctatatgatggaaatattgctgagggaaccatgaattttacttctattgagccttctcgacctcctgtcacacaaccttgtcaaggtgctgctacacagccttctcaagctgctttcacacttacacaaccttctcaaatcgctttcacacaaccttctctagctgctttcgcacgaccttctcgaaccgcttttagacatccttctctagccgctttcccacagccttctcaagccgcttttgcacagccttctcaaaccattttcacacagccttctgaagccactttcacacagccttctgaagccactttcacacagccttctgaagccactttcacacagccttctcaagccgctttcacacaaccttctcaagctaatatctcacaagccatttgtgatgaagatgatgagctcagagtattggatccaccagcccctgcatcagtgagcaaaagggcaaaaaatgttggtactggtaattcaagaacaagaattaacaagcgtacacaagatgggaatgtggttgagatgatgggaaggtttctagaaatgaaagaaaaacaagctgaggcggatgaaagggccacaactaatgcaaatgaggatgatttccctattcaaacatgcattgctattgtggatggaatggaagagttttctgatgatgagaaggttgattcttatgatgtttttaaggatgcccaaaaccgggccattttcatgactgccaaagatgctacgcgcataaaatggttgaggaagaagattgcaagaacatgatatgatatatgaagctaaagtaatgaaggatgattttgtagtatcgtccagcataaagaaagaaagctgcaatttgtgctattgtcagagatggatatttaactttagcaatttgcaacttttaagtaatctgttaaattaaagatgagatcttgcagacttttcttattacctaatggattctcttattagctgattcaaatctaatcatgcatattgtagtaaggactatgtatgttgaatcaatgactctggttcaattttaaatatcacatgtgttttaagtttcttaattttatggcttatcttctgat

SEQ ID NO: 7443 - DNA, 2098 bp, Zea Mays
gtgaatattcttcatcccaacatgggctagtcggcgatgccagagccaacccttatttgtcttagcaattaagcaagtatcgagttcagctctattaaagaaaactaagtatagcttaccctcgattactcccttaggcctcgtttggcaactcatgtaagggcatggattgaggcccaatacacgcatcacgtgtaactaggcccacaacgggatcacgttccctgcgcaacctaaatacgtatttggcgaatctggtgtgggcgtggatgttgggccgatacacgctaatacccggggggcagaaaaatccccacccgaggcgtggaagacaccgtcgctctcctcgcgtgcgagcgccgccactgcatcttcccatcgatctccgccgaccccgcatcttcccatacgagctgtgtttctccaagttcgctgctggccatatcgacgtcgtcatcctcgatccagacgagtgcgtgtgccatctccacgggtcttcgacagatttagcaagaatgtttggaagaggatctcctaggatgaacttgatccaagctgcaactatgaaaaaaatatcccccagatctactactaacaagcgcaagaagagaacatcaccaaaagttggtcgtcttagagcaaactggaatagtggactagaaaagggtttagttgaaattcttcaagatcacaacaatgattgttataagggtcaaaatgggtggtcatcggaagcatggaatagaattgtcaagttattccatgagaaattctcttatgtcacatttacaaaatgccaaatccaagataaagagaaagagttaaagagagactacaaggctcttaaagaggcaaggcaacaaagcggggtatcatgggatgagaggttgtgtagaatagaagcagaagaacccatttggaataacctcaccactagtaacgagagacttaagaagtttcggactaaatctttcccactatttgaggctttaggagagctatatgatggaaatattgctgagggaaccatgaattttacttctattgagccttctcgacctcctgtcacacaaccttgtcaaggtgctgctacacagccttctcaagctgctttcacacttacacaaccttctcaaatcgctttcacacaaccttctctagctgctttcgcacgaccttctcgaaccgcttttagacatccttctctagccgctttcccacagccttctcaagccgcttttgcacagccttctcaaaccattttcacacagccttctgaagccactttcacacagccttctgaagccactttcacacagccttctgaagccactttcacacagccttctcaagccgctttcacacaaccttctcaagctaatatctcacaagccatttgtgatgaagatgatgagctcagagtattggatccaccagcccctgcatcagtgagcaaaagggcaaaaaatgttggtactggtaattcaagaacaagaattaacaagcgtacacaagatgggaatgtggttgagatgatgggaaggtttctagaaatgaaagaaaaacaagctgaggcggatgaaagggccacaactaatgcaaatgaggatgatttccctattcaaacatgcattgctattgtggatggaatggaagagttttctgatgatgagaaggttgattcttatgatgtttttaaggatgcccaaaaccgggccattttcatgactgccaaagatgctacgcgcataaaatggttgaggaagaagattgcaagaacatgatatgatatatgaagctaaagtaatgaaggatgattttgtagtatcgtccagcataaagaaagaaagctgcaatttgtgctattgtcagagatggatatttaactttagcaatttgcaacttttaagtaatctgttaaattaaagatgagatcttgcagacttttcttattacctaatggattctcttattagctgattcaaatctaatcatgcatattgtagtaaggactatgtatgttgaatcaatgactctggttcaattttaaatatcacatgtgttttaagtttcttaattttatggcttatcttctgat

SEQ ID NO: 7444 - DNA, 1565 bp, Zea Mays
ggatgttgggccgatacacgctaatacccggggggcagaaaaatccccacccgaggcgtggaagacaccgtcgctctcctcgcgtgcgagcgccgccactgcatcttcccatcgatctccgccgaccccgcatcttcccatacgagctgtgtttctccaagttcgctgctggccatatcgacgtcgtcatcctcgatccagacgagtgcgtgtgccatctccacgggtcttcgacagatttagcaagaatgtttggaagaggatctcctaggatgaacttgatccaagctgcaactatgaaaaaaatatcccccagatctactactaacaagcgcaagaagagaacatcaccaaaagttggtcgtcttagagcaaactggaatagtggactagaaaagggtttagttgaaattcttcaagatcacaacaatgattgttataagggtcaaaatgggtggtcatcggaagcatggaatagaattgtcaagttattccatgagaaattctcttatgtcacatttacaaaatgccaaatccaagataaagagaaagagttaaagagagactacaaggctcttaaagaggcaaggcaacaaagcggggtatcatgggatgagaggttgtgtagaatagaagcagaagaacccatttggaataacctcaccactagtaacgagagacttaagaagtttcggactaaatctttcccactatttgaggctttaggagagctatatgatggaaatattgctgagggaaccatgaattttacttctattgagccttctcgacctcctgtcacacaaccttgtcaaggtgctgctacacagccttctcaagctgctttcacacttacacaaccttctcaaatcgctttcacacaaccttctctagctgctttcgcacgaccttctcgaaccgcttttagacatccttctctagccgctttcccacagccttctcaagccgcttttgcacagccttctcaaaccattttcacacagccttctgaagccactttcacacagccttctgaagccactttcacacagccttctgaagccactttcacacagccttctcaagccgctttcacacaaccttctcaagctaatatctcacaagccatttgtgatgaagatgatgagctcagagtattggatccaccagcccctgcatcagtgagcaaaagggcaaaaaatgttggtactggtaattcaagaacaagaattaacaagcgtacacaagatgggaatgtggttgagatgatgggaaggtttctagaaatgaaagaaaaacaagctgaggcggatgaaagggccacaactaatgcaaatgaggatgatttccctattcaaacatgcattgctattgtggatggaatggaagagttttctgatgatgagaaggttgattcttatgatgtttttaaggatgcccaaaaccgggccattttcatgactgccaaagatgctacgcgcataaaatggttgaggaagaagattgcaagaacatgatatgcatccaaagagaaagcatgaggaggaaacatgatgcactcctgc

SEQ ID NO: 7445 - DNA, 1389 bp, Zea Mays
ggatgttgggccgatacacgctaatacccggggggcagaaaaatccccacccgaggcgtggaagacaccgtcgctctcctcgcgtgcgagcgccgccactgcatcttcccatcgatctccgccgaccccgcatcttcccatacgagctgtgtttctccaagttcgctgctggccatatcgacgtcgtcatcctcgatccagacgagtgcgtgtgccatctccacgggtcttcgacagatttagcaagaatgtttggaagaggatctcctaggatgaacttgatccaagctgcaactatgaaaaaaatatcccccagatctactactaacaagcgcaagaagagaacatcaccaaaagataaagagaaagagttaaagagagactacaaggctcttaaagaggcaaggcaacaaagcggggtatcatgggatgagaggttgtgtagaatagaagcagaagaacccatttggaataacctcaccactagtaacgagagacttaagaagtttcggactaaatctttcccactatttgaggctttaggagagctatatgatggaaatattgctgagggaaccatgaattttacttctattgagccttctcgacctcctgtcacacaaccttgtcaaggtgctgctacacagccttctcaagctgctttcacacttacacaaccttctcaaatcgctttcacacaaccttctctagctgctttcgcacgaccttctcgaaccgcttttagacatccttctctagccgctttcccacagccttctcaagccgcttttgcacagccttctcaaaccattttcacacagccttctgaagccactttcacacagccttctgaagccactttcacacagccttctgaagccactttcacacagccttctcaagccgctttcacacaaccttctcaagctaatatctcacaagccatttgtgatgaagatgatgagctcagagtattggatccaccagcccctgcatcagtgagcaaaagggcaaaaaatgttggtactggtaattcaagaacaagaattaacaagcgtacacaagatgggaatgtggttgagatgatgggaaggtttctagaaatgaaagaaaaacaagctgaggcggatgaaagggccacaactaatgcaaatgaggatgatttccctattcaaacatgcattgctattgtggatggaatggaagagttttctgatgatgagaaggttgattcttatgatgtttttaaggatgcccaaaaccgggccattttcatgactgccaaagatgctacgcgcataaaatggttgaggaagaagattgcaagaacatgatatggctgtgtgtgttttttttctttctttcctcctgaacttgcaaagggcgcta

SEQ ID NO: 7446 - DNA, 2462 bp, Zea Mays
aagaaaccaagcgcaaaccaacgccgaaccagcagaggcgcagacggacaggcacttcactggcttctgctaccgtgccgctcctccgtctcccgctacaaaatatttcacgggagaccctgctctctccgattccggcgtccactcgtcgctcacggaaaccgctcggagcccgacgccgcgagatcaccggccagcctcgcgctcgacacgggagaggcgaggcggtcgagtggcccaccctacgccgctctgacagtgagcaatggcggcagcgtcgaggaaagaggaggagaggaacgagcgagtcgtgcgggggctcctcaagctgccacccaaccgcagatgcgtcaactgcgacggactcgggccgcagtacgtgtgcaccagcttctggaccttcatctgcgtctcctgcagcggcatccaccgagagttcacgcaccgtgtgaaatccgtctccatgtcaacgttcagcacgcaagaggtcgaggctctccagaagggtgggaaccagcgtgccaaggaatcattcctgaaggatttcgatacccagaaaatgaggctacctgatagcagcaactccggcagtcttagggacttcataaaagctgtctatgtggagcgaaggtatgctggcggtagattttctgaaaggcctccaagagacaaacagaaccaaaaggcccatgaagaagagcatagaaggccaaattcctaccattcattttcacagagcccaccttatgattatcagtatgaagaggggcgcaatggcaagcgatctgcatttctaagtaggaagcctggttcagataaggggcatcaggggaagatttctggattttgttacagttcacatagcttgcatcagagaatgtctcgggatggatttactgcccccctgtggtacaagatcaatcaaatgtacatagttcttgtggactcactagttcacagagagctgtatcggcaggagacctagattctatctctcttaaatcaggcaaatcaaacttatctgatttgatttttgagaatgataatgttcaccgaactgaaaaatcctcaaattccgctgctccaagtttcatagccttttctgatgctattagtgctccaaatcaagctagctttgattccaaagcttctcaggaacaccatgtcactaccatagatcaatctgtagatctattttcaaatacgcttactgaaactccatctgctgataaggtgataccaacagctcattcaatggacaatgctgggtgggccacatttgatacacctccagaacaaaagcagcctgcactcactgggctttcttatgtttctgctacaagcatcgataaacaagctcttaatcatgatttgttttcatctgaatcaaatgatgagctaacatggttccggagctctaaggatgatgcttcggttaccaatcataatcagtctactgctacatctcttgatacatgcagttctgagccttggagtattttcgatgcctccagtggtagtacccagtacactgtcaagggagatctatcattaatgacttctagattgcaagagcctaaaggaacaatgaacgaaaatagctctcagctttggcattcatttgatgatgctaatgggatcgtttgtgctcagccacgaattgatgaccacagcaatacagcaagcatttctctatcaaccagcaatccatttgtgtgctctatagttttaaaggaatcttatgacgatgattcccacaaagtattgatgggtgaattgacacctaatacattgattgctgcttcctcagagccatctctgggaggaccctctactgagcagatgccattaaatccatttgaccttccatttgacactcagtcggggactcctgatctgttcatggacgtaagttcattgcaagaggccttgcctagcccagatctgccaaccttccttgatggtttacctgaaagatggttctccagcagctcttgtgcttatgttccatcagcgtcagcgtcacatggtggactgccgtgccttgtcgagcggggccccaactgttccttgctgaatataccagttggcactttatcagctggaaatccttttgtatagagggcatcacagtgaaaataatctgcgtcttggacttggcatgttcctttggtttggtgatcttagagctaggaatcttttctgtgcgaaccgggacaccttgcaaggttaccagaggaggtggggaatatgatagcgtccccaggacccactggaggaatgtttagtaattgtgagtttctgatggaggaatgtgtgtattctttctcggttcatgtactctaggacatgattattcagcactaccgggcatcctcccggtacatttctttctgatagttacaacgatacatggcttcatccagttattcaagttgttcaggtacatgtacatctcttgc

SEQ ID NO: 7447 - DNA, 1572 bp, Zea Mays
cgaaggttcttctcacgcaccttctttccttcccctccccaacttcgacccttcccctgtccatctctctccttttttttttggtttcctcgcgtttaaagcttcgaggccgaatcgacctccagttctcgagacgactcgtctccctctttcaataagttcggcagggtaggacggcttcttcctctgcgccttcaccttcgcctgcgctgccggggctcgtcgcatggtttttaaatcgggtttgtaagttttagatctttatgtcaactaccaatctgaggcggcgactccatcatggagacgttgatggaaggaaaaacgagcatgttgacatatccagtgctgattccctcaatgaacctctattagggaagtccaatgatgacaactttggatcagaggtgtatgatcctagaaaacaggatctgtgggatgatgatatgaagaaagaacaactacactggtcatttcttttctcaaacttgattacacaatgggcacaatggttagcaagcattattgtgagctcaggatctatctttggtagattatcccccttctcttcagagaaccaaataaatccagtatatcttagccctttacaggttggatactttaagacacagattgcaaatctcttttgatggctcccgtattgaacatcaagtgtgtattactgatgtagattggttttctaggttgacatcatctcatgaagtaaattaattaataatttatgggctttatcattattaggatgccttgaggcaactctggcgtttagcttatcccgctcgtgagattccaccactcaaatctgaattatggaaggagatgggttggcaaggcaacgatccatctactgatttcaggggtggtggactcatatcgttggagaacctcatcttttttgctaggaactaccctaattcatttcagatgcttctgaacaaagtacaagggcagagatcagattgggagtacccttttgcagttgctggtatcaacgtttcattcatgctggtccagatgttggatctgaagtcaagtgttccatcttctaagtatggaattcgtttccttgaattgcttggacgtgatgagaacgcctttgaccacctgtactgtgtggcctttcggttgcttgatgctcagtggcttgtgaaacgtgcctcctatatggaattcaatgaggtcttgaaatcaacaagaactcagctggagcgggaactggttctagatgatgtgctggaggtgaaggacctgccgtcctacactatgctggatgagtaagctaaagccgagctgttgaacttggacgctggagaattgactaagctggtctgatggctaatagttatctagcgtatgctgatgtctgatcctaaatgcttaggcggcccacatgccattttacattgccgcatattttttttcttgttgtatactgaggtcttatgaggtgtttatatatgattcctttgtaaatattgtgtttgttatatgttatccttttggacatgctggttccaaggaaataaagcaatcgatctcgtattcattttcagc

SEQ ID NO: 7448 - DNA, 1408 bp, Zea Mays
gtcaatgttggagtactgagtacctacttcctttgcaccgaagttctcgagacgactcgtctccctctttcaataagttcggcagggtaggacggcttcttcctctgcgccttcaccttcgcctgcgctgccggggctcgtcgcatggtttttaaatcgggtttgtaagttttagatctttatgtcaactaccaatctgaggcggcgactccatcatggagacgttgatggaaggaaaaacgagcatgttgacatatccagtgctgattccctcaatgaacctctattagggaagtccaatgatgacaactttggatcagaggtgtatgatcctagaaaacaggatctgtgggatgatgatatgaagaaagaacaactacactggtcatttcttttctcaaacttgattacacaatgggcacaatggttagcaagcattattgtgagctcaggatctatctttggtagattatcccccttctcttcagagaaccaaataaatccagtatatcttagccctttacaggaacaaaggttggatactttaagacacagattgcaaatctcttttgatggctcccgtattgaacatcaagatgccttgaggcaactctggcgtttagcttatcccgctcgtgagattccaccactcaaatctgaattatggaaggagatgggttggcaaggcaacgatccatctactgatttcaggggtggtggactcatatcgttggagaacctcatcttttttgctaggaactaccctaattcatttcagatgcttctgaacaaagtacaagggcagagatcagattgggagtacccttttgcagttgctggtatcaacgtttcattcatgctggtccagatgttggatctgaagtcaagtgttccatcttctaagtatggaattcgtttccttgaattgcttggacgtgatgagaacgcctttgaccacctgtactgtgtggcctttcggttgcttgatgctcagtggcttgtgaaacgtgcctcctatatggaattcaatgaggtcttgaaatcaacaagaactcagctggagcgggaactggttctagatgatgtgctggaggtgaaggacctgccgtcctacactatgctggatgagtaagctaaagccgagctgttgaacttggacgctggagaattgactaagctggtctgatggctaatagttatctagcgtatgctgatgtctgatcctaaatgcttaggcggcccacatgccattttacattgccgcatattttttttcttgttgtatactgaggtcttatgaggtgtttatatatgattcctttgtaaatattgtgtttgttatatgttatccttttggacatgctggttccaaggaaataaagcaatcgatctcgtattcattttcagc

SEQ ID NO: 7449 - DNA, 1482 bp, Zea Mays
cccatggaggttcgtctcggcggcagcagtgccagccggtagccggccgagtcaatgttggagtactgagtacctacttcctttgcaccgaagcttcgaggccgaatcgacctccagttctcgagacgactcgtctccctctttcaataagttcggcagggtaggacggcttcttcctctgcgccttcaccttcgcctgcgctgccggggctcgtcgcatggtttttaaatcgggtttgtaagttttagatctttatgtcaactaccaatctgaggcggcgactccatcatggagacgttgatggaaggaaaaacgagcatgttgacatatccagtgctgattccctcaatgaacctctattagggaagtccaatgatgacaactttggatcagaggtgtatgatcctagaaaacaggatctgtgggatgatgatatgaagaaagaacaactacactggtcatttcttttctcaaacttgattacacaatgggcacaatggttagcaagcattattgtgagctcaggatctatctttggtagattatcccccttctcttcagagaaccaaataaatccagtatatcttagccctttacaggaacaaaggttggatactttaagacacagattgcaaatctcttttgatggctcccgtattgaacatcaagatgccttgaggcaactctggcgtttagcttatcccgctcgtgagattccaccactcaaatctgaattatggaaggagatgggttggcaaggcaacgatccatctactgatttcaggggtggtggactcatatcgttggagaacctcatcttttttgctaggaactaccctaattcatttcagatgcttctgaacaaagtacaagggcagagatcagattgggagtacccttttgcagttgctggtatcaacgtttcattcatgctggtccagatgttggatctgaagtcaagtgttccatcttctaagtatggaattcgtttccttgaattgcttggacgtgatgagaacgcctttgaccacctgtactgtgtggcctttcggttgcttgatgctcagtggcttgtgaaacgtgcctcctatatggaattcaatgaggtcttgaaatcaacaagaactcagctggagcgggaactggttctagatgatgtgctggaggtgaaggacctgccgtcctacactatgctggatgagtaagctaaagccgagctgttgaacttggacgctggagaattgactaagctggtctgatggctaatagttatctagcgtatgctgatgtctgatcctaaatgcttaggcggcccacatgccattttacattgccgcatattttttttcttgttgtatactgaggtcttatgaggtgtttatatatgattcctttgtaaatattgtgtttgttatatgttatccttttggacatgctggttccaaggaaataaagcaatcgatctcgtattcattttcagc

SEQ ID NO: 7450 - DNA, 1612 bp, Zea Mays
aagatgaatgtttaactggaactagcgagtgtgataaaatgttccttatcggcggaaggggcagatatttttcggttctgtgacggctttccgagtttggtggattgtgtcgagagagtcagagagggacaccaaagccggctacggccagtccccagtcagcctagcttcgctcgctgttcgttcgtcctgatagcttgaaaccgccatggccatggggctccccggccaccgctgctgccgccttcccgctctcgggtcggtcactccactctgtcccgccctcgctcgcaggcccctcccgcggacctcggatctccgctactcctccctcgaagcccaaggtcctgcgcatgttccttgaggagaggcaactgcacggcgatttcgtcaccaagatctctgacatggtctggaggaggaatggcggcaatgttgatgcggttgaggcgaccacagaccaaggcaatgctgtagatgttgctcagcctgaagacgtgcgggaagatgttgtggacgacggaatgttgagactagcggcaaccagaggttgggtgcccggtgacagcagccctcctttgagcaagaggctttcagctaaggattggcagaatgagagagacaaaaggaaggagctgaatcttttgaaatatgaagcactcaaggatgaattgctgctcttgaccacagggattggagcagcatgtagtttatactgtctcctggttttctctctcgagactgctgtcagttatgctttgggggttggtttcagctgcttgtatcttcaacttctgtgtcaacatgctgataacctatcaaagcaagatattccacaagtttttctaaagaagaaagtgaagaaaattggcattacaagtgaagatttgaagaatacaatagagaagacattgggtggtggaagagtagctctttcatccccaaggcttgtgattcctgccgtgatttttggattgtcagctttatcagaccacttcaaaaatagttttttcagttttgaggttcttccagggatgatgggtttcctcgcatacaaggctgcagctttggttcaggtctacagagataacgaggatctccgcttgatacttcctgaggaagaggatgctgacagtgaaagcacttgatgcatacaaattagagattatgttaacctgttgataaaaacagaacggtctgatttactgagtcatgcttcagttctgaaaaaaaatctcttaaggatatcctaaaattcgtttgcttgaacagcctagtgccaggagtccaggacagctcactactattaaaatgagatgtaaaattacctgataatgtcataatttttcacaaaccaaacaacttcaactcgtcatagcaaggcttctgattgttaacccagacaagagagtttttttttactattatgatactcataagaagtggcttctctacaatagtatcaatagattggaattctctataatgatatttgtaagcgaggaacttctccaaaacggtatttcaccaatacttattgtattttcttattttcttttctaccatctaaaacgagcacaattcctatagttttattggtgcacactcaaga

SEQ ID NO: 7451 - DNA, 2141 bp, Zea Mays
aagatgaatgtttaactggaactagcgagtgtgataaaatgttccttatcggcggaaggggcagatatttttcggttctgtgacggctttccgagtttggtggattgtgtcgagagagtcagagagggacaccaaagccggctacggccagtccccagtcagcctagcttcgctcgctgttcgttcgtcctgatagcttgaaaccgccatggccatggggctccccggccaccgctgctgccgccttcccgctctcgggtcggtcactccactctgtcccgccctcgctcgcaggcccctcccgcggacctcggatctccgctactcctccctcgaagcccaaggtcctgcgcatgttccttgaggagaggcaactgcacggcgatttcgtcaccaagatctctgacatggtctggaggaggaatggcggcaatgttgatgcggttgaggcgaccacagaccaaggcaatgctgtagatgttgctcagcctgaagacgtgcgggaagatgttgtggacgacggaatgttgagactagcggcaaccagaggttgggtgcccggtgacagcagccctcctttgagcaagaggctttcagctaaggattggcagaatgagagagacaaaaggaaggagctgaatcttttgaaatatgaagcactcaaggatgaattgctgctcttgaccacagggattggagcagcatgtagtttatactgtctcctggttttctctctcgaggtacgtcctcatatcaaaagaaagaaacataacttaaatgtttccgtgtctaatctaaaactcttgtagcaactgatgtttacccacaaaacaacagcttggttgcctggataataaaatgcattaccataaatatgttcctgcataattggctgaactgggttatatcagcaattaagtgtccataaagggtagaactagtgccagaggctcctacataagtagggtctgatgaaagaataaatcgaagcaagtattctccgtaaatttggagagactgcttcaaaccgtgacctggtgatcaactttcactattgcaccaagtccaccctttgcagtgcccatagtttgtcatttatgcattctggaccttgcatcatatttgttagtttttgattcatgattagagcgcaccaaacatacagcctgatgtatgtatttttttcttgtatcaagtgttctttggtaagtgatttattaatcatctcatcattaattggacatccagacacctagcgaagaccatcagactgctgtcagttatgctttgggggttggtttcagctgcttgtatcttcaacttctgtgtcaacatgctgataacctatcaaagcaagatattccacaagtttttctaaagaagaaagtgaagaaaattggcattacaagtgaagatttgaagaatacaatagagaagacattgggtggtggaagagtagctctttcatccccaaggcttgtgattcctgccgtgatttttggattgtcagctttatcagaccacttcaaaaatagttttttcagttttgaggttcttccagggatgatgggtttcctcgcatacaaggctgcagctttggttcaggtctacagagataacgaggatctccgcttgatacttcctgaggaagaggatgctgacagtgaaagcacttgatgcatacaaattagagattatgttaacctgttgataaaaacagaacggtctgatttactgagtcatgcttcagttctgaaaaaaaatctcttaaggatatcctaaaattcgtttgcttgaacagcctagtgccaggagtccaggacagctcactactattaaaatgagatgtaaaattacctgataatgtcataatttttcacaaaccaaacaacttcaactcgtcatagcaaggcttctgattgttaacccagacaagagagtttttttttactattatgatactcataagaagtggcttctctacaatagtatcaatagattggaattctctataatgatatttgtaagcgaggaacttctccaaaacggtatttcaccaatacttattgtattttcttattttcttttctaccatctaaaacgagcacaattcctatagttttattggtgcacactcaaga

SEQ ID NO: 7452 - DNA, 1984 bp, Zea Mays
aagatgaatgtttaactggaactagcgagtgtgataaaatgttccttatcggcggaaggggcagatatttttcggttctgtgacggctttccgagtttggtggattgtgtcgagagagtcagagagggacaccaaagccggctacggccagtccccagtcagcctagcttcgctcgctgttcgttcgtcctgatagcttgaaaccgccatggccatggggctccccggccaccgctgctgccgccttcccgctctcgggtcggtcactccactctgtcccgccctcgctcgcaggcccctcccgcggacctcggatctccgctactcctccctcgaagcccaaggtcctgcgcatgttccttgaggagaggcaactgcacggcgatttcgtcaccaagatctctgacatggtctggaggaggaatggcggcaatgttgatgcggttgaggcgaccacagaccaaggcaatgctgtagatgttgctcagcctgaagacgtgcgggaagatgttgtggacgacggaatgttgagactagcggcaaccagaggttgggtgcccggtgacagcagccctcctttgagcaagaggctttcagctaaggattggcagaatgagagagacaaaaggaaggagctgaatcttttgaaatatgaagcactcaaggatgaattgctgctcttgaccacagggattggagcagcatgtagtttatactgtctcctggttttctctctcgaggtacgtcctcatatcaaaagaaagaaacataacttaaatgtttccgtgtctaatctaaaactcttgtagcaactgatgtttacccacaaaacaacagcttggttgcctggataataaaatgcattaccataaatatgttcctgcataattggctgaactgggttatatcagcaattaagtgtccataaagggtagaactagtgccagaggctcctacataagtagggtctgatgaaagaataaatcgaagcaagtattctccgtaaatttggagagactgcttcaaaccgtgacctggtgatcaactttcactattgcaccaagtccaccctttgcagtgcccatagtttgtcatttatgcattctggaccttgcatcatatttgttagtttttgattcatgattagagcgcaccaaacatacagcctgatgtatgtatttttttcttgtatcaagtgttctttggtaagtgatttattaatcatctcatcattaattggacatccagacacctagcgaagaccatcagactgctgtcagttatgctttgggggttggtttcagctgcttgtatcttcaacttctgtgtcaacatgctgataacctatcaaagcaagatattccacaagtttttctaaagaagaaagtgaagaagttcttccagggatgatgggtttcctcgcatacaaggctgcagctttggttcaggtctacagagataacgaggatctccgcttgatacttcctgaggaagaggatgctgacagtgaaagcacttgatgcatacaaattagagattatgttaacctgttgataaaaacagaacggtctgatttactgagtcatgcttcagttctgaaaaaaaatctcttaaggatatcctaaaattcgtttgcttgaacagcctagtgccaggagtccaggacagctcactactattaaaatgagatgtaaaattacctgataatgtcataatttttcacaaaccaaacaacttcaactcgtcatagcaaggcttctgattgttaacccagacaagagagtttttttttactattatgatactcataagaagtggcttctctacaatagtatcaatagattggaattctctataatgatatttgtaagcgaggaacttctccaaaacggtatttcaccaatacttattgtattttcttattttcttttctaccatctaaaacgagcacaattcctatagttttattggtgcacactcaaga

SEQ ID NO: 7453 - DNA, 1330 bp, Zea Mays
aagatgaatgtttaactggaactagcgagtgtgataaaatgttccttatcggcggaaggggcagatatttttcggttctgtgacggctttccgagtttggtggattgtgtcgagagagtcagagagggacaccaaagccggctacggccagtccccagtcagcctagcttcgctcgctgttcgttcgtcctgatagcttgaaaccgccatggccatggggctccccggccaccgctgctgccgccttcccgctctcgggtcggtcactccactctgtcccgccctcgctcgcaggcccctcccgcggacctcggatctccgctactcctccctcgaagcccaaggtcctgcgcatgttccttgaggagaggcaactgcacggcgatttcgtcaccaagatctctgacatggtctggaggaggaatggcggcaatgttgatgcggttgaggcgaccacagaccaaggcaatgctgtagatgttgctcagcctgaagacgtgcgggaagatgttgtggacgacggaatgttgagactagcggcaaccagaggttgggtgcccggtgacagcagccctcctttgagcaagaggctttcagctaaggattggcagaatgagagagacaaaaggaaggagctgaatcttttgaaatatgaagcactcaaggatgaattgctgctcttgaccacagggattggagcagcatgtagtttatactgtctcctggttttctctctcgaggttcttccagggatgatgggtttcctcgcatacaaggctgcagctttggttcaggtctacagagataacgaggatctccgcttgatacttcctgaggaagaggatgctgacagtgaaagcacttgatgcatacaaattagagattatgttaacctgttgataaaaacagaacggtctgatttactgagtcatgcttcagttctgaaaaaaaatctcttaaggatatcctaaaattcgtttgcttgaacagcctagtgccaggagtccaggacagctcactactattaaaatgagatgtaaaattacctgataatgtcataatttttcacaaaccaaacaacttcaactcgtcatagcaaggcttctgattgttaacccagacaagagagtttttttttactattatgatactcataagaagtggcttctctacaatagtatcaatagattggaattctctataatgatatttgtaagcgaggaacttctccaaaacggtatttcaccaatacttattgtattttcttattttcttttctaccatctaaaacgagcacaattcctatagttttattggtgcacactcaaga

SEQ ID NO: 7454 - DNA, 1297 bp, Zea Mays
aagatgaatgtttaactggaactagcgagtgtgataaaatgttccttatcggcggaaggggcagatatttttcggttctgtgacggctttccgagtttggtggattgtgtcgagagagtcagagagggacaccaaagccggctacggccagtccccagtcagcctagcttcgctcgctgttcgttcgtcctgatagcttgaaaccgccatggccatggggctccccggccaccgctgctgccgccttcccgctctcgggtcggtcactccactctgtcccgccctcgctcgcaggcccctcccgcggacctcggatctccgctactcctccctcgaagcccaagctcaaggatgaattgctgctcttgaccacagggattggagcagcatgtagtttatactgtctcctggttttctctctcgagactgctgtcagttatgctttgggggttggtttcagctgcttgtatcttcaacttctgtgtcaacatgctgataacctatcaaagcaagatattccacaagtttttctaaagaagaaagtgaagaaaattggcattacaagtgaagatttgaagaatacaatagagaagacattgggtggtggaagagtagctctttcatccccaaggcttgtgattcctgccgtgatttttggattgtcagctttatcagaccacttcaaaaatagttttttcagttttgaggttcttccagggatgatgggtttcctcgcatacaaggctgcagctttggttcaggtctacagagataacgaggatctccgcttgatacttcctgaggaagaggatgctgacagtgaaagcacttgatgcatacaaattagagattatgttaacctgttgataaaaacagaacggtctgatttactgagtcatgcttcagttctgaaaaaaaatctcttaaggatatcctaaaattcgtttgcttgaacagcctagtgccaggagtccaggacagctcactactattaaaatgagatgtaaaattacctgataatgtcataatttttcacaaaccaaacaacttcaactcgtcatagcaaggcttctgattgttaacccagacaagagagtttttttttactattatgatactcataagaagtggcttctctacaatagtatcaatagattggaattctctataatgatatttgtaagcgaggaacttctccaaaacggtatttcaccaatacttattgtattttcttattttcttttctaccatctaaaacgagcacaattcctatagttttattggtgcacactcaaga

SEQ ID NO: 7455 - DNA, 2251 bp, Zea Mays
gttagaatctagccagaaaccgatccaaagcctcatagcacactgaaatgaatcgttatgtaaggactcctttttctgtaaccatacaagatgaatgtttaactggaactagcgagtgtgataaaatgttccttatcggcggaaggggcagatatttttcggttctgtgacggctttccgagtttggtggattgtgtcgagagagtcagagagggacaccaaagccggctacggccagtccccagtcagcctagcttcgctcgctgttcgttcgtcctgatagcttgaaaccgccatggccatggggctccccggccaccgctgctgccgccttcccgctctcgggtcggtcactccactctgtcccgccctcgctcgcaggcccctcccgcggacctcggatctccgctactcctccctcgaagcccaagctggggacactattggggaggaggtcctgcgcatgttccttgaggagaggcaactgcacggcgatttcgtcaccaagatctctgacatggtctggaggaggaatggcggcaatgttgatgcggttgaggcgaccacagaccaaggcaatgctgtagatgttgctcagcctgaagacgtgcgggaagatgttgtggacgacggaatgttgagactagcggcaaccagaggttgggtgcccggtgacagcagccctcctttgagcaagaggctttcagctaaggattggcagaatgagagagacaaaaggaaggagctgaatcttttgaaatatgaagcactcaaggatgaattgctgctcttgaccacagggattggagcagcatgtagtttatactgtctcctggttttctctctcgaggtacgtcctcatatcaaaagaaagaaacataacttaaatgtttccgtgtctaatctaaaactcttgtagcaactgatgtttacccacaaaacaacagcttggttgcctggataataaaatgcattaccataaatatgttcctgcataattggctgaactgggttatatcagcaattaagtgtccataaagggtagaactagtgccagaggctcctacataagtagggtctgatgaaagaataaatcgaagcaagtattctccgtaaatttggagagactgcttcaaaccgtgacctggtgatcaactttcactattgcaccaagtccaccctttgcagtgcccatagtttgtcatttatgcattctggaccttgcatcatatttgttagtttttgattcatgattagagcgcaccaaacatacagcctgatgtatgtatttttttcttgtatcaagtgttctttggtaagtgatttattaatcatctcatcattaattggacatccagacacctagcgaagaccatcagactgctgtcagttatgctttgggggttggtttcagctgcttgtatcttcaacttctgtgtcaacatgctgataacctatcaaagcaagatattccacaagtttttctaaagaagaaagtgaagaaaattggcattacaagtgaagatttgaagaatacaatagagaagacattgggtggtggaagagtagctctttcatccccaaggcttgtgattcctgccgtgatttttggattgtcagctttatcagaccacttcaaaaatagttttttcagttttgaggttcttccagggatgatgggtttcctcgcatacaaggctgcagctttggttcaggtctacagagataacgaggatctccgcttgatacttcctgaggaagaggatgctgacagtgaaagcacttgatgcatacaaattagagattatgttaacctgttgataaaaacagaacggtctgatttactgagtcatgcttcagttctgaaaaaaaatctcttaaggatatcctaaaattcgtttgcttgaacagcctagtgccaggagtccaggacagctcactactattaaaatgagatgtaaaattacctgataatgtcataatttttcacaaaccaaacaacttcaactcgtcatagcaaggcttctgattgttaacccagacaagagagtttttttttactattatgatactcataagaagtggcttctctacaatagtatcaatagattggaattctctataatgatatttgtaagcgaggaacttctccaaaacggtatttcaccaatacttattgtattttcttattttcttttctaccatctaaaacgagcacaattcctatagttttattggtgcacactcaaga

SEQ ID NO: 7456 - DNA, 731 bp, Zea Mays
tatataatgcccgggggactgtcttaccctcgcagggacataaaccctcaagctccaacacacattctcatcatccccaaagtcaaggatggactaactggcctggcaaaggctgaagagaggcacatagaaatacttggctatctcctctatgttgccaaggttgttgcgaagcaggaaggacttgaagatggctatcgcgtcgtcatcaatgacggcccaagtggatgtcaatctgtttaccacatccacgttcatctcctcggaggcaggcaaatgaactggcccccaggctaagaatatcttgtgattgatcagtgctaatgccaaggactgctactccatttctctagaataatccctgtaatttccataaaagctagtgcgcagtgcgctgaccttgtgctatatttgtggaattaccggaagcatgctgctgtgatctatgattggacacaagaaacttgtaactggtactcctatcatcgattgacttgtccttattgatcagctgatgggggttgcccactggccttgctgatctgcagaatcttcttgccagtctttctaccttttttttaatctaagaacaatagcttcgatacctgcatggctgcattcgtttcgtttatattggtttaacagcaaggctgtcgaaatagccaaatccaaatatagtattagaagggcatacttgaagcacgtcattaggtcaggtcgcgtgcttgaag

SEQ ID NO: 7457 - DNA, 775 bp, Zea Mays
ccagtatgtggttcttattttgctacagattatataatgcccgggggactgtcttaccctcgcaggtactggctttcagggacataaaccctcaagctccaacacacattctcatcatccccaaagtcaaggatggactaactggcctggcaaaggctgaagagaggcacatagaaatacttggctatctcctctatgttgccaaggttgttgcgaagcaggaaggacttgaagatggctatcgcgtcgtcatcaatgacggcccaagtggatgtcaatctgtttaccacatccacgttcatctcctcggaggcaggcaaatgaactggcccccaggctaagaatatcttgtgattgatcagtgctaatgccaaggactgctactccatttctctagaataatccctgtaatttccataaaagctagtgcgcagtgcgctgaccttgtgctatatttgtggaattaccggaagcatgctgctgtgatctatgattggacacaagaaacttgtaactggtactcctatcatcgattgacttgtccttattgatcagctgatgggggttgcccactggccttgctgatctgcagaatcttcttgccagtctttctaccttttttttaatctaagaacaatagcttcgatacctgcatggctgcattcgtttcgtttatattggtttaacagcaaggctgtcgaaatagccaaatccaaatatagtattagaagggcatacttgaagcacgtcattaggtcaggtcgcgtgcttgaag

SEQ ID NO: 7458 - DNA, 857 bp, Zea Mays
cccacttagtagacaccgtagcagtacagttcggtggtaaccgctccatctatcatttagaaactgagactcgggagattgttgatctgatttgacaagatcatcaaaaaggaaataccttctactgtggtttatgaggacgagaaggtactggctttcagggacataaaccctcaagctccaacacacattctcatcatccccaaagtcaaggatggactaactggcctggcaaaggctgaagagaggcacatagaaatacttggctatctcctctatgttgccaaggttgttgcgaagcaggaaggacttgaagatggctatcgcgtcgtcatcaatgacggcccaagtggatgtcaatctgtttaccacatccacgttcatctcctcggaggcaggcaaatgaactggcccccaggctaagaatatcttgtgattgatcagtgctaatgccaaggactgctactccatttctctagaataatccctgtaatttccataaaagctagtgcgcagtgcgctgaccttgtgctatatttgtggaattaccggaagcatgctgctgtgatctatgattggacacaagaaacttgtaactggtactcctatcatcgattgacttgtccttattgatcagctgatgggggttgcccactggccttgctgatctgcagaatcttcttgccagtctttctaccttttttttaatctaagaacaatagcttcgatacctgcatggctgcattcgtttcgtttatattggtttaacagcaaggctgtcgaaatagccaaatccaaatatagtattagaagggcatacttgaagcacgtcattaggtcaggtcgcgtgcttgaag

SEQ ID NO: 7459 - DNA, 1211 bp, Zea Mays
cgaggtgtcaattattaatggacttctctctcccgccccttctctcttcgtgatgctcctctgcttgccttgccctggtgtggtggtgtctagtcaagtacgcttccgaattaaaagcgctctggcctgcaacctgctgtctgctccgtcctcccacggccggccgcctgcccgcgtcttcttcgccacccctcttctccggtcccgcacctgcatttcttgaccccttcctccaccgcagccaaacaatgtctccggcgccgagttcgcatcactcgcagatcaattcgaggaaggagaagcggatgaggaaggtggacaccttcgcgccgcacaacgatggccaccaatggaggaagtacggcgagaaaaagatcaacaacaccaacttccccagcgaagaacccggcttttattagccagcctcctttgacttgaatgtttggtattactacagatgcacgtacaaggacaacatgaactgcccggccacgaagcaggtgcagcagaaggaccacagcgacccgccattgtacgcggtcacgtactacaacgaccactcgtgcaacagcgcgttcctcccgctctccccctccgagttccagctgcagacctcgtccgggaaggccgtctccatctgcttcgactcctcgtccgggacggcggcggcggcggccgccaccaccaatgccagcggcggctcgccctcttccagcgcggcggcggcggcggcgcggcgaggcacgccgccggaagtcagcaacccgcccgtgctgcggcggtctgagacgtacccgtggggcgccggcgccgtggagcagaagccggcgtcctgcagcaccgagtaccacgacgccttctcggctggcgccgccgccgtgccggaggaggtggtagatgcaggcagatttggatctatcaggttcttccattttttgtaaattgatcactcagtggaaggaaggcaattgatgcctttacttcgacaaactaatatgatacagtcatacagatgtcttcttttcttccttcttctttttattccttcattacatgccgaagcttactacatattcgcatgttacttttgttttcttgattcgaaatcgaaataccaatgctaattttaatccaacacttcgtttctgcaatggcttgctcgtcgattaacgtatatatattcaggatatcatttatatatgtattgaaac

SEQ ID NO: 7460 - DNA, 1948 bp, Zea Mays
gtttgttgcgccatattttaccaagatatgatgtccttggtcttcatgagtttgacagcgatcgcaagaggatgtctgtcataattggctgccctgataagtctgtcaagctgtttgtaaaaggcgctgacagttcgatgtttggagtcatcgacaaaactgcgaattcagatgttgtccaagcaacagagaagcatctccattcatattcatcattaggtctgcgaacacttgtcattggtatgcgggaacttagccaagaagagtttcaggagtggcaaatggcttatgaaaaggctagcacggcactactaggaagaggaaaccaactccgcaacgtggctgccaacatcgagagaaacttgcgtctattgggtgccactggaattgatgacaagctgcaggatggtgtacccgaagcaattgagaaactgagggaagcagggattaaggtttgggtgctaacaggtgacaagcaagaaactgctatctccatcggctattcctgcaagcttttgacaagagacatgacacagattgtaattaacagtcgctcaagagaatcatgcaggaagagtctagaagatgcaatcgccatggttaacaaataccaatcgttctcgacagacccccaacttagggtgccccttgctttgattattgatggtaacagccttgtctacattttcgatacggattgggaggagaagctttttgaaatcgctatagcctgcgatgtcgtcctatgctgtcgggtagctccccttcagaaggctggtattgttgatctcattaagaagcgaacaagtgacatgactttagctattggagatggtgcaaatgatgtatccatgattcaaatggctgacgttggcatcggcatcagtgggcaagagggaaggcaagctgttatggcctcagattttgccatgggtcaattcagatttttggttcctctgttgttggttcatggccattggaattaccagaggatggcctacatgatcctatataacttctacagaaatgctacttttgtctttgtgctattctggtatgtactttacactggtttcaccctaacaacagcgataactgagtggagcagcgtgctatactctgtgatatatactgctgtccctactattgtcgtcgccattctcgacaaggatctcagccggcggacattgctgaagtatccccaactctatggcccagggcagcgtgatgagaactacaacctgaggctattcatattcatcatgatagactccgtctggcagagccttgcatgtttcttcatcccctaccttgcatacaggaagagtataattgatggttccagccttggagacctatggacactatccgttgttattcttgtcaatattcacctggcaatggatgtcatcagatggaactggattacgcatgcggcaatatggggtagcattgctgcgacatggatttgtgtcatgatcatagattccataccaatcatgcctggtttttgggcaatctacaaagtgatgggaactgggctgttctgggcactgctgcttgcggtaactgttgttgggatgattcctcattttgccgcaaaggccttcagtgagtatttcatccccagtgacattcagattgcaagagaaatggagaagtcgcaagatttccatgatgtaactcatccagaagttcaaatgagtacagtgagtagagcttagggtagggggttacacagtgatcttttgttcattcgagtaggatatagctctacactttctttggttctttttgttgtgtgtacaggcaattctttcagcagtgtgcaagctttcttgatgcttgctcccttgccaactatccaaaggataggccccttgtaccattctgtgtatccaccagccaaattttgttgatttacatgaaaggagatcatacaggagct

SEQ ID NO: 7461 - DNA, 1522 bp, Zea Mays
tatttcgattggaaaaatataatatcttcctcgtttagtcaatcttctacaattttgtaatctatggctaaagtaaatttgattctttacagacatgccttcccattgcattatcagtgggggattgtaaagttagaatttggttcttgattaacaacttgtatagctgctattaattaccagctttttcctactgaactttcatggatcaagaccagaaacttctgattatcctcagtcaagtgagaggccactgactgccacaagcagtttcagttctgcatccccattttcggaatcaagccaactagcttcgtctagtaaacaagcggccccatatctacctcgcaaccatatgggcaggcggtctttcatgtctaaaccagtgtacccacttgtcttccggaaccctgtgtccgaatcagaagcgtgcaggatgcttgaggttagtaatgccgggcgagcgacaccaagtgatgacagccaggcttctcctctgtggcgtcgcagcttggcgagcccagagctcaagttccataacgcactgaacgaacttgggaagatggaggtttcacctgaacggaacacgagctcaagaagggaagggttcagatggagcaatgccagcagttatgattttggatacgatggagatgccattgacatgtcagatcatatcagtatcgagtcccagagatcacccacaagctcagtgaggttcctgaaatgtgggctctgcgagagattcctgtgccagaaatcaccctggacctcgaaccggattgttcgaaacgccgatatgccagtagcagcggttcttcattgccgacatgtcttccatgcggattgcttggaggagggcactcccaagacagaagtccatgaaccaccctgtccgctgtgcacggcacccactgacgacgaagcacatgtgtcattctcggaacctctgcatgttgccctccgatctgctcgcaggaacctttcgctgggcagtggcgctggagggagtaacagcagtggcgcgaggcctccttgcagtgaccgtggcctgaagaggaaccattctgctatcgtgccgagacgcggcggcggcggctcgttgttccgcaaccgcttcaagaggcagttccccttcaaggctaggatcgggaaggagctctttggcggcagggttttcagcaaggtcgggtcgtcttcaggtcaacaggatgaccatcgacagcaagcgccgaagcgtgatcggctcatgaagtagctagagaacttagtggcacggagtatatgttgtgtgccctcctgatattctatccgtgccatcagttatcatgtctagtgtaacctataacagcatgcgaaacttggcatccatgcgcagtagtcgtccaagacgggggctctgtatatggaggctgcctgcattgcatgtagcacccaccgttggctaactatgaggtgtattttggatccttgcagtaagaatctcagaatctatgccctatgattactatgttctgcttga

SEQ ID NO: 7462 - DNA, 3414 bp, Zea Mays
actctgctctccttttcccctttctccgttcacctttctctcttcctttttctttcccctccctctccctttctttcctcctggcgacgactgggcgagtgccgccgaacttcgccaggtcttcaccggcgacgagcacctacaaggtgacactattccttttcttcacttggtgtataatctctctttgctccgatcaagcttttcaaacataataagcaaatagtctctgcacgtgattgccaaaattagtcaagacgggtgctctttgctgcgtggccgctaggccacatgggacaaagtctgaccctgctagcagagatcgttctatggatcctactgagcctcgttggcgcataaattcgagcttttctcctccaacgtcaaggaggtgggattgccgctattcatcagatggattgccccacagagttcatgatgctcctcatgatcacccgccatatgtttcatcactatcatcccatagcaaaggaagcagaagtgcatttggcagtgatcagtacctcaatcatcatcattctgcatctgatggagcactttcttactttgggagtccagctgacagccttcaggccccacgctggacaccctctcttcaaagatttgatctcggtgaattctctacccctgcaggaggtatgtacttttcatttcatatgtcagatgacattagctgagcagctaaccaaatttttttttctgttttcttttatggctgtctcttcatagaattccgacttgtgagttagactgaatttgggcttctattggaaataatgacacagtgtgccaacttatttcgattggaaaaatataatatcttcctcgtttagtcaatcttctacaattttgtaatctatggctaaagtaaatttgattctttacagacatgccttcccattgcattatcagtgggggattgtaaagttagaatttggttcttgattaacaacttgtatagctgctattaattaccagctttttcctactgaactttcatggtgagcactcttataatcttttctattagacgtgttattattttcatatatgatatatgctctgttactcagcgtgcattcagttgtatatggtttagacatgattatgttttgttaggttttcattgggtttaacaatatttgagcccaaataataataggattcattattgtatctttatgattttcgttatttattacttctaagattaagttggttcaatacaaacatagctttacattgcataatcaatggggaacttgtaatctgttttgtttggccagttcattggttgattttacattgtattctttgcgttaagacttactccctctattctagttgttttagttttttgttctaagtcaaacttttactttgaccaagtttgtagaaaaagatattaatatctccagtacctaataaatgtattatcaagagatttcatggtggatctaatgaaactaatttgacgatgtagatattgatacacttttctataaactttgttaaagttagataagtctgacttaagacaaaactaaaacgacctataatggagggatttactactaggattttatggtcatgcactctagttgcttataatgtttccattgggttggatcttggtattacttttcatacattatatgcactgttagtataaacattgctcaaagtgtgccttgttctattttgcacaaattgagcaatatttatgcccaaagaagccttaggcccctgtgaatcaaacaaatgtatctggaatcggaatcatcttaggtgtgataattgacaagtatattgagaccaaaaagattagtctcaacttttcttctaactgaatctactggtagtgttattttcttcattgtaaacactggggttggcattaatggcatgcaagtcaaagactgctacgccacaatttttcttcgtttttgtgactactagatgtcttcctataatcctacacaattgtagaagcaactgagacattcatgtgtttctcgtattcctttgatatcttcctgttgtattgtattaaccgttgctttactcattgaaccaggatcaagaccagaaacttctgattatcctcagtcaagtgagaggccactgactgccacaagcagtttcagttctgcatccccattttcggaatcaagccaactagcttcgtctagtaaacaagcggccccatatctacctcgcaaccatatgggcaggcggtctttcatgtctaaaccagtgtacccacttgtcttccggaaccctgtgtccgaatcagaagcgtgcaggatgcttgaggttagtaatgccgggcgagcgacaccaagtgatgacagccaggcttctcctctgtggcgtcgcagcttggcgagcccagagctcaagttccataacgcactgaacgaacttgggaagatggaggtttcacctgaacggaacacgagctcaagaagggaagggttcagatggagcaatgccagcagttatgattttggatacgatggagatgccattgacatgtcagatcatatcagtatcgagtcccagagatcacccacaagctcagtgaggttcctgaaatgtgggctctgcgagagattcctgtgccagaaatcaccctggacctcgaaccggattgttcgaaacgccgatatgccagtagcagcggttcttcattgccgacatgtcttccatgcggattgcttggaggagggcactcccaagacagaagtccatgaaccaccctgtccgctgtgcacggcacccactgacgacgaagcacatgtgtcattctcggaacctctgcatgttgccctccgatctgctcgcaggaacctttcgctgggcagtggcgctggagggagtaacagcagtggcgcgaggcctccttgcagtgaccgtggcctgaagaggaaccattctgctatcgtgccgagacgcggcggcggcggctcgttgttccgcaaccgcttcaagaggcagttccccttcaaggctaggatcgggaaggagctctttggcggcagggttttcagcaaggtcgggtcgtcttcaggtcaacaggatgaccatcgacagcaagcgccgaagcgtgatcggctcatgaagtagctagagaacttagtggcacggagtatatgttgtgtgccctcctgatattctatccgtgccatcagttatcatgtctagtgtaacctataacagcatgcgaaacttggcatccatgcgcagtagtcgtccaagacgggggctctgtatatggaggctgcctgcattgcatgtagcacccaccgttggctaactatgaggtgtattttggatccttgcagtaagaatctcagaatctatgccctatgattactatgttctgcttga

SEQ ID NO: 7463 - DNA, 1876 bp, Zea Mays
gctgctttcactctgctctccttttcccctttctccgttcacctttctctcttcctttttctttcccctccctctccctttctttcctcctggcgacgactgggcgagtgccgccgaacttcgccaggtcttcaccggcgacgagcacctacaagtcaagacgggtgctctttgctgcgtggccgctaggccacatgggacaaagtctgaccctgctagcagagatcgttctatggatcctactgagcctcgttggcgcataaattcgagcttttctcctccaacgtcaaggaggtgggattgccgctattcatcagatggattgccccacagagttcatgatgctcctcatgatcacccgccatatgtttcatcactatcatcccatagcaaaggaagcagaagtgcatttggcagtgatcagtacctcaatcatcatcattctgcatctgatggagcactttcttactttgggagtccagctgacagccttcaggccccacgctggacaccctctcttcaaagatttgatctcggtgaattctctacccctgcaggaggatcaagaccagaaacttctgattatcctcagtcaagtgagaggccactgactgccacaagcagtttcagttctgcatccccattttcggaatcaagccaactagcttcgtctagtaaacaagcggccccatatctacctcgcaaccatatgggcaggcggtctttcatgtctaaaccagtgtacccacttgtcttccggaaccctgtgtccgaatcagaagcgtgcaggatgcttgaggttagtaatgccgggcgagcgacaccaagtgatgacagccaggcttctcctctgtggcgtcgcagcttggcgagcccagagctcaagttccataacgcactgaacgaacttgggaagatggaggtttcacctgaacggaacacgagctcaagaagggaagggttcagatggagcaatgccagcagttatgattttggatacgatggagatgccattgacatgtcagatcatatcagtatcgagtcccagagatcacccacaagctcagtgaggttcctgaaatgtgggctctgcgagagattcctgtgccagaaatcaccctggacctcgaaccggattgttcgaaacgccgatatgccagtagcagcggttcttcattgccgacatgtcttccatgcggattgcttggaggagggcactcccaagacagaagtccatgaaccaccctgtccgctgtgcacggcacccactgacgacgaagcacatgtgtcattctcggaacctctgcatgttgccctccgatctgctcgcaggaacctttcgctgggcagtggcgctggagggagtaacagcagtggcgcgaggcctccttgcagtgaccgtggcctgaagaggaaccattctgctatcgtgccgagacgcggcggcggcggctcgttgttccgcaaccgcttcaagaggcagttccccttcaaggctaggatcgggaaggagctctttggcggcagggttttcagcaaggtcgggtcgtcttcaggtcaacaggatgaccatcgacagcaagcgccgaagcgtgatcggctcatgaagtagctagagaacttagtggcacggagtatatgttgtgtgccctcctgatattctatccgtgccatcagttatcatgtctagtgtaacctataacagcatgcgaaacttggcatccatgcgcagtagtcgtccaagacgggggctctgtatatggaggctgcctgcattgcatgtagcacccaccgttggctaactatgaggtgtattttggatccttgcagtaagaatctcagaatctatgccctatgattactatgttctgcttga

SEQ ID NO: 7464 - DNA, 2117 bp, Zea Mays
aaaaaagacgcggcgatttttcgctcctctaatccggtttgcctttatccgtgggacttctttttaaaaggagctactttccttcgccgcttccgcaatcttccattcctcctctctccttccctgtgtctctctcctcgcgagctcttcatcccttcttccagcgcggtttggcgatggcggcagcgcaggcgatctcgaaggggagcgtggtgtctccatgcggcaatcgagcggcgccgggcttccttgccaggcggaggggtgccgtggcggcgcggatggcaccgtcagcggcgcggatcgggggcttctggaggaagaacgcgtttcctggcgggaggctaaccctgaggacgaggagatccagggccgcgtcaccgacgcagatgaacatgaaccttgcgcttgggaaatcgatgaggtggtgggagaaggggttgcagcccaacatgcgtgagatcgagtccgcccaagaccttgtcgatgctttgaccaacgccggcgacaggctcgtcgtcgtcgacttcttctctcctggctgcggcggctgccgtgcttttcaccccaagatttgtcaatttgcggagcagaatccagatgtgctgttcttgcaagtgaactacgaggagcacaagtctatgtgccacagccttcatgtccatgtcctacccttgttcagattctacaggggagcacagggacgactctgtagcttcagttgtaccaacgcaactgtaagatccggatccgatcagctcctcaataacatgcaacgaacccaaaatgatctatattcattactagtcaccctcttggagctaaatctcgttaataaagttgtgaatccgggtagagcttgttggcaacccaacttcagttttggacccaaatggctaattttgctcctatacttgcagaatatgagaggcaaagaatgaccttttaatttgaatggaaaagaatggccatttaaagttagtgaatttggatagagcttgttgacaacccaactttagttttggactcaaatgttaggtttgttctgatacttgcagaatataacaagcaaagaatgaccttttaagttgaatccaactggcaaagaatgaccattttaagtttcccctagcagttcatgcaatattgcaacacttaactgataggatagaaacattttccctcacgaacccaactggatgttgtgtgattgatttcctggctattatacaattttagctatacttgggattgctgttgggtgttggctgtgatcacccatctggactaacgggagtgttatttccaaatgcagattaagaagttcagggatgcacttgcgaagcacaagccagatagatgtagccttggcccaaccagggggctagaggaatctgagttattagccttggcggcaaacaaggacctgcagttcacctacgcgaagcaggaaccagaactgatccccaggggagatgctcctggggaggtcgttgctcccgagcctgcaaagcttcctgcggctccaaagcctttggtcaggctggggtccgaggagaggtcaggctggtctcgtcaggaagatgaaatgcatatgaggttatcatgaggatgattagatgcttccgttctgtatagttccgcggttcttggtgtgtacaggttgtagcttcccatggtagcagagtgcaggctaagattttttacatgtgaagcctgcccgcctgtcgtccagtagtttagctcggttggattagcagtaccaatgagcggtgttgtggagctctgccttgaggaaatcgtgtggtagatgtatggatgattcgtctacatgctatttcgtcgaattctgtagatcaagtggatgtgtagctcttgtttcatttcccctgtagcgttgggatctgtccgtcgcagaacagaataatcgatcatgccttatgttgtgccagatattgtggtgcttagagatcattgtttgttgtgataatattcgagtccgtgactagtttccttatgttgtatcagacactgtggtgatcattgttgtgataacatttgagttttgtggctagttcctgccttgccttcggggcagggaacggccgattgagaaa

SEQ ID NO: 7465 - DNA, 2369 bp, Zea Mays
gcgccgcgtccgcgctgctggcacgccgcgtgtgcttggctcccgccccacgcccagtgcctccctccctctctgcccccctgccgcggcgcgtgcctggctggctggttgccctccgcttgggccttggagagcccgggcttcgatttctagctggttccgccactgccgagaagccgcgcgttgtcaggcacgggaaagaggtagtccgcgggaggttctctccggaggagaggtatggtgcccgcgagggctcgccatatcgatagatccgcctctgaccagcagcaagggcccgctccagcgggggcggcgacgctgctagtgcggcacctcccagaggctatcacgcaagagatgctatcccgcctcttctcccactacggagccacatccgtccgcccctgttccggtggaaagttgagaaattgcgcatttgtagattttagggacgaggcggcagctaatcacgcacattcgctcttgaacaggttgaggtttctgggaaaagtgttgactgtcgagcgagctaactgtccaaatgcaaatgagtctcacctgaagcatcaggaccaattagggcatggggcgtcccaggtaccaagtattagttcccaaactcagaaggaccacacatcgattgccgaaccaattgcccccaagcttagtgtggactacccatttcctccacaccttgagtatgcatatccaccaccagatggaaacatattaacaaatattgtcaatgccctgatcgccgtccctcgattctacaaccaggtttattaggatttccaccctatgcacccattattacaactcgcaaggtcctgcatttaatgaacaagatgaaccttcctgctccatttcggatggcattgcctactccaccactaccatcgcaagttcctgttatccctcatcctcagccaccaccgggatctactacaactggggagcttcattcagcagatttgtctagtgatgagtctgagttagaatcatctgatgaagatattgataaacggaaaatcaagcgtgcaaagcatgaagcaattgttggtcctgcagttgacaaaaacgttgctcatgaagcagtgggggtgaaatctgttgcattggtttctaatgagcttcaagtgataaaaaagaaaaacccagtacttcagataaaaattacccctaagcctatacagaaggaaccacctgtcccaagtatgactgaaaatgaaccggattcaactcatgaacaacttcaagagaaacattttgtcacacctcaggaaatgtcgagagagaaattaccaccagaggagattttatcccttcctatgttcaagaattacactccaggaaatccagccagtgttctgtacattaagaacttggcaaaggatgtcactcatgacgacttctactatgtctttggctctgttttcgaaagcatggacagtgcaaggttgggtttaagtgtaaagttaatgcaggaaggacggatgcgtggtcaagcctttgtcacatttcccacggttgaacttgctcagcgtgccctgaatctagcgcatggctatgtgttcaaaggaaaaccaatgatcatacaattcggaagaaatcctgctgctaacaaagcttcctaaagcaggatacaattttctttccagattttgatagatttcagaagttggtaggaactggaaagtgacaaaccagaggttgtgggtatctgttggctgttgttactgcaacctgtttggcatacacactaggctgattggttcctcccatggtgtaatgtttgtcgaaaaataacattgtacattccagtttgtggattattaaaagaattactcgataaaagcggacattggaggttataagctgcaaatcgagcaatgactgctagcagcctgccgtcactgagaatcaggtcgttcctatgtatcaaaacttatataaattagagaagcaatccgattagaaattgaaatcgttctaggcctccattccgtaataaccgaatcgccccttatggttttgcagaatctagcgcatggctatgtgttcaaaggaaaaccaatgatcatacaattcggaagaaatcctgctgctaacaaagcttcctaaagcaggatacaattttctttccagattttgatagatttcagaagttggtaggaactggaaagtgacaaaccagaggttgtgggtatctgttggctgttgttactgcaacctgtttggcatacacactaggctgattggttcctcccatggtgtaatgtttgtcgaaaaataacattgtacattccagtttgtggattattaaaagaattactcgataaaagcggacattggaggttataagctgc

SEQ ID NO: 7466 - DNA, 1122 bp, Zea Mays
cccaaatcccctgtcccgctagcggctagtccgaccaggcgatccccccccaaaccctcccccaaaaccccagagcggagaagagcgcaagatgttcggcttcgggcaccacggccagaacccgccggctcacggcggcgtgcaccagcccaccttcaagatcttctgcaagtccgacgaggggtactgcctcaccgtccgcgacggcaacgtggtgctggcccccgccaacccgcgcgacgagcaccagcactggtacaaggacatgcgcttcagcacccaggtcaaggacgaggagggcaaccctgcgttcgccctggtcaacaaggccactgggctcgccatcaagcactccctcggccagtcccacccggtgaagctggtgccgttcaacccggagtaccaggacgagtcggtgctgtggacggagagcggcgacgtgggcaagggcttccgctgcatccgcatggtgaacaacatccgcctcaacttcgacgccttccacggcgacaagggccacggcggcgtccgcgacgtcggccacggcttccgctgcgtccgcatggtcaacaacatctacctcaacttcgacgccttccacggcgacaaggaccacggcggcgtgcgcgacggcaccaacatcgtgctctggaagtggtgcgagggcgacaaccagcgctggaagatcgtcccctggtaaatgtgctgttctgtggctgcactggtcatcaccatgatctggagctttgaaggcatagccacctgtggtcagcagctgctgccgtgttgctagaataaagttggtggcgatcgatcgatcgatctgtggtgattggtgtccctctctgtgtgtttgtgtttagttcccagtcgtttgtgaggaagtcagttatgtttgagtgagggggggggggggggggggtacttcgctcttcggtgaactctgtacttgtcatgaggagagttttcacacccggagtgtagaactctgtactgtactcggatccttcctttttcatccaagtgggttttattttatcaaccgtatatatactcgtggttttgctattacgttgcttgcttccagtcgttccagccaaagattaccacgcactctggtca

SEQ ID NO: 7467 - DNA, 1026 bp, Zea Mays
cccaaatcccctgtcccgctagcggctagtccgaccaggcgatccccccccaaaccctcccccaaaaccccagagcggagaagagcgcaagatgttcggcttcgggcaccacggccagaacccgccggctcacggcggcgtgcaccagcccaccttcaagatcttctgcaagtccgacgaggggtactgcctcaccgtccgcgacggcaacgtggtgctggcccccgccaacccgcgcgacgagcaccagcactggtacaaggacatgcgcttcagcacccaggtcaaggacgaggagggcaaccctgcgttcgccctggtcaacaaggccactgggctcgccatcaagcactccctcggccagtcccacccggtgaagctggtgccgttcaacccggagtaccaggacgagtcggtgctgtggacggagagcggcgacgtgggcaagggcttccgctgcatccgcatggtgaacaacatctacctcaacttcgacgccttccacggcgacaaggaccacggcggcgtgcgcgacggcaccaacatcgtgctctggaagtggtgcgagggcgacaaccagcgctggaagatcgtcccctggtaaatgtgctgttctgtggctgcactggtcatcaccatgatctggagctttgaaggcatagccacctgtggtcagcagctgctgccgtgttgctagaataaagttggtggcgatcgatcgatcgatctgtggtgattggtgtccctctctgtgtgtttgtgtttagttcccagtcgtttgtgaggaagtcagttatgtttgagtgagggggggggggggggggggtacttcgctcttcggtgaactctgtacttgtcatgaggagagttttcacacccggagtgtagaactctgtactgtactcggatccttcctttttcatccaagtgggttttattttatcaaccgtatatatactcgtggttttgctattacgttgcttgcttccagtcgttccagccaaagattaccacgcactctggtca

SEQ ID NO: 7468 - DNA, 1293 bp, Zea Mays
cccaaatcccctgtcccgctagcggctagtccgaccaggcgatccccccccaaaccctcccccaaaaccccagagcggagaagagcgcaagatgttcggcttcgggcaccacggccagaacccgccggctcacggcggcgtgcaccagcccaccttcaagatcttctgcaagtccgacgaggggtactgcctcaccgtccgcgacggcaacgtggtgctggcccccgccaacccgcgcgacgagcaccagcactggtacaaggacatgcgcttcagcacccaggtcaaggacgaggagggcaaccctgcgttcgccctggtcaacaaggccactgggctcgccatcaagcactccctcggccagtcccacccggtgaagctggtgccgttcaacccggagtaccaggacgagtcggtgctgtggacggagagcggcgacgtgggcaagggcttccgctgcatccgcatggtgaacaacatccgcctcgcgcccaccaacccgcgcgacgagtaccagcactggatcaaggacatgcgccacagcaacagcgtcaaggacgaggaagggtacccggccttcgcgctcgtcaacagggtcaccggcgaggccatcaagcactcccagggcgagggccacccggtcaagctggtgccctacaaccccggctaccaggacgagtcggtgctgtggacggagagccgcgacgtcggccacggcttccgctgcgtccgcatggtcaacaacatctacctcaacttcgacgccttccacggcgacaaggaccacggcggcgtgcgcgacggcaccaacatcgtgctctggaagtggtgcgagggcgacaaccagcgctggaagatcgtcccctggtaaatgtgctgttctgtggctgcactggtcatcaccatgatctggagctttgaaggcatagccacctgtggtcagcagctgctgccgtgttgctagaataaagttggtggcgatcgatcgatcgatctgtggtgattggtgtccctctctgtgtgtttgtgtttagttcccagtcgtttgtgaggaagtcagttatgtttgagtgagggggggggggggggggggtacttcgctcttcggtgaactctgtacttgtcatgaggagagttttcacacccggagtgtagaactctgtactgtactcggatccttcctttttcatccaagtgggttttattttatcaaccgtatatatactcgtggttttgctattacgttgcttgcttccagtcgttccagccaaagattaccacgcactctggtca

SEQ ID NO: 7469 - DNA, 1392 bp, Zea Mays
cccaaatcccctgtcccgctagcggctagtccgaccaggcgatccccccccaaaccctcccccaaaaccccagagcggagaagagcgcaagatgttcggcttcgggcaccacggccagaacccgccggctcacggcggcgtgcaccagcccaccttcaagatcttctgcaagtccgacgaggggtactgcctcaccgtccgcgacggcaacgtggtgctggcccccgccaacccgcgcgacgagcaccagcactggtacaaggacatgcgcttcagcacccaggtcaaggacgaggagggcaaccctgcgttcgccctggtcaacaaggccactgggctcgccatcaagcactccctcggccagtcccacccggtgaagctggtgccgttcaacccggagtaccaggacgagtcggtgctgtggacggagagcggcgacgtgggcaagggcttccgctgcatccgcatggtgaacaacatccgcctcaacttcgacgccttccacggcgacaagggccacggcggcgtgcacgacggcaccaccgtggtgctgtgggagtgggccaagggcgacaaccagagctggaagatcctgccctggggcgacgaataccagcactggatcaaggacatgcgccacagcaacagcgtcaaggacgaggaagggtacccggccttcgcgctcgtcaacagggtcaccggcgaggccatcaagcactcccagggcgagggccacccggtcaagctggtgccctacaaccccggctaccaggacgagtcggtgctgtggacggagagccgcgacgtcggccacggcttccgctgcgtccgcatggtcaacaacatctacctcaacttcgacgccttccacggcgacaaggaccacggcggcgtgcgcgacggcaccaacatcgtgctctggaagtggtgcgagggcgacaaccagcgctggaagatcgtcccctggtaaatgtgctgttctgtggctgcactggtcatcaccatgatctggagctttgaaggcatagccacctgtggtcagcagctgctgccgtgttgctagaataaagttggtggcgatcgatcgatcgatctgtggtgattggtgtccctctctgtgtgtttgtgtttagttcccagtcgtttgtgaggaagtcagttatgtttgagtgagggggggggggggggggggtacttcgctcttcggtgaactctgtacttgtcatgaggagagttttcacacccggagtgtagaactctgtactgtactcggatccttcctttttcatccaagtgggttttattttatcaaccgtatatatactcgtggttttgctattacgttgcttgcttccagtcgttccagccaaagattaccacgcactctggtca

SEQ ID NO: 7470 - DNA, 905 bp, Zea Mays
ccctccgtttctcctggctaaactacctctcgctccctccggctccgatccagggtgcgagctgagcttgggctagtttagtctccccaagctcgtggcgcagcagcagactcgttggtggagtaccagcactggatcaaggacatgcgccacagcaacagcgtcaaggacgaggaagggtacccggccttcgcgctcgtcaacagggtcaccggcgaggccatcaagcactcccagggcgagggccacccggtcaagctggtgccctacaaccccggctaccaggacgagtcggtgctgtggacggagagccgcgacgtcggccacggcttccgctgcgtccgcatggtcaacaacatctacctcaacttcgacgccttccacggcgacaaggaccacggcggcgtgcgcgacggcaccaacatcgtgctctggaagtggtgcgagggcgacaaccagcgctggaagatcgtcccctggtaaatgtgctgttctgtggctgcactggtcatcaccatgatctggagctttgaaggcatagccacctgtggtcagcagctgctgccgtgttgctagaataaagttggtggcgatcgatcgatcgatctgtggtgattggtgtccctctctgtgtgtttgtgtttagttcccagtcgtttgtgaggaagtcagttatgtttgagtgagggggggggggggggggggtacttcgctcttcggtgaactctgtacttgtcatgaggagagttttcacacccggagtgtagaactctgtactgtactcggatccttcctttttcatccaagtgggttttattttatcaaccgtatatatactcgtggttttgctattacgttgcttgcttccagtcgttccagccaaagattaccacgcactctggtca

SEQ ID NO: 7471 - DNA, 2211 bp, Zea Mays
gaaacaaagcgtcgtgccagcaggaaaaccaaggaccaagccaagccgccggccccatggccaagcacaaagcctcgcctccggccgcggtccgccgtcgcatcggcggcgccggggcgtccgccatccggtgggcgctgcgcgtcgcgaccagcatcgtagcctggacgctgctcctccacctcttcaccttcctcggcatcccccgcccgccgctgcccatcgcgcggccgtcctgcctgggcggccgcagcaactctaccgccgccgactccgtggtcgcggccggcgatgccgggcacctggcgctcccggctctgcctcccagacggctttacaagagtaatggctaccttctagtttcatgcaatggtggtctgaaccaaatgcgagcagcgatatgcgacatggtgactgtagcacgctacttgaacctcaccatggtgatacctgaacttgataagcaatccttctgggctgatcctagtgattttggggatatttttgatgtaaatcatttcatcgattcattgagaaatgaagtgaagattgtcaaagaactcccacagaagttcaaagaaaaggttcctctgtcaatgcaaccaatcagctggtctagtgagaaatactatttgagatcttgcctctagtacgaaaacacaaggttgtacgttttagcaagacagattctcgccttgcaaacaatggcctgcctctgaagctccaaaaacttcgctgtcatgttaactacaacgcattgagatttgccccatctattgaggctctaggaaacaagatgatctcaactctcaggagaactggatcttttgttgtgcttcatctgagatatgagatggatatgcttgctttctctggttgtactcatggatgttctgatgaagaaacagaagagttgacaacaatgagatatgcatatccctggtggaaagaaaaggaaatagactctgagaagaaaaggcttgagggattgtgcccccttactcctgaagaaacaactttagtactcagagctcttggtttccccaaagacactcgaatatatattgcatccggtgaaatatatggtggtgaaaaaagattagccatattgaaaacagaatttcctaacattgtgcgaaaggagatactcttgtctgatgatgagttgcgaccctttcagaagcactcaactcaaatggcagcactggactatcttgtttctgtggcaagtgatatttttattcccagtaatgatggcaacatggctaaagttgtagaaggacaccgcaggtttacaggcttccacagaaccatacagttggataggaagaagctagttgaacttatagatcttttcgaagatcaggagctgtcctgggaagaattctctgttgctgtcaaggagctccacgggggccgaatgagccagcccaccgtaaggagaatcgtcccgggacaaccaaaggaagaggactacttttatgctaatcctcatgaatgccttgggcctgcaaaaaaacgaagggatagattaaaacatatggaaatttgaaagccgcgtgcttaatgcctagtaggctactacagatagaaggccaaagtgaaattggtaatgagatagcatttacatgcccttttgaataaccagattagttggctgcagcaatggtgaaacaaccttcagcatctgcatcctcatttgactgatctctgctcatggttttttccgagccacaccctcctagccctactctgcctggtgaagctgatctctgcctcgaattgaagatgattcttcgtgttgatgatcagcaaggagcatcaagagaagctttgccattcagaaacttgattgacagtattggttcctggattcggattttgctgattgtattttctttttatctctgctacctaggtatattgatggcatagtctgactgagctgtgagatgacatgccacattaatctgtagatgcaatgttctgttgtcgtcagttgcgtacttgcatataagagagatatggtgtatactttgtattgggtagttaaacctgatgtcgatgtcgaagacctcgttaaactttggaaaggaaagcagtgtaaatgcactgaaaagagtggcagccaagccttgctgccttgatattgcaatagtttagcctagctgttgtttgcaatagtaaaacctgatgacccgctcgattttc

SEQ ID NO: 7472 - DNA, 2579 bp, Zea Mays
gaaacaaagcgtcgtgccagcaggaaaaccaaggaccaagccaagccgccggccccatggccaagcacaaagcctcgcctccggccgcggtccgccgtcgcatcggcggcgccggggcgtccgccatccggtgggcgctgcgcgtcgcgaccagcatcgtagcctggacgctgctcctccacctcttcaccttcctcggcatcccccgcccgccgctgcccatcgcgcggccgtcctgcctgggcggccgcagcaactctaccgccgccgactccgtggtcgcggccggcgatgccgggcacctggcgctcccggctctgcctcccagacggctttacaagagtaatggctaccttctagtttcatgcaatggtggtctgaaccaaatgcgagcagcgatatgcgacatggtgactgtagcacgctacttgaacctcaccatggtgatacctgaacttgataagcaatccttctgggctgatcctagtgattttggggatatttttgatgtaaatcatttcatcgattcattgagaaatgaagtgaagattgtcaaagaactcccacagaagttcaaagaaaaggttcctctgtcaatgcaaccaatcagctggtctagtgagaaatactatttgaggcagatcttgcctctagtacgaaaacacaaggttgtacgttttagcaagacagattctcgccttgcaaacaatggcctgcctctgaagctccaaaaacttcgctgtcatgttaactacaacgcattgagatttgccccatctattgaggctctaggaaacaagatgatctcaactctcaggagaactggatcttttgttgtgcttcatctgagatatgagatggatatgcttgctttctctggttgtactcatggatgttctgatgaagaaacagaagagttgacaacaatgaggttcttttgatattactgcttcataatcaactttattttctcctcccaacctttatctccaatattcattgttatctgttcttgggacctcagatatgcatatccctggtggaaagaaaaggaaatagactctgagaagaaaaggcttgagggattgtgcccccttactcctgaagaaacaactttagtactcagagctcttggtttccccaaagacactcgaatatatattgcatccggtgaaatatatggtggtgaaaaaagattagccatattgaaaacagaatttcctaacattgtgcgaaaggagatactcttgtctgatgatgagttgcgaccctttcagaagcactcaactcaaatggcagcactggactatcttgtttctgtggcaagtgatatttttattcccagtaatgatggcaacatggctaaagttgtagaaggacaccgcaggtctgcataccttgactttcatagcatagtacatttaactgtttattcatccttgacttccatcaattacatctattattgcaacttggtttagtaggaagtgtgtaatgtttagtttttctgcagacatgtgtgtgttattggtgctcacaggagtgttgtagttatatgtgctttcccccttaagaaagcactgacgattcatggcaataaaaacagcaaaagaaaatgccacttgattagctgacaactgcttatgctgggaatgcaggtttacaggcttccacagaaccatacagttggataggaagaagctagttgaacttatagatcttttcgaagatcaggagctgtcctgggaagaattctctgttgctgtcaaggagctccacgggggccgaatgagccagcccaccgtaaggagaatcgtcccgggacaaccaaaggaagaggactacttttatgctaatcctcatgaatgccttgggcctgcaaaaaaacgaagggatagattaaaacatatggaaatttgaaagccgcgtgcttaatgcctagtaggctactacagatagaaggccaaagtgaaattggtaatgagatagcatttacatgcccttttgaataaccagattagttggctgcagcaatggtgaaacaaccttcagcatctgcatcctcatttgactgatctctgctcatggttttttccgagccacaccctcctagccctactctgcctggtgaagctgatctctgcctcgaattgaagatgattcttcgtgttgatgatcagcaaggagcatcaagagaagctttgccattcagaaacttgattgacagtattggttcctggattcggattttgctgattgtattttctttttatctctgctacctaggtatattgatggcatagtctgactgagctgtgagatgacatgccacattaatctgtagatgcaatgttctgttgtcgtcagttgcgtacttgcatataagagagatatggtgtatactttgtattgggtagttaaacctgatgtcgatgtcgaagacctcgttaaactttggaaaggaaagcagtgtaaatgcactgaaaagagtggcagccaagccttgctgccttgatattgcaatagtttagcctagctgttgtttgcaatagtaaaacctgatgacccgctcgattttc

SEQ ID NO: 7473 - DNA, 4457 bp, Zea Mays
aaaaaatagaagctatagtttagagagaaattagattacccaattcaccctaacttttgtacgccaccattcatttccgttaggaaaattatcgtgtcaacacttatctttgtgttgatttgtaaatttttagcactaacttgcatttacttcttcatactactggctcagacggcgtgatgcaattcgtctcgctggctcagacggctgtcctccacaacgcggctcggttgcgaccacggcgaaagtcgcgtagccacttctccgaatcgagccaaattggctcatgcgccaccagctcctccctctccaccccgatcgcaatgccactacgtgatcaaccccaaaggtcgccgtgaccgtgccggagagatctcgcgctccgggcccgttaccgcgcagctgtgctgtcgcaggcccacccgttcacccactccgccacgctctcgataaggccgccgcacgcggccgcacgcaccgacaagctggagccgccgcagcaggaggcggtgaaaccatcgccgaccaacggtcgcatccgctaccgtacgccctcggcagccgatctgctccccgctgacgatgtcgcggcggatgccgcggcagccacagtggtggccgcgaggatgcgccgctactcgggcgccggagcacggcagcagcagcaaacggaggcggtggccgaccgcgtgcaccggtaccgtcgggtgctgatggtgttgctctcgccggtactcctcatctcgttcgtgctccttctcatgccgcgcgcgccggcctccgcctcagggggtgtgctcctcgccgttggtggtcggaggtggggaccccgggccgtcgaggacggactgaacaagtatgcggtcatatttgacgccggcagctctgggagccgcgtgcacgtgtattgcttcgacgaaaacctggatctagtgcccatagggaaggagattgagctgttcaaacagaaaaaaccaggcctgagtgctgcaaagggtccacaggaggctgctgaatcacttatttctcttttagaggaagctgagaaagtagttccagcagagttgcgtgaacaaacacctgtgagggttggggccactgcaggtctcagagcattagggactcaaaggtctgaagaaattttgcaagcggttagggaacttctccatgacagttctttcaaatctcagccaaattgggtcactgttctagatggatctcaggaaggcgcattccagttaccatcaattatcttttgggaaaattgggaaagccatactcaaacacagttggagttgttgatttaggaggtggctcagtccaaatggcttatgctatctcagagaaggatgcagcaaaggcacctttagtagcagatggtgaagattcatatgtcaaggagctgctacttaagggaacaacatactatctttatgttcacagttatttgcattatggtttgctggcggctagaggggagatcttaaaagctggcgaaggcagtgattacagcgactgtatgttggaggggcatcttgggaaatacaattacggtggtaatacatttgaagcatcaggctcaccttctggtgctagttattccaagtgcagggctcttgcagttagagctcttaaagttgatgagccagcatgcacacacatgaaatgcacatttggtggtgtgtggaatggtggtggtggagatggacaaaagaatctttttgtggcatcctttttctttgatagggctgccgaggctggttttgtggacccaaaagcagcagttgctaaggttaaaccttcagactttgaagaaactgcacgccgggtttgtaaattgaacttgaaggatgcacatgcaacctaccctgatgtctcagaggagaacattccctacctttgcatagatcttgtctaccagtacacattacttgtcgatggatttggcgttgatccttatcaagacattaccttggtaaagaaagtgccttatggtgattcgtatgttgaagcagcatggccccttggtagtgccattgagatcgcatcttcatcatagaaacagcacggcagtaactttttgtttctttttttatataatatatatataaatcttccattactatagtttttggcttagtttactgatctgtagtagtgagcttagatcctgggtttgatgctaaggttttgccttgattcaccatttgttctcaattttccattctatttgtgtaggttcctacacattaacaacgtacacatggagtatagattgtagttctgtgcaagcattttcccctttccatccccagttatttagaattctttgtcattcatccttagtatgctctgtgggttcttcagtgtgatgccattctttttgtttccttcggccaacttcggattgctcaatgtaataaacgcatggttcttctttgttccctggacggttcatttgtagccttgtagatttaaagttgtttcctcttatcacaaatatttaggttctgtgtggcgcatattttccagcagcttcacgagtcatttgaagttgttttgagctgaacagggctttacaagagtaatggctaccttctagtttcatgcaatggtggtctgaaccaaatgcgagcagcgatatgcgacatggtgactgtagcacgctacttgaacctcaccatggtgatacctgaacttgataagcaatccttctgggctgatcctagtgattttggggatatttttgatgtaaatcatttcatcgattcattgagaaatgaagtgaagattgtcaaagaactcccacagaagttcaaagaaaaggttcctctgtcaatgcaaccaatcagctggtctagtgagaaatactatttgaggcagatcttgcctctagtacgaaaacacaaggttgtacgttttagcaagacagattctcgccttgcaaacaatggcctgcctctgaagctccaaaaacttcgctgtcatgttaactacaacgcattgagatttgccccatctattgaggctctaggaaacaagatgatctcaactctcaggagaactggatcttttgttgtgcttcatctgagatatgagatggatatgcttgctttctctggttgtactcatggatgttctgatgaagaaacagaagagttgacaacaatgagatatgcatatccctggtggaaagaaaaggaaatagactctgagaagaaaaggcttgagggattgtgcccccttactcctgaagaaacaactttagtactcagagctcttggtttccccaaagacactcgaatatatattgcatccggtgaaatatatggtggtgaaaaaagattagccatattgaaaacagaatttcctaacattgtgcgaaaggagatactcttgtctgatgatgagttgcgaccctttcagaagcactcaactcaaatggcagcactggactatcttgtttctgtggcaagtgatatttttattcccagtaatgatggcaacatggctaaagttgtagaaggacaccgcaggtttacaggcttccacagaaccatacagttggataggaagaagctagttgaacttatagatcttttcgaagatcaggagctgtcctgggaagaattctctgttgctgtcaaggagctccacgggggccgaatgagccagcccaccgtaaggagaatcgtcccgggacaaccaaaggaagaggactacttttatgctaatcctcatgaatgccttgggcctgcaaaaaaacgaagggatagattaaaacatatggaaatttgaaagccgcgtgcttaatgcctagtaggctactacagatagaaggccaaagtgaaattggtaatgagatagcatttacatgcccttttgaataaccagattagttggctgcagcaatggtgaaacaaccttcagcatctgcatcctcatttgactgatctctgctcatggttttttccgagccacaccctcctagccctactctgcctggtgaagctgatctctgcctcgaattgaagatgattcttcgtgttgatgatcagcaaggagcatcaagagaagctttgccattcagaaacttgattgacagtattggttcctggattcggattttgctgattgtattttctttttatctctgctacctaggtatattgatggcatagtctgactgagctgtgagatgacatgccacattaatctgtagatgcaatgttctgttgtcgtcagttgcgtacttgcatataagagagatatggtgtatactttgtattgggtagttaaacctgatgtcgatgtcgaagacctcgttaaactttggaaaggaaagcagtgtaaatgcactgaaaagagtggcagccaagccttgctgccttgatattgcaatagtttagcctagctgttgtttgcaatagtaaaacctgatgacccgctcgattttc

SEQ ID NO: 7474 - DNA, 2053 bp, Zea Mays
aaagtcgcgtagccacttctccgaatcgagccaaattggctcatgcgccaccagctcctccctctccaccccgatcgcaatgccactacgtgatcaaccccaaaggtcgccgtgaccgtgccggagagatctcgcgctccgggcccgttaccgcgcagctgtgctgtcgcaggcccacccgttcacccactccgccacgctctcgataaggccgccgcacgcggccgcacgcaccgacaagctggagccgccgcagcaggaggcggtgaaaccatcgccgaccaacggtcgcatccgctaccgtacgccctcggcagccgatctgctccccgctgacgatgtcgcggcggatgccgcggcagccacagtggtggccgcgaggatgcgccgctactcgggcgccggagcacggcagcagcagcaaacggaggcggtggccgaccgcgtgcaccggtaccgtcgggtgctgatggtgttgctctcgccggtactcctcatctcgttcgtgctccttctcatgccgcgcgcgccggcctccgcctcagggggtgtgctcctcgccgttggtggtcggaggtggggaccccgggccgtcgaggacggactgaacaagtatgcggtcatatttgacgccggcagctctgggagccgcgtgcacgtgtattgcttcgacgaaaacctggatctagtgcccatagggaaggagattgagctgttcaaacagaaaaaaccaggcctgagtgctgcaaagggtccacaggaggctgctgaatcacttatttctcttttagaggaagctgagaaagtagttccagcagagttgcgtgaacaaacacctgtgagggttggggccactgcaggtctcagagcattagggactcaaaggtctgaagaaattttgcaagcggttagggaacttctccatgacagttctttcaaatctcagccaaattgggtcactgttctagatggatctcaggaaggcgcattccagtgggttaccatcaattatcttttgggaaaattgggaaagccatactcaaacacagttggagttgttgatttaggaggtggctcagtccaaatggcttatgctatctcagagaaggatgcagcaaaggcacctttagtagcagatggtgaagattcatatgtcaaggagctgctacttaagggaacaacatactatctttatgttcacagttatttgcattatggtttgctggcggctagaggggagatcttaaaagctggcgaaggcagtgattacagcgactgtatgttggaggggcatcttgggaaatacaattacggtggtaatacatttgaagcatcaggctcaccttctggtgctagttattccaagtgcagggctcttgcagttagagctcttaaagttgatgagccagcatgcacacacatgaaatgcacatttggtggtgtgtggaatggtggtggtggagatggacaaaagaatctttttgtggcatcctttttctttgatagggctgccgaggctggttttgtggacccaaaagcagcagttgctaaggttaaaccttcagactttgaagaaactgcacgccgggtttgtaaattgaacttgaaggatgcacatgcaacctaccctgatgtctcagaggagaacattccctacctttgcatagatcttgtctaccagtacacattacttgtcgatggatttggcgttgatccttatcaagacattaccttggtaaagaaagtgccttatggtgattcgtatgttgaagcagcatggccccttggtagtgccattgagatcgcatcttcatcatagaaacagcacggttctgtgtggcgcatattttccagcagcttcacgagtcatttgaagttgttttgagctgaacaggcgagctcttacactgaagttgtgagacagtgagagtacatggaagaatttgtaagtgtgttttagagccagtttggcacagcttctatagtaggttttgggtaaatatagaagcttcgtcaaagagttttagtttttttactgataagtgattctgat

SEQ ID NO: 7475 - DNA, 2930 bp, Zea Mays
aaagtcgcgtagccacttctccgaatcgagccaaattggctcatgcgccaccagctcctccctctccaccccgatcgcaatgccactacgtgatcaaccccaaaggtcgccgtgaccgtgccggagagatctcgcgctccgggcccgttaccgcgcagctgtgctgtcgcaggcccacccgttcacccactccgccacgctctcgataaggccgccgcacgcggccgcacgcaccgacaagctggagccgccgcagcaggaggcggtgaaaccatcgccgaccaacggtcgcatccgctaccgtacgccctcggcagccgatctgctccccgctgacgatgtcgcggcggatgccgcggcagccacagtggtggccgcgaggatgcgccgctactcgggcgccggagcacggcagcagcagcaaacggaggcggtggccgaccgcgtgcaccggtaccgtcgggtgctgatggtgttgctctcgccggtactcctcatctcgttcgtgctccttctcatgccgcgcgcgccggcctccgcctcagggggtgtgctcctcgccgttggtggtcggaggtggggaccccgggccgtcgaggacggactgaacaagtatgcggtcatatttgacgccggcagctctgggagccgcgtgcacgtgtattgcttcgacgaaaacctggatctagtgcccatagggaaggagattgagctgttcaaacagaaaaaaccaggcctgagtgctgcaaagggtccacaggaggctgctgaatcacttatttctcttttagaggaagctgagaaagtagttccagcagagttgcgtgaacaaacacctgtgagggttggggccactgcaggtctcagagcattagggactcaaaggtctgaagaaattttgcaagcggttagggaacttctccatgacagttctttcaaatctcagccaaattgggtcactgttctagatggatctcaggaaggcgcattccagtgggttaccatcaattatcttttgggaaaattgggaaagccatactcaaacacagttggagttgttgatttaggaggtggctcagtccaaatggcttatgctatctcagagaaggatgcagcaaaggcacctttagtagcagatggtgaagattcatatgtcaaggagctgctacttaagggaacaacatactatctttatgttcacagttatttgcattatggtttgctggcggctagaggggagatcttaaaagctggcgaaggcagtgattacagcgactgtatgttggaggggcatcttggtatggttgcttgatttaatctactaggcccaatatataaatcttacgtatcattacctttttatcttttttgaatttgagatgaacttcctatactcttactgaaattatgtcaacattaatagggcaaatggttatttgtaacaaaaccaaatatttacctgagctttgttctattctatgcagggtccatgccctgttgtgaaaatacataaagtaatatgttgacttgtcttatgaattttgtgtgctatcaaatattagtcaaaacattacactattctgataatgagtccgtcgataaaatcatgctacttcatcagcagattgatcttgcaatgaatacactacatattccagtttacaacaaattgtcagtatctgttttctgtttattgctcataaaattatcctatcttaaatgtgctattaaactcagggaaatacaattacggtggtaatacatttgaagcatcaggctcaccttctggtgctagttattccaagtgcagggctcttgcagttagagctcttaaagttgatgagccagcatgcacacacatgaaatgcacatttggtggtgtgtggaatggtggtggtggagatggacaaaagaatctttttgtggcatcctttttctttgatagggctgccgaggctggttttgtggacccaaaagcagcagttgctaaggttaaaccttcagactttgaagaaactgcacgccgggtttgtaaattgaacttgaaggatgcacatgcaacctaccctgatgtctcagaggagaacattccctacctttgcatagatcttgtctaccagtacacattacttgtcgatggatttggcgttgatccttatcaagacattaccttggtaaagaaagtgccttatggtgattcgtatgttgaagcagcatggccccttggtagtgccattgagatcgcatcttcatcatagaaacagcacggcagtaactttttgtttctttttttatataatatatatataaatcttccattactatagtttttggcttagtttactgatctgtagtagtgagcttagatcctgggtttgatgctaaggttttgccttgattcaccatttgttctcaattttccattctatttgtgtaggttcctacacattaacaacgtacacatggagtatagattgtagttctgtgcaagcattttcccctttccatccccagttatttagaattctttgtcattcatccttagtatgctctgtgggttcttcagtgtgatgccattctttttgtttccttcggccaacttcggattgctcaatgtaataaacgcatggttcttctttgttccctggacggttcatttgtagccttgtagatttaaagttgtttcctcttatcacaaatatttaggttctgtgtggcgcatattttccagcagcttcacgagtcatttgaagttgttttgagctgaacaggcgagctcttacactgaagttgtgagacagtgagagtacatggaagaatttgtaagtgtgttttagagccagtttggcacagcttctatagtaggttttgggtaaatatagaagcttcgtcaaagagttttagtttttttactgataagtgattctgat

SEQ ID NO: 7476 - DNA, 2522 bp, Zea Mays
gtcctccacaacgcggctcggttgcgaccacggcgaaagtcgcgtagccacttctccgaatcgagccaaattggctcatgcgccaccagctcctccctctccaccccgatcgcaatgccactacgtgatcaaccccaaaggtcgccgtgaccgtgccggagagatctcgcgctccgggcccgttaccgcgcagctgtgctgtcgcaggcccacccgttcacccactccgccacgctctcgataaggccgccgcacgcggccgcacgcaccgacaagctggagccgccgcagcaggaggcggtgaaaccatcgccgaccaacggtcgcatccgctaccgtacgccctcggcagccgatctgctccccgctgacgatgtcgcggcggatgccgcggcagccacagtggtggccgcgaggatgcgccgctactcgggcgccggagcacggcagcagcagcaaacggaggcggtggccgaccgcgtgcaccggtaccgtcgggtgctgatggtgttgctctcgccggtactcctcatctcgttcgtgctccttctcatgccgcgcgcgccggcctccgcctcagggggtgtgctcctcgccgttggtggtcggaggtggggaccccgggccgtcgaggacggactgaacaagtatgcggtcatatttgacgccggcagctctgggagccgcgtgcacgtgtattgcttcgacgaaaacctggatctagtgcccatagggaaggagattgagctgttcaaacagaaaaaaccaggcctgagtgctgcaaagggtccacaggaggctgctgaatcacttatttctcttttagaggaagctgagaaagtagttccagcagagttgcgtgaacaaacacctgtgagggttggggccactgcaggtctcagagcattagggactcaaaggtctgaagaaattttgcaagcggttagggaacttctccatgacagttctttcaaatctcagccaaattgggtcactgttctagatggatctcaggaaggcgcattccagttaccatcaattatcttttgggaaaattgggaaagccatactcaaacacagttggagttgttgatttaggaggtggctcagtccaaatggcttatgctatctcagagaaggatgcagcaaaggcacctttagtagcagatggtgaagattcatatgtcaaggagctgctacttaagggaacaacatactatctttatgttcacagttatttgcattatggtttgctggcggctagaggggagatcttaaaagctggcgaaggcagtgattacagcgactgtatgttggaggggcatcttgggaaatacaattacggtggtaatacatttgaagcatcaggctcaccttctggtgctagttattccaagtgcagggctcttgcagttagagctcttaaagttgatgagccagcatgcacacacatgaaatgcacatttggtggtgtgtggaatggtggtggtggagatggacaaaagaatctttttgtggcatcctttttctttgatagggctgccgaggctggttttgtggacccaaaagcagcagttgctaaggttaaaccttcagactttgaagaaactgcacgccgggtttgtaaattgaacttgaaggatgcacatgcaacctaccctgatgtctcagaggagaacattccctacctttgcatagatcttgtctaccagtacacattacttgtcgatggatttggcgttgatccttatcaagacattaccttggtaaagaaagtgccttatggtgattcgtatgttgaagcagcatggccccttggtagtgccattgagatcgcatcttcatcatagaaacagcacggcagtaactttttgtttctttttttatataatatatatataaatcttccattactatagtttttggcttagtttactgatctgtagtagtgagcttagatcctgggtttgatgctaaggttttgccttgattcaccatttgttctcaattttccattctatttgtgtaggttcctacacattaacaacgtacacatggagtatagattgtagttctgtgcaagcattttcccctttccatccccagttatttagaattctttgtcattcatccttagtatgctctgtgggttcttcagtgtgatgccattctttttgtttccttcggccaacttcggattgctcaatgtaataaacgcatggttcttctttgttccctggacggttcatttgtagccttgtagatttaaagttgtttcctcttatcacaaatatttaggttctgtgtggcgcatattttccagcagcttcacgagtcatttgaagttgttttgagctgaacaggcgagctcttacactgaagttgtgagacagtgagagtacatggaagaatttgtaagtgtgttttagagccagtttggcacagcttctatagtaggttttgggtaaatatagaagcttcgtcaaagagttttagtttttttactgataagtgattctgat

SEQ ID NO: 7477 - DNA, 2055 bp, Zea Mays
cagacggctgtcctccacaacgcggctcggttgcgaccacggcgaaagtcgcgtagccacttctccgaatcgagccaaattggctcatgcgccaccagctcctccctctccaccccgatcgcaatgccactacgtgatcaaccccaaaggtcgccgtgaccgtgccggagagatctcgcgctccgggcccgttaccgcgcagctgtgctgtcgcaggcccacccgttcacccactccgccacgctctcgataaggccgccgcacgcggccgcacgcaccgacaagctggagccgccgcagcaggaggcggtgaaaccatcgccgaccaacggtcgcatccgctaccgtacgccctcggcagccgatctgctccccgctgacgatgtcgcggcggatgccgcggcagccacagtggtggccgcgaggatgcgccgctactcgggcgccggagcacggcagcagcagcaaacggaggcggtggccgaccgcgtgcaccggtaccgtcgggtgctgatggtgttgctctcgccggtactcctcatctcgttcgtgctccttctcatgccgcgcgcgccggcctccgcctcagggggtgtgctcctcgccgttggtggtcggaggtggggaccccgggccgtcgaggacggactgaacaagtatgcggtcatatttgacgccggcagctctgggagccgcgtgcacgtgtattgcttcgacgaaaacctggatctagtgcccatagggaaggagattgagctgttcaaacagaaaaaaccaggcctgagtgctgcaaagggtccacaggaggctgctgaatcacttatttctcttttagaggaagctgagaaagtagttccagcagagttgcgtgaacaaacacctgtgagggttggggccactgcaggtctcagagcattagggactcaaaggtctgaagaaattttgcaagcggttagggaacttctccatgacagttctttcaaatctcagccaaattgggtcactgttctagatggatctcaggaaggcgcattccagtgggttaccatcaattatcttttgggaaaattgggaaagccatactcaaacacagttggagttgttgatttaggaggtggctcagtccaaatggcttatgctatctcagagaaggatgcagcaaaggcacctttagtagcagatggtgaagattcatatgtcaaggagctgctacttaagggaacaacatactatctttatgttcacagttatttgcattatggtttgctggcggctagaggggagatcttaaaagctggcgaaggcagtgattacagcgactgtatgttggaggggcatcttgggaaatacaattacggtggtaatacatttgaagcatcaggctcaccttctggtgctagttattccaagtgcagggctcttgcagttagagctcttaaagttgatgagccagcatgcacacacatgaaatgcacatttggtggtgtgtggaatggtggtggtggagatggacaaaagaatctttttgtggcatcctttttctttgatagggctgccgaggctggttttgtggacccaaaagcagcagttgctaaggttaaaccttcagactttgaagaaactgcacgccgggtttgtaaattgaacttgaaggatgcacatgcaacctaccctgatgtctcagaggagaacattccctacctttgcatagatcttgtctaccagtacacattacttgtcgatggatttggcgttgatccttatcaagacattaccttggtaaagaaagtgccttatggtgattcgtatgttgaagcagcatggccccttggttctgtgtggcgcatattttccagcagcttcacgagtcatttgaagttgttttgagctgaacaggcgagctcttacactgaagttgtgagacagtgagagtacatggaagaatttgtaagtgtgttttagagccagtttggcacagcttctatagtaggttttgggtaaatatagaagcttcgtcaaagagttttagtttttttactgataagtgattctgat

SEQ ID NO: 7478 - DNA, 1683 bp, Zea Mays
aatacatgtcagaatgtgacagcatacagctaattcttagggaataccagaagtagaagattaagaagaacattttcgaaaaaaccaggcctgagtgctgcaaagggtccacaggaggctgctgaatcacttatttctcttttagaggaagctgagaaagtagttccagcagagttgcgtgaacaaacacctgtgagggttggggccactgcaggtctcagagcattagggactcaaaggtctgaagaaattttgcaagcggttagggaacttctccatgacagttctttcaaatctcagccaaattgggtcactgttctagatggatctcaggaaggcgcattccagtgggttaccatcaattatcttttgggaaaattgggaaagccatactcaaacacagttggagttgttgatttaggaggtggctcagtccaaatggcttatgctatctcagagaaggatgcagcaaaggcacctttagtagcagatggtgaagattcatatgtcaaggagctgctacttaagggaacaacatactatctttatgttcacagttatttgcattatggtttgctggcggctagaggggagatcttaaaagctggcgaaggcagtgattacagcgactgtatgttggaggggcatcttgggaaatacaattacggtggtaatacatttgaagcatcaggctcaccttctggtgctagttattccaagtgcagggctcttgcagttagagctcttaaagttgatgagccagcatgcacacacatgaaatgcacatttggtggtgtgtggaatggtggtggtggagatggacaaaagaatctttttgtggcatcctttttctttgatagggctgccgaggctggttttgtggacccaaaagcagcagttgctaaggttaaaccttcagactttgaagaaactgcacgccgggtttgtaaattgaacttgaaggatgcacatgcaacctaccctgatgtctcagaggagaacattccctacctttgcatagatcttgtctaccagtacacattacttgtcgatggatttggcgttgatccttatcaagacattaccttggtaaagaaagtgccttatggtgattcgtatgttgaagcagcatggccccttggtagtgccattgagatcgcatcttcatcatagaaacagcacggcagtaactttttgtttctttttttatataatatatatataaatcttccattactatagtttttggcttagtttactgatctgtagtagtgagcttagatcctgggtttgatgctaaggttttgccttgattcaccatttgttctcaattttccattctatttgtgtaggttcctacacattaacaacgtacacatggagtatagattgtagttctgtgcaagcattttcccctttccatccccagttatttagaattctttgtcattcatccttagtatgctctgtgggttcttcagtgtgatgccattctttttgtttccttcggccaacttcggattgctcaatgtaataaacgcatggttcttctttgttccctggacggttcatttgtagccttgtagatttaaagttgtttcctcttatcacaaatatttaggttctgtgtggcgcatattttccagcagcttcacgagtcatttgaagttgttttgagctgaa

SEQ ID NO: 7479 - DNA, 2199 bp, Zea Mays
aaagtcgcgtagccacttctccgaatcgagccaaattggctcatgcgccaccagctcctccctctccaccccgatcgcaatgccactacgtgatcaaccccaaaggtcgccgtgaccgtgccggagagatctcgcgctccgggcccgttaccgcgcagctgtgctgtcgcaggcccacccgttcacccactccgccacgctctcgataaggccgccgcacgcggccgcacgcaccgacaagctggagccgccgcagcaggaggcggtgaaaccatcgccgaccaacggtcgcatccgctaccgtacgccctcggcagccgatctgctccccgctgacgatgtcgcggcggatgccgcggcagccacagtggtggccgcgaggatgcgccgctactcgggcgccggagcacggcagcagcagcaaacggaggcggtggccgaccgcgtgcaccggtaccgtcgggtgctgatggtgttgctctcgccggtactcctcatctcgttcgtgctccttctcatgccgcgcgcgccggcctccgcctcagggggtgtgctcctcgccgttggtggtcggaggtggggaccccgggccgtcgaggacggactgaacaagtatgcggtcatatttgacgccggcagctctgggagccgcgtgcacgtgtattgcttcgacgaaaacctggatctagtgcccatagggaaggagattgagctgttcaaacaggccactgcaggtctcagagcattagggactcaaaggtctgaagaaattttgcaagcggttagggaacttctccatgacagttctttcaaatctcagccaaattgggtcactgttctagatggatctcaggaaggcgcattccagttaccatcaattatcttttgggaaaattgggaaagccatactcaaacacagttggagttgttgatttaggaggtggctcagtccaaatggcttatgctatctcagagaaggatgcagcaaaggcacctttagtagcagatggtgaagattcatatgtcaaggagctgctacttaagggaacaacatactatctttatgttcacagttatttgcattatggtttgctggcggctagaggggagatcttaaaagctggcgaaggcagtgattacagcgactgtatgttggaggggcatcttgggaaatacaattacggtggtaatacatttgaagcatcaggctcaccttctggtgctagttattccaagtgcagggctcttgcagttagagctcttaaagttgatgagccagcatgcacacacatgaaatgcacatttggtggtgtgtggaatggtggtggtggagatggacaaaagaatctttttgtggcatcctttttctttgatagggctgccgaggctggttttgtggacccaaaagcagcagttgctaaggttaaaccttcagactttgaagaaactgcacgccgggtttgtaaattgaacttgaaggatgcacatgcaacctaccctgatgtctcagaggagaacattccctacctttgcatagatcttgtctaccagtacacattacttgtcgatggatttggcgttgatccttatcaagacattaccttggtaaagaaagtgccttatggtgattcgtatgttgaagcagcatggccccttggtagtgccattgagatcgcatcttcatcatagaaacagcacggcagtaactttttgtttctttttttatataatatatatataaatcttccattactatagtttttggcttagtttactgatctgtagtagtgagcttagatcctgggtttgatgctaaggttttgccttgattcaccatttgttctcaattttccattctatttgtgtaggttcctacacattaacaacgtacacatggagtatagattgtagttctgtgcaagcattttcccctttccatccccagttatttagaattctttgtcattcatccttagtatgctctgtgggttcttcagtgtgatgccattctttttgtttccttcggccaacttcggattgctcaatgtaataaacgcatggttcttctttgttccctggacggttcatttgtagccttgtagatttaaagttgtttcctcttatcacaaatatttaggttctgtgtggcgcatattttccagcagcttcacgagtcatttgaagttgttttgagctgaa

SEQ ID NO: 7480 - DNA, 2118 bp, Zea Mays
aaagtcgcgtagccacttctccgaatcgagccaaattggctcatgcgccaccagctcctccctctccaccccgatcgcaatgccactacgtgatcaaccccaaaggtcgccgtgaccgtgccggagagatctcgcgctccgggcccgttaccgcgcagctgtgctgtcgcaggcccacccgttcacccactccgccacgctctcgataaggccgccgcacgcggccgcacgcaccgacaagctggagccgccgcagcaggaggcggtgaaaccatcgccgaccaacggtcgcatccgctaccgtacgccctcggcagccgatctgctccccgctgacgatgtcgcggcggatgccgcggcagccacagtggtggccgcgaggatgcgccgctactcgggcgccggagcacggcagcagcagcaaacggaggcggtggccgaccgcgtgcaccggtaccgtcgggtgctgatggtgttgctctcgccggtactcctcatctcgttcgtgctccttctcatgccgcgcgcgccggcctccgcctcagggggtgtgctcctcgccgttggtggtcggaggtggggaccccgggccgtcgaggacggactgaacaagtatgcggtcatatttgacgccggcagctctgggagccgcgtgcacgtgtattgcttcgacgaaaacctggatctagtgcccatagggaaggagattgagctgttcaaacagaaaaaaccaggcctgagtgctgcaaagggtccacaggaggctgctgaatcacttatttctcttttagaggaagctgagaaagtagttccagcagagttgcgtgaacaaacacctgtgagggttggggccactgcaggtctcagagcattagggactcaaaggtctgaagaaattttgcaagcggttagggaacttctccatgacagttctttcaaatctcagccaaattgggtcactgttctagatggatctcaggaaggcgcattccagtgggttaccatcaattatcttttgggaaaattgggaaagccatactcaaacacagttggagttgttgatttaggaggtggctcagtccaaatggcttatgctatctcagagaaggatgcagcaaaggcacctttagtagcagatggtgaagattcatatgtcaaggagctgctacttaagggaacaacatactatctttatgttcacagttatttgcattatggtttgctggcggctagaggggagatcttaaaagctggcgaaggcagtgattacagcgactgtatgttggaggggcatcttgggaaatacaattacggtggtaatacatttgaagcatcaggctcaccttctggtgctagttattccaagtgcagggctcttgcagttagagctcttaaagttgatgagccagcatgcacacacatgaaatgcacatttggtggtgtgtggaatggtggtggtggagatggacaaaagaatctttttgtggcatcctttttctttgatagggctgccgaggctggttttgtggacccaaaagcagcagttgctaaggttaaaccttcagactttgaagaaactgcacgccgggtttgtaaattgaacttgaaggatgcacatgcaacctaccctgatgtctcagaggagaacattccctacctttgcatagatcttgtctaccagtacacattacttgtcgatggatttggcgttgatccttatcaagacattaccttggtaaagaaagtgccttatggtgattcgtatgttgaagcagcatggccccttggttcctacacattaacaacgtacacatggagtatagattgtagttctgtgcaagcattttcccctttccatccccagttatttagaattctttgtcattcatccttagtatgctctgtgggttcttcagtgtgatgccattctttttgtttccttcggccaacttcggattgctcaatgtaataaacgcatggttcttctttgttccctggacggttcatttgtagccttgtagatttaaagttgtttcctcttatcacaaatatttaggttctgtgtggcgcatattttccagcagcttcacgagtcatttgaagttgttttgagctgaa

SEQ ID NO: 7481 - DNA, 2203 bp, Zea Mays
aaagtcgcgtagccacttctccgaatcgagccaaattggctcatgcgccaccagctcctccctctccaccccgatcgcaatgccactacgtgatcaaccccaaaggtcgccgtgaccgtgccggagagatctcgcgctccgggcccgttaccgcgcagctgtgctgtcgcaggcccacccgttcacccactccgccacgctctcgataaggccgccgcacgcggccgcacgcaccgacaagctggagccgccgcagcaggaggcggtgaaaccatcgccgaccaacggtcgcatccgctaccgtacgccctcggcagccgatctgctccccgctgacgatgtcgcggcggatgccgcggcagccacagtggtggccgcgaggatgcgccgctactcgggcgccggagcacggcagcagcagcaaacggaggcggtggccgaccgcgtgcaccggtaccgtcgggtgctgatggtgttgctctcgccggtactcctcatctcgttcgtgctccttctcatgccgcgcgcgccggcctccgcctcagggggtgtgctcctcgccgttggtggtcggaggtggggaccccgggccgtcgaggacggactgaacaagtatgcggtcatatttgacgccggcagctctgggagccgcgtgcacgtgtattgcttcgacgaaaacctggatctagtgcccatagggaaggagattgagctgttcaaacaggccactgcaggtctcagagcattagggactcaaaggtctgaagaaattttgcaagcggttagggaacttctccatgacagttctttcaaatctcagccaaattgggtcactgttctagatggatctcaggaaggcgcattccagtgggttaccatcaattatcttttgggaaaattgggaaagccatactcaaacacagttggagttgttgatttaggaggtggctcagtccaaatggcttatgctatctcagagaaggatgcagcaaaggcacctttagtagcagatggtgaagattcatatgtcaaggagctgctacttaagggaacaacatactatctttatgttcacagttatttgcattatggtttgctggcggctagaggggagatcttaaaagctggcgaaggcagtgattacagcgactgtatgttggaggggcatcttgggaaatacaattacggtggtaatacatttgaagcatcaggctcaccttctggtgctagttattccaagtgcagggctcttgcagttagagctcttaaagttgatgagccagcatgcacacacatgaaatgcacatttggtggtgtgtggaatggtggtggtggagatggacaaaagaatctttttgtggcatcctttttctttgatagggctgccgaggctggttttgtggacccaaaagcagcagttgctaaggttaaaccttcagactttgaagaaactgcacgccgggtttgtaaattgaacttgaaggatgcacatgcaacctaccctgatgtctcagaggagaacattccctacctttgcatagatcttgtctaccagtacacattacttgtcgatggatttggcgttgatccttatcaagacattaccttggtaaagaaagtgccttatggtgattcgtatgttgaagcagcatggccccttggtagtgccattgagatcgcatcttcatcatagaaacagcacggcagtaactttttgtttctttttttatataatatatatataaatcttccattactatagtttttggcttagtttactgatctgtagtagtgagcttagatcctgggtttgatgctaaggttttgccttgattcaccatttgttctcaattttccattctatttgtgtaggttcctacacattaacaacgtacacatggagtatagattgtagttctgtgcaagcattttcccctttccatccccagttatttagaattctttgtcattcatccttagtatgctctgtgggttcttcagtgtgatgccattctttttgtttccttcggccaacttcggattgctcaatgtaataaacgcatggttcttctttgttccctggacggttcatttgtagccttgtagatttaaagttgtttcctcttatcacaaatatttaggttctgtgtggcgcatattttccagcagcttcacgagtcatttgaagttgttttgagctgaa

SEQ ID NO: 7482 - DNA, 2304 bp, Zea Mays
aaagtcgcgtagccacttctccgaatcgagccaaattggctcatgcgccaccagctcctccctctccaccccgatcgcaatgccactacgtgatcaaccccaaaggtcgccgtgaccgtgccggagagatctcgcgctccgggcccgttaccgcgcagctgtgctgtcgcaggcccacccgttcacccactccgccacgctctcgataaggccgccgcacgcggccgcacgcaccgacaagctggagccgccgcagcaggaggcggtgaaaccatcgccgaccaacggtcgcatccgctaccgtacgccctcggcagccgatctgctccccgctgacgatgtcgcggcggatgccgcggcagccacagtggtggccgcgaggatgcgccgctactcgggcgccggagcacggcagcagcagcaaacggaggcggtggccgaccgcgtgcaccggtaccgtcgggtgctgatggtgttgctctcgccggtactcctcatctcgttcgtgctccttctcatgccgcgcgcgccggcctccgcctcagggggtgtgctcctcgccgttggtggtcggaggtggggaccccgggccgtcgaggacggactgaacaagtatgcggtcatatttgacgccggcagctctgggagccgcgtgcacgtgtattgcttcgacgaaaacctggatctagtgcccatagggaaggagattgagctgttcaaacagaaaaaaccaggcctgagtgctgcaaagggtccacaggaggctgctgaatcacttatttctcttttagaggaagctgagaaagtagttccagcagagttgcgtgaacaaacacctgtgagggttggggccactgcaggtctcagagcattagggactcaaaggtctgaagaaattttgcaagcggttagggaacttctccatgacagttctttcaaatctcagccaaattgggtcactgttctagatggatctcaggaaggcgcattccagttaccatcaattatcttttgggaaaattgggaaagccatactcaaacacagttggagttgttgatttaggaggtggctcagtccaaatggcttatgctatctcagagaaggatgcagcaaaggcacctttagtagcagatggtgaagattcatatgtcaaggagctgctacttaagggaacaacatactatctttatgttcacagttatttgcattatggtttgctggcggctagaggggagatcttaaaagctggcgaaggcagtgattacagcgactggaaatacaattacggtggtaatacatttgaagcatcaggctcaccttctggtgctagttattccaagtgcagggctcttgcagttagagctcttaaagttgatgagccagcatgcacacacatgaaatgcacatttggtggtgtgtggaatggtggtggtggagatggacaaaagaatctttttgtggcatcctttttctttgatagggctgccgaggctggttttgtggacccaaaagcagcagttgctaaggttaaaccttcagactttgaagaaactgcacgccgggtttgtaaattgaacttgaaggatgcacatgcaacctaccctgatgtctcagaggagaacattccctacctttgcatagatcttgtctaccagtacacattacttgtcgatggatttggcgttgatccttatcaagacattaccttggtaaagaaagtgccttatggtgattcgtatgttgaagcagcatggccccttggtagtgccattgagatcgcatcttcatcatagaaacagcacggcagtaactttttgtttctttttttatataatatatatataaatcttccattactatagtttttggcttagtttactgatctgtagtagtgagcttagatcctgggtttgatgctaaggttttgccttgattcaccatttgttctcaattttccattctatttgtgtaggttcctacacattaacaacgtacacatggagtatagattgtagttctgtgcaagcattttcccctttccatccccagttatttagaattctttgtcattcatccttagtatgctctgtgggttcttcagtgtgatgccattctttttgtttccttcggccaacttcggattgctcaatgtaataaacgcatggttcttctttgttccctggacggttcatttgtagccttgtagatttaaagttgtttcctcttatcacaaatatttaggttctgtgtggcgcatattttccagcagcttcacgagtcatttgaagttgttttgagctgaa

SEQ ID NO: 7483 - DNA, 2193 bp, Zea Mays
aaagtcgcgtagccacttctccgaatcgagccaaattggctcatgcgccaccagctcctccctctccaccccgatcgcaatgccactacgtgatcaaccccaaaggtcgccgtgaccgtgccggagagatctcgcgctccgggcccgttaccgcgcagctgtgctgtcgcaggcccacccgttcacccactccgccacgctctcgataaggccgccgcacgcggccgcacgcaccgacaagctggagccgccgcagcaggaggcggtgaaaccatcgccgaccaacggtcgcatccgctaccgtacgccctcggcagccgatctgctccccgctgacgatgtcgcggcggatgccgcggcagccacagtggtggccgcgaggatgcgccgctactcgggcgccggagcacggcagcagcagcaaacggaggcggtggccgaccgcgtgcaccggtaccgtcgggtgctgatggtgttgctctcgccggtactcctcatctcgttcgtgctccttctcatgccgcgcgcgccggcctccgcctcagggggtgtgctcctcgccgttggtggtcggaggtggggaccccgggccgtcgaggacggactgaacaagtatgcggtcatatttgacgccggcagctctgggagccgcgtgcacgtgtattgcttcgacgaaaacctggatctagtgcccatagggaaggagattgagctgttcaaacagaaaaaaccaggcctgagtgctgcaaagggtccacaggaggctgctgaatcacttatttctcttttagaggaagctgagaaagtagttccagcagagttgcgtgaacaaacacctgtgagggttggggccactgcaggtctcagagcattagggactcaaaggtctgaagaaattttgcaagcggttagggaacttctccatgacagttctttcaaatctcagccaaattgggtcactgttctagatggatctcaggaaggcgcattccagtgggttaccatcaattatcttttgggaaaattgggaaagccatactcaaacacagttggagttgttgatttaggaggtggctcagtccaaatggcttatgctatctcagagaaggatgcagcaaaggcacctttagtagcagatggtgaagattcatatgtcaaggagctgctacttaagggaacaacatactatctttatgttcacagttatttgcattatggtttgctggcggctagaggggagatcttaaaagctggcgaaggcagtgattacagcgactgtatgttggaggggcatcttgggaaatacaattacggtggtaatacatttgaagcatcaggctcaccttctggtgctagttattccaagtgcagggctcttgcagttagagctcttaaagttgatgagccagcatgcacacacatgaaatgcacatttggtggtgtgtggaatggtggtggtggagatggacaaaagaatctttttgtggcatcctttttctttgatagggctgccgaggcaagtctaattttacgattgacctttctggctggttttgtggacccaaaagcagcagttgctaaggttaaaccttcagactttgaagaaactgcacgccgggtttgtaaattgaacttgaaggatgcacatgcaacctaccctgatgtctcagaggagaacattccctacctttgcatagatcttgtctaccagtacacattacttgtcgatggatttggcgttgatccttatcaagacattaccttggtaaagaaagtgccttatggtgattcgtatgttgaagcagcatggccccttggtagtgccattgagatcgcatcttcatcatagaaacagcacggcagttcctacacattaacaacgtacacatggagtatagattgtagttctgtgcaagcattttcccctttccatccccagttatttagaattctttgtcattcatccttagtatgctctgtgggttcttcagtgtgatgccattctttttgtttccttcggccaacttcggattgctcaatgtaataaacgcatggttcttctttgttccctggacggttcatttgtagccttgtagatttaaagttgtttcctcttatcacaaatatttaggttctgtgtggcgcatattttccagcagcttcacgagtcatttgaagttgttttgagctgaa

SEQ ID NO: 7484 - DNA, 2242 bp, Zea Mays
gcgaaagtcgcgtagccacttctccgaatcgagccaaattggctcatgcgccaccagctcctccctctccaccccgatcgcaatgccactacgtgatcaaccccaaaggtcgccgtgaccgtgccggagagatctcgcgctccgggcccgttaccgcgcagctgtgctgtcgcaggcccacccgttcacccactccgccacgctctcgataaggccgccgcacgcggccgcacgcaccgacaagctggagccgccgcagcaggaggcggtgaaaccatcgccgaccaacggtcgcatccgctaccgtacgccctcggcagccgatctgctccccgctgacgatgtcgcggcggatgccgcggcagccacagtggtggccgcgaggatgcgccgctactcgggcgccggagcacggcagcagcagcaaacggaggcggtggccgaccgcgtgcaccggtaccgtcgggtgctgatggtgttgctctcgccggtactcctcatctcgttcgtgctccttctcatgccgcgcgcgccggcctccgcctcagggggtgtgctcctcgccgttggtggtcggaggtggggaccccgggccgtcgaggacggactgaacaagtatgcggtcatatttgacgccggcagctctgggagccgcgtgcacgtgtattgcttcgacgaaaacctggatctagtgcccatagggaaggagattgagctgttcaaacagaaaaaaccaggcctgagtgctgcaaagggtccacaggaggctgctgaatcacttatttctcttttagaggaagctgagaaagtagttccagcagagttgcgtgaacaaacacctgtgagggttggggccactgcaggtctcagagcattagggactcaaaggtctgaagaaattttgcaagcggttaccatcaattatcttttgggaaaattgggaaagccatactcaaacacagttggagttgttgatttaggaggtggctcagtccaaatggcttatgctatctcagagaaggatgcagcaaaggcacctttagtagcagatggtgaagattcatatgtcaaggagctgctacttaagggaacaacatactatctttatgttcacagttatttgcattatggtttgctggcggctagaggggagatcttaaaagctggcgaaggcagtgattacagcgactgtatgttggaggggcatcttgggaaatacaattacggtggtaatacatttgaagcatcaggctcaccttctggtgctagttattccaagtgcagggctcttgcagttagagctcttaaagttgatgagccagcatgcacacacatgaaatgcacatttggtggtgtgtggaatggtggtggtggagatggacaaaagaatctttttgtggcatcctttttctttgatagggctgccgaggctggttttgtggacccaaaagcagcagttgctaaggttaaaccttcagactttgaagaaactgcacgccgggtttgtaaattgaacttgaaggatgcacatgcaacctaccctgatgtctcagaggagaacattccctacctttgcatagatcttgtctaccagtacacattacttgtcgatggatttggcgttgatccttatcaagacattaccttggtaaagaaagtgccttatggtgattcgtatgttgaagcagcatggccccttggtagtgccattgagatcgcatcttcatcatagaaacagcacggcagtaactttttgtttctttttttatataatatatatataaatcttccattactatagtttttggcttagtttactgatctgtagtagtgagcttagatcctgggtttgatgctaaggttttgccttgattcaccatttgttctcaattttccattctatttgtgtaggttcctacacattaacaacgtacacatggagtatagattgtagttctgtgcaagcattttcccctttccatccccagttatttagaattctttgtcattcatccttagtatgctctgtgggttcttcagtgtgatgccattctttttgtttccttcggccaacttcggattgctcaatgtaataaacgcatggttcttctttgttccctggacggttcatttgtagccttgtagatttaaagttgtttcctcttatcacaaatatttaggttctgtgtggcgcatattttccagcagcttcacgagtcatttgaagttgttttgagctgaa

SEQ ID NO: 7485 - DNA, 2537 bp, Zea Mays
gtcctccacaacgcggctcggttgcgaccacggcgaaagtcgcgtagccacttctccgaatcgagccaaattggctcatgcgccaccagctcctccctctccaccccgatcgcaatgccactacgtgatcaaccccaaaggtcgccgtgaccgtgccggagagatctcgcgctccgggcccgttaccgcgcagctgtgctgtcgcaggcccacccgttcacccactccgccacgctctcgataaggccgccgcacgcggccgcacgcaccgacaagctggagccgccgcagcaggaggcggtgaaaccatcgccgaccaacggtcgcatccgctaccgtacgccctcggcagccgatctgctccccgctgacgatgtcgcggcggatgccgcggcagccacagtggtggccgcgaggatgcgccgctactcgggcgccggagcacggcagcagcagcaaacggaggcggtggccgaccgcgtgcaccggtaccgtcgggtgctgatggtgttgctctcgccggtactcctcatctcgttcgtgctccttctcatgccgcgcgcgccggcctccgcctcagggggtgtgctcctcgccgttggtggtcggaggtggggaccccgggccgtcgaggacggactgaacaagtatgcggtcatatttgacgccggcagctctgggagccgcgtgcacgtgtattgcttcgacgaaaacctggatctagtgcccatagggaaggagattgagctgttcaaacagaaaaaaccaggcctgagtgctgcaaagggtccacaggaggctgctgaatcacttatttctcttttagaggaagctgagaaagtagttccagcagagttgcgtgaacaaacacctgtgagggttggggccactgcaggtctcagagcattagggactcaaaggtctgaagaaattttgcaagcggttagggaacttctccatgacagttctttcaaatctcagccaaattgggtcactgttctagatggatctcaggaaggcgcattccagtgcgtgcccgtagggacaaacatgccaagaccgtgagaactaaacagtgaaaactgaaaggaaagacatcagaattcttcaaggaaaggattatcaaggacatttggaaggaagaagatgatacaaaccacatgtgagagaagatgacaacacgcatttggaagatggccttcgaggttaccatcaattatcttttgggaaaattgggaaagccatactcaaacacagttggagttgttgatttaggaggtggctcagtccaaatggcttatgctatctcagagaaggatgcagcaaaggcacctttagtagcagatggtgaagattcatatgtcaaggagctgctacttaagggaacaacatactatctttatgttcacagttatttgcattatggtttgctggcggctagaggggagatcttaaaagctggcgaaggcagtgattacagcgactgtatgttggaggggcatcttgggaaatacaattacggtggtaatacatttgaagcatcaggctcaccttctggtgctagttattccaagtgcagggctcttgcagttagagctcttaaagttgatgagccagcatgcacacacatgaaatgcacatttggtggtgtgtggaatggtggtggtggagatggacaaaagaatctttttgtggcatcctttttctttgatagggctgccgaggctggttttgtggacccaaaagcagcagttgctaaggttaaaccttcagactttgaagaaactgcacgccgggtttgtaaattgaacttgaaggatgcacatgcaacctaccctgatgtctcagaggagaacattccctacctttgcatagatcttgtctaccagtacacattacttgtcgatggatttggcgttgatccttatcaagacattaccttggtaaagaaagtgccttatggtgattcgtatgttgaagcagcatggccccttggtagtgccattgagatcgcatcttcatcatagaaacagcacggcagtaactttttgtttctttttttatataatatatatataaatcttccattactatagtttttggcttagtttactgatctgtagtagtgagcttagatcctgggtttgatgctaaggttttgccttgattcaccatttgttctcaattttccattctatttgtgtaggttcctacacattaacaacgtacacatggagtatagattgtagttctgtgcaagcattttcccctttccatccccagttatttagaattctttgtcattcatccttagtatgctctgtgggttcttcagtgtgatgccattctttttgtttccttcggccaacttcggattgctcaatgtaataaacgcatggttcttctttgttccctggacggttcatttgtagccttgtagatttaaagttgtttcctcttatcacaaatatttaggttctgtgtggcgcatattttccagcagcttcacgagtcatttgaagttgttttgagctgaa

SEQ ID NO: 7486 - DNA, 644 bp, Zea Mays
aacaataacatataatcatataacagtagtattttgcagtaggtgtcaaagccatacaaggccacaagcaaaacacacgcacacacgtctctttctctctatccataggaggacccagcttgggatcttgcagcagtagcagtaaaaatagcttacagacaactgccatggccatgtgctctttttcctgtcactgggccgccctagcatacaaatgtccgcgtcaggctgtagctgtactggtattacatgtgacctgtggctgtcgctgtggctggtaccagaactgtggattaacctcacatttggtaaacctagtggaggtggctgtagttgtaggaccttgtcacagtaaaaatctttgggctgacgttacctgctactgttaaatactaagtacagatactatatatatactagaaactaggggattatttgtatatataatatatatatacttatatctggcgataatattgcatatgccgccgttttcttaatcaaggctaatggcatcttctcctcttgtggtttagtagaactatccactaaaaaggtagggactaaaagaacaaaagaaagtgggagctaacactatgctgacactcaactctcttttttttctcctatatatccaacatcac

SEQ ID NO: 7487 - DNA, 2513 bp, Zea Mays
agactcggcaccaaacaggtgagcacgaaacgtgcactgatcgtcccggacgaggaacccaacatgccatcaccacactagagtacactactacaaaatctctccgaaacaagccagcaaccaagtacagcagacatccgtcctatcccactcctagtcccaccgccaccttccctcccaccgccaccattcgggccgccctctctcccagtcggccagtcccagcaaatcccacttcaccaggcctcagctccagctcgcctatcccggtatcccccctcaccagcgccgccggaagatcgcgctgcgcccgtcgtctcacgaggaggcatcgaccggcgcggtggcatttaggaggaggaaggggaggctgtaccttgttgacagggtcttagttaggcggggaggggcgagatgagcatgtacgggagggacccctggggcgggccgctggagatatgccacgactcggccacggacgacgaccgcagccggaacctggacatcgaccggggcgcgctgtcgcggacgctcgacgagacgcagcagagctggctgctggcggggcccggggacccgggccgcaagaagaagaagtacgtcgacatcggttgcctcgtcgtcagccgcaagctcttcgtctggacgctcggggtgctcctcgccgccgccgtattcgcgggggtcgtggccgggatcgccaaggccatccccaggcgccaccgcccgccgccgccgcccgacgactacaccgtcgcgctgcacaaggcgctcatgttcttcaatggccagagatccgggaagcttccgaagcacaacaatataccatggcgtggtaactcttgcatgaaggacggactttctgatcctgcagttcggcgaagcctggtcggcgggtactatgatgctggcgacgctgtcaaattcaatttcccagctgccttctccatgaccctcctcagctggagcgtcattgagtacagtgctaagtacgatgctgctggggaacttggccatgtccgtgacattatcaagtggggttcagattacttcttgaagacctttaattccacagccgatagcattgatcgtgtcgttgcacagggtgcaggtgggaagtactgcaacatcgcccggttcaacgcagcccaatgatcgttattgttggatgaggccagaggacattgactacccacgtccagtggttgagtgccacgcttgttcagatcttgctgcagaaatggctgcagcattagctgcagcgtcgattgtattcaaggacaataaggcttactcacagaagcttgtacatggtgcaaccactcttttccagtttgcaagggaacgacgtgggaggtatagtgcaggtggctcagatgctgcaaaattctacaattcaaccagttactgggatgagtttgtgtggggtagttcatggatgtaccttgcaactggcaattcgtcatacttgactctagccacacaccctaaacttgcaaagcatgctggcgctttctggggtggaccagattatggtgtgttcagctgggataataagctcactggggcacaggttcttctaagccggttgaggcttttcttgagtcctggatatccatatgaagagaccttgagtacattccacaaccaaactagcattatcatgtgttcctaccttccaatatttaaatctttcaacagaacaagaggtggtttgattcagttaaatcatgggaagccacagccccttcagtatgtggtcaacgctgcattccttgcttctgtgttcagtgactatcttgaggctgcggatactcctgggtggtattgtggcccacatttctactctatcgaggttctccgcagttttgcaaggactcagatcgagtacatcttagggaaaaatccattgaagatgagctatgtggttgggttcggaaaccattaccccaagcatgttcaccaccggggcgcctcgatccctaagaacggtgttcactatggatgcaaaggagggtggaagtggagggacaccaagaagccaaaccccaatatcatagtaggggccatggttgctggccccgatcgccatgacgggttcaaagatgtccgcaagaattataactacactgaagcaacgctggcgggcaatgctggtctagtcgcagcgttggtagctttgtcgggtgaaggccatggggtggacaagaacaccatgttctctgcagtgccacccatgttcccttcgcctccgccgccaccagccccatggaaaccgtaatgcctgtgggtgtctgattcttctgtatactgcgtatttagattagtgctcctctcgctataactagttaactactaccatcactatcttgcatatttaacaagatgtagcatcgatttttcttgtttctttcattgttgtgtatttgccgtgcaatgtaaggattgattatgtttgtgtatgcatctctgttctttttagataatggagaaaaggttccggctttcctctc

SEQ ID NO: 7488 - DNA, 3664 bp, Zea Mays
gcacgccaaatgatgggcgatagtgtttgtttaatcccccacctaattgcctctcctctttagaacaaccgtcatcatcactaatctctgaatcggcaccgtcaccacgaacaaacactagcgcaggcgcagtacggtggttgctgttctgctgcgccccccacgagctttttgctgagtggcagtgtccgctgggctgggcgacctaaaaccgcacctcggggccgcgacctcggcatgcagggttccgcgcgcacggagcagccagcagctgggtgcagccggaggacgacgatggggttccttctcgccgtggccgtcctgctctccgcgtgcgcgcaacagtgctcgggcacgacagacagccaggaccttccgtgctccgggcgttgatggatcagtggcagaacgcgccgccgtcctggggccagtccgacgatccctgcggagagtcgccgtgggagggcgtgacgtgcggcggcgacaaagtgatctccataaaactttccaccatgggcatccaaggaagtctagctgctgacataggccagctcagtgacctgcaatccatggacctgtcattcaacaacgaactcggcggcgtgctcactccgaccatcgggaacctgaagcagctcaccaccttgattctgtccggttgcagtttccatggcaccatccccgatgagctaggaagcctgccaaagctgtcctacatggcactgaattcgaaccagttctctgggaaaataccagcttcgctgggaaacctctcgagcctctactggtttgacatcgccgacaatcagttgagcggtcccctgccggtctcgacagacggcggaatgggtctagacaagctcatcaaaaccagacactttcacttcaacaagaaccagttgtctggtccgatccccgacgctctcttcagcccggagatggccttgatccacttgctcttcgatggaaacagattcaccgggaatatcccggactctcttgggtttgttagtacactcgaagttgtacggctggacaggaattccctttctggccaagtacctttaaatctgaataacctcaccaaagtcattgaactcaacttggccaacaaccagctcaccggaacattgccagatctaactaggatggatcttctcaattacgtcgacctgagcaacaacacatttgatccttcaccatgcccggcgtggttttggaggctgccacagctctcagctttgatcatacagtctgggaggctctacggcaccgtgccgacaaggcttttcagcagcccgcagttgaatcaagtgatcctcgacggcaacgccttcaacggcaccctggacatgggcaggagcatcagcagcgagctgagcctggtgagcttcaaggacaacgagttcgcctccctcacggtgacctccagctacaacggcacacttgcgctggccgggaacccggtgtgcgagcgcctgcccaacacgccctactgcagcgcgacgcagcggccgctgtcggcgccctactcgacgagcctggtgaagtgctactcggggtcctgcccggcggggcagagcctgagcccgcagagctgcctgtgcgcgtacccgtaccagggcgtcatgtacttccgcgcgcccttcttccacgacgtggccaacgacacggcgttccaggagctggagagcatgctgtggaccaagctggccctcaccccgggctccgtctacctgcaggaccccttcttcaacagcgacgcctacatgcaggtgcaggtcaagctcttccccgccggcagcggcgcctacttcaaccgctccgaggtcatgcgcatcggcttcgacctcagcaaccagacgttcaagccgcccaaggagttcggcccctactacttcatcgcatcgccgtacccgttcccaggaagcgagcaatcgtcgaagagcaagggcgtcatcgtcggcatagcggtgggatgcggcgtcctgttcgttgcgctcgccggagcagccgcctacgctttcattcagaggcggcgggcggagaaggcgaaggaggagcttggcggtccttttgcgtcgtgggctcggagcgaagagcgtggcggcgcgccgcggctgaaaggggcgaggtggttctcctacgaggagctgaagaggagcaccaacaacttcgccgaggcgaacgagctcggctacggagggtacggcaaggtttacaggggcatgctgccgacggggcagttcatcgccatcaagagggcgcagcaggggtccatgcagggcgggcacgagttcaagacggagatcgagctgctctcgcgcgtgcaccacaagaacctcgtcggcctcctcggcttctgcttcgagcagggggagcagatgctcgtctacgagttcatgtcaggcggcacgctgcgcgacagcctcgccggcaagagcgggctacatctcgactggaagaagcggctccgggtggcgcttggcgcggcgcgcgggctggcctacctccacgagctcgccgacccgccaatcatccaccgggacgtcaagtccagcaacatcctcatggacgagcacctcacggccaaggtcgccgacttcggcctctccaagctagtgtccgacagcgagaggggccacgtcagcacgcaagtgaaaggaacactgggctatctggaccctgagtactacatgtcccagcagctgaccgagaagagcgacgtctacagcttcggcgtggtcatgctggagctgatcgtcgcgaagcagccgatcgagaagggcaagtacatcgtccgcgaggcgaagagggtgttcgacgccgacgacgccgagttctgcgggctcaaggacatggtagacgcaaggatcatgagcaccaataaccacctcgcggcgttcggcaagttcgtccagctggccctcaggtgcgtcgacgaggtggccacagcccggccgtccatgagcgaggtcgtcaaggagatcgagatgatgctgcagagcgaggggctcagcagcgcctccacgtctgcctcgacgtccgcgaccgagttcgacgttacgaagggggctcctcgccacccgtacaacgatcctcccctccctaaaaaggacaaggacgtgagcaccgactccttcgagtacagcggaggatattctttccaatcaaaggtcgaaccgaagtagctgatttctggattgaggctatcttcttcgttcggccttttcctttcccaacaattggcttgacgaaatgaagagagatatgggtaacctttttattgcattgagcttaatacttgtgggagactagtgaatttgtatggttaataggagacgcatcaagatcaaactcgtctgcctctaaagtgctgctaactgttgtttacggactagaggaataccaaccgtatcatagaacaaaggtggcaacaggggtgtttggtctatgggcaaatagtcacttaagtccacattgctaagtttgtctctaacagcttttctatcacatctcctatttcaaaatctactttagaaacattacactctaatagtgtttgtatgaccatatgaacggtttgctgaaaacggtctaagcaattccatcagcacgagtaaagcggtttccttgccactctaagggcttgtttaagagtaag

SEQ ID NO: 7489 - DNA, 3809 bp, Zea Mays
gcacgccaaatgatgggcgatagtgtttgtttaatcccccacctaattgcctctcctctttagaacaaccgtcatcatcactaatctctgaatcggcaccgtcaccacgaacaaacactagcgcaggcgcagtacggtacgggcatgctcaggacttgccgtagaacgagggttatgccgcgtgcggatgactgctagctctttcttgctcaggcagcggtaggagtgggctgggcgtgcttggactagctagctagctagtgctccattccatcggagcctggcttcgctttcaagtcaagtcgacgccaccatttcccccggcccgtcctgtctattggctccgttgggtgcactgactgcacacctcatcatgaggcgcatcatggagttcggttgtggtgcaggtggttgctgttctgctgcgccccccacgagctttttgctgagtggcagtgtccgctgggctgggcgacctaaaaccgcacctcggggccgcgacctcggcatgcagggttccgcgcgcacggagcagccagcagctgggtgcagccggaggacgacgatggggttccttctcgccgtggccgtcctgctctccgcgtgcgcgcaacagtgctcgggcacgacagacagccaggacaaaaactttccaccatgggcatccaaggaagtctagctgctgacataggccagctcagtgacctgcaatccatggacctgtcattcaacaacgaactcggcggcgtgctcactccgaccatcgggaacctgaagcagctcaccaccttgattctgtccggttgcagtttccatggcaccatccccgatgagctaggaagcctgccaaagctgtcctacatggcactgaattcgaaccagttctctgggaaaataccagcttcgctgggaaacctctcgagcctctactggtttgacatcgccgacaatcagttgagcggtcccctgccggtctcgacagacggcggaatgggtctagacaagctcatcaaaaccagacactttcacttcaacaagaaccagttgtctggtccgatccccgacgctctcttcagcccggagatggccttgatccacttgctcttcgatggaaacagattcaccgggaatatcccggactctcttgggtttgttagtacactcgaagttgtacggctggacaggaattccctttctggccaagtacctttaaatctgaataacctcaccaaagtcattgaactcaacttggccaacaaccagctcaccggaacattgccagatctaactaggatggatcttctcaattacgtcgacctgagcaacaacacatttgatccttcaccatgcccggcgtggttttggaggctgccacagctctcagctttgatcatacagtctgggaggctctacggcaccgtgccgacaaggcttttcagcagcccgcagttgaatcaagtgatcctcgacggcaacgccttcaacggcaccctggacatgggcaggagcatcagcagcgagctgagcctggtgagcttcaaggacaacgagttcgcctccctcacggtgacctccagctacaacggcacacttgcgctggccgggaacccggtgtgcgagcgcctgcccaacacgccctactgcagcgcgacgcagcggccgctgtcggcgccctactcgacgagcctggtgaagtgctactcggggtcctgcccggcggggcagagcctgagcccgcagagctgcctgtgcgcgtacccgtaccagggcgtcatgtacttccgcgcgcccttcttccacgacgtggccaacgacacggcgttccaggagctggagagcatgctgtggaccaagctggccctcaccccgggctccgtctacctgcaggaccccttcttcaacagcgacgcctacatgcaggtgcaggtcaagctcttccccgccggcagcggcgcctacttcaaccgctccgaggtcatgcgcatcggcttcgacctcagcaaccagacgttcaagccgcccaaggagttcggcccctactacttcatcgcatcgccgtacccgttcccaggaagcgagcaatcgtcgaagagcaagggcgtcatcgtcggcatagcggtgggatgcggcgtcctgttcgttgcgctcgccggagcagccgcctacgctttcattcagaggcggcgggcggagaaggcgaaggaggagcttggcggtccttttgcgtcgtgggctcggagcgaagagcgtggcggcgcgccgcggctgaaaggggcgaggtggttctcctacgaggagctgaagaggagcaccaacaacttcgccgaggcgaacgagctcggctacggagggtacggcaaggtttacaggggcatgctgccgacggggcagttcatcgccatcaagagggcgcagcaggggtccatgcagggcgggcacgagttcaagacggagatcgagctgctctcgcgcgtgcaccacaagaacctcgtcggcctcctcggcttctgcttcgagcagggggagcagatgctcgtctacgagttcatgtcaggcggcacgctgcgcgacagcctcgccggcaagagcgggctacatctcgactggaagaagcggctccgggtggcgcttggcgcggcgcgcgggctggcctacctccacgagctcgccgacccgccaatcatccaccgggacgtcaagtccagcaacatcctcatggacgagcacctcacggccaaggtcgccgacttcggcctctccaagctagtgtccgacagcgagaggggccacgtcagcacgcaagtgaaaggaacactgggctatctggaccctgagtactacatgtcccagcagctgaccgagaagagcgacgtctacagcttcggcgtggtcatgctggagctgatcgtcgcgaagcagccgatcgagaagggcaagtacatcgtccgcgaggcgaagagggtgttcgacgccgacgacgccgagttctgcgggctcaaggacatggtagacgcaaggatcatgagcaccaataaccacctcgcggcgttcggcaagttcgtccagctggccctcaggtgcgtcgacgaggtggccacagcccggccgtccatgagcgaggtcgtcaaggagatcgagatgatgctgcagagcgaggggctcagcagcgcctccacgtctgcctcgacgtccgcgaccgagttcgacgttacgaagggggctcctcgccacccgtacaacgatcctcccctccctaaaaaggacaaggacgtgagcaccgactccttcgagtacagcggaggatattctttccaatcaaaggtcgaaccgaagtagctgatttctggattgaggctatcttcttcgttcggccttttcctttcccaacaattggcttgacgaaatgaagagagatatgggtaacctttttattgcattgagcttaatacttgtgggagactagtgaatttgtatggttaataggagacgcatcaagatcaaactcgtctgcctctaaagtgctgctaactgttgtttacggactagaggaataccaaccgtatcatagaacaaaggtggcaacaggggtgtttggtctatgggcaaatagtcacttaagtccacattgctaagtttgtctctaacagcttttctatcacatctcctatttcaaaatctactttagaaacattacactctaatagtgtttgtatgaccatatgaacggtttgctgaaaacggtctaagcaattccatcagcacgagtaaagcggtttccttgccactctaagggcttgtttaagagtaag

SEQ ID NO: 7490 - DNA, 641 bp, Zea Mays
cgcgcgcgcaggagccgcgttgctctgcccgacgcgccgcgcccgcccaggacacgctgccgaccggcgcgatgctgcgcaggcgaggccggtctggagcgccgcgcctgtaggtccagccgcgctgcctcccgcgcacgccgacgcccgagccacgcgacgccgcgatgccgcacgcgccgaccgagcccgaccacgactcccgtcgtccgttcgttgcctgcgattaattgaaaatcactgcgaccgttttattcttctccattattctctccctcgttattctctggaaactgacacagtggtggccattgaagaccacgttactccctctatcagacctttcttctccctcttgctctctataaaagggaacagcagagcctccccattcctgcctactcgagtttgcctttctctctagcactcctcgctcatcgccagtgcactgttcgacgccatcgttagtgtgccgttcgtcgccggagtgtgtcgttcgtcgccggagccacgtactcgctgtccgtagtcgagccccgctctccgtccggccgaaacccgtcgatccatccccgtcacacgcacgaacccgagaagcggactgtgtggtagagaatccgaactcgttcgacgacgacccg

SEQ ID NO: 7491 - DNA, 3153 bp, Zea Mays
cacactcgtcccttgccttcccctccgtctccaatctcccctccaccgttcgacgctctccccttgcttctcgcgcacactaaccaattcgagcacccgacgccgcggccccgatcgaatccaccggagccgcccgcctggggcccgcccgcgccattgctcgaatcgggaggcattcgtccgcccgcgctgctgccccgcgccgtggcggtggcgttggcggtatgtacgaccgctagaaggagaggaggaggcggcattagtggtggggattaggcggcggcactgctggtgccgggaggaggaggaggcgtagcccatgaaggcgacggcgccgccggcgaagcggcggaggggcccgcggctggcggtgctggcgctcgtgttctgttcgctgctcgtgccgatcgccttcctcttcaaccgcttccccgccgtatatgtgacagatgagcgccctcagcaggagattgacttgccttcgttcgatcgtgtggtatttgaaaatggtggctctgtaaatgaattctacggcctccaaaaattgaacaggtcctcccccctccaaaagttgaacccaatccagaagtgaagccagtacttgtaccagttccagttcatcaaaacaaaaaaattaaccttgacaagattaggcctcccagagttcaaagtgctgatgaggtggaaaaggctaaggcttgtcaacttgagtttgggagttactgtctctggtctatagagcacaaagaagttatgatagataccattgtgaaaaggctgaaagatcagctatttgtagcccgatcttactaccctagcattgcaaaacttaaaggaaaggagacattgactcgcgagctgaagcaaaatattcaagaacacgagagggtacttagtgaatccattgttgatgctgatctaccatcctttataaaaacgaagctagagaggatggaccaatcaatagcaagagccaaatcatgcactgtggattgtaacaatgttgacagaaagcttcgtcaaattcttcatatgacagaggatgaagctcattttcatatgaagcagagtgcatacctatacaaccttggtgttcacaccatgcctaaaagtcatcattgtcttaatatgaggttgacagtagagtactttaaatccatgccattggatccaaatgactcttctgcccataagtttaaccttccagacaataggcactatgttatattatctaaaaatgtccttgctgcttctgttgtcatcaactcaactgttagtagctctgaggatactgaaaatgtagtatttcatgtactgactgactctcaaaatttttatgccatgaagcactggtttgcaagaaactcctacagggaatcagctgtcaatgtcataaattatgaacaaattatttttgagaatttccctgagtttggaacccagcagttatatttgcctgaggaatttcgtgttctcatcagtagccttgagaggcctactgagaagagtagaatggaatatttgtcagtgttcagtcactcacatttctttcttgccgaaatattcaaagatttaaagaaggtaattgtgttggatgatgatgtggttgttcaacgtgatatttctttcttgtggaatcttgatatgggagagaaggtcaatggtgctatcagtttttgtggtttgaaacttggtcaactgaggaaccttttgggtaggacaatgtatgatcaacagtcatgtgcatggatgtctggggttaatgtgattgatttggacaaatggagagaacataatgttacagagaattacctgcaactcctgagaaagtttgggaacaatgatgacgaggcctcactacgagcttcagctttgcctataagtttgttgtcgttccagcatcttctatatccacttgatgagagattgattttatctggacttggatatgactatggaattaaagaagaacttgttcagaattctgcatcgttgcattataatggaaatatgaaaccttggcttgagttgggtataccagattataggaagtactggaagaggtttcttacacgagacgagagattcatggacgagtgcaatgtaagtccatagtgtgcttgagcttgggagccgaatcatttttgacagtagatttcagtctactgctgtactatatactaagaggaccaacacttgagaaaaacctgggaactgggaagcagtcactagccatcaattttgacagagtagatccagcaccatctgttcattgaacttgtgagctcgatggatgggtttttctgcagttagcggggtttagttaagttcgaaggataatgcagtagacaacgttggtcacgtgtggtggtgaggttccaagtaagagagagcatcacactcacgtaacaggaatgatcattgatggattgaggcgccttaattgaaattggtgccttccacctcatggatgcaggttaattcttttcttcgttgattttttgacccctcttgctttgtccttctgtcaataaggacatacacaggttaaaattcaaattctttgctcttagttgttgcacattgattgtcctatcactattatgttaatgcaaagtatattatgatgtcagagactcatctgttacaaaaacgagattaacaactattctatttggatgccttctgagcactcaaattatctcatgaaacagcaagtttgtatcgtgactgggtgtatccgcccccataggttctctacgtgctccactgcggcctaggaagaattaacaagtgcactgcggttcatagcaatacatatgctacagcataaaaaacatgctccaggcacttggtgaatgatctttgtcactgtaaattggctcgtaaaccatggtgtgatgcaataatcatgtaaaaactgcaaaacatgcaaatttgccaagcagcaataagcttcagattcgaggaaaccgttaatatggatgcacatgcaagtacgtttatgatctcagagtgtaaaaggtgactgagacagctcctgtatgcataatcgtacaccgtgtgtctatggccgaactttactatccaatattacgtgttcgtttgcaatgtaagagcatctcatattgaagaaaaccaattttcttttcc

SEQ ID NO: 7492 - DNA, 3036 bp, Zea Mays
attccttcattcacaagcccgcacacacacactcgtcccttgccttcccctccgtctccaatctcccctccaccgttcgacgctctccccttgcttctcgcgcacactaaccaattcgagcacccgacgccgcggccccgatcgaatccaccggagccgcccgcctggggcccgcccgcgccattgctcgaatcgggaggcattcgtccgcccgcgctgctgccccgcgccgtggcggtggcgttggcggtatgtacgaccgctagaaggagaggaggaggcggcattagtggtggggattaggcggcggcactgctggtgccgggaggaggaggaggcgtagcccatgaaggcgacggcgccgccggcgaagcggcggaggggcccgcggctggcggtgctggcgctcgtgttctgttcgctgctcgtgccgatcgccttcctcttcaaccgcttccccgccgtatatgtgacagatgagcgccctcagcaggagattgacttgccttcgttcgatcgtgtggtatttgaaaatggtggctctgtaaatgaagatgtgtccaagaagacttccaggagcactagtgtgtcgcaccgtggtattgatagtgacccttccatagttagcactaaaccaaaagctatagttctacggcctccaaaaattgaacaggtcctcccccctccaaaagttgaacccaatccagaagtgaagccagtacttgtaccagttccagttcatcaaaacaaaaaaattaaccttgacaagattaggcctcccagagttcaaagtgctgatgaggtggaaaaggctaaggcttgtcaacttgagtttgggagttactgtctctggtctatagagcacaaagaagttatgatagataccattgtgaaaaggctgaaagatcagctatttgtagcccgatcttactaccctagcattgcaaaacttaaaggaaaggagacattgactcgcgagctgaagcaaaatattcaagaacacgagagggtacttagtgaatccattgttgatgctgatctaccatcctttataaaaacgaagctagagaggatggaccaatcaatagcaagagccaaatcatgcactgtggattgtaacaatgttgacagaaagcttcgtcaaattcttcatatgacagaggatgaagctcattttcatatgaagcagagtgcatacctatacaaccttggtgttcacaccatgcctaaaagtcatcattgtcttaatatgaggttgacagtagagtactttaaatccatgccattggatccaaatgactcttctgcccataagtttaaccttccagacaataggcactatgttatattatctaaaaatgtccttgctgcttctgttgtcatcaactcaactgttagtagctctgaggatactgaaaatgtagtatttcatgtactgactgactctcaaaatttttatgccatgaagcactggtttgcaagaaactcctacagggaatcagctgtcaatgtcataaattatgaacaaattatttttgagaatttccctgagtttggaacccagcagttatatttgcctgaggaatttcgtgttctcatcagtagccttgagaggcctactgagaagagtagaatggaatatttgtcagtgttcagtcactcacatttctttcttgccgaaatattcaaagatttaaagaaggtaattgtgttggatgatgatgtggttgttcaacgtgatatttctttcttgtggaatcttgatatgggagagaaggtcaatggtgctatcagtttttgtggtttgaaacttggtcaactgaggaaccttttgggtaggacaatgtatgatcaacagtcatgtgcatggatgtctggggttaatgtgattgatttggacaaatggagagaacataatgttacagagaattacctgcaactcctgagaaagtttgggaacaatgatgacgaggcctcactacgagcttcagctttgcctataagtttgttgtcgttccagcatcttctatatccacttgatgagagattgattttatctggacttggatatgactatggaattaaagaagaacttgttcagaattctgcatcgttgcattataatggaaatatgaaaccttggcttgagttgggtataccagattataggaagtactggaagaggtttcttacacgagacgagagattcatggacgagtgcaatgtaagtccatagtgtgcttgagcttgggagccgaatcatttttgacagtagatttcagtctactgctgtactatatactaagaggaccaacacttgagaaaaacctgggaactgggaagcagtcactagccatcaattttgacagagtagatccagcaccatctgttcattgaacttgtgagctcgatggatgggtttttctgcagttagcggggtttagttaagttcgaaggataatgcagtagacaacgttggtcacgtgtggtggtgaggttccaagtaagagagagcatcacactcacgtaacaggaatgatcattgatggattgaggcgccttaattgaaattggtgccttccacctcatggatgcagcaagtttgtatcgtgactgggtgtatccgcccccataggttctctacgtgctccactgcggcctaggaagaattaacaagtgcactgcggttcatagcaatacatatgctacagcataaaaaacatgctccaggcacttggtgaatgatctttgtcactgtaaattggctcgtaaaccatggtgtgatgcaataatcatgtaaaaactgcaaaacatgcaaatttgccaagcagcaataagcttcagattcgaggaaaccgttaatatggatgcacatgcaagtacgtttatgatctcagagtgtaaaaggtgactgagacagctcctgtatgcataatcgtacaccgtgtgtctatggccgaactttactatccaatattacgtgttcgtttgcaatgtaagagcatctcatattgaagaaaaccaattttcttttcc

SEQ ID NO: 7493 - DNA, 2203 bp, Zea Mays
gccaagcttctttactcgggagccttttatgtcaaagttggcaaccttccccgagtggccgagttcctcactcagctggggacaccacccggccaccctcacctctcaatatacataccaccaccaccttcatcaacccctgggcctggcactcatagctcgttcgtagcaagagagagagagagaagagtgggaagtctcacgccatcagggagaggggagcgaggatcacatctctcgtagcgcgcgcgaagctatataataatggaggtggccatggccgtgaaggtgctgctgagcctgtgctgcgtgggggcgtgcggcctcgccgtgtacctctaccacatcctctggctcgtgccgcagaaggtcctcgccaagttcgaggaccagaagatcggcgggccgcggccgtcgttcccgtacggcaacctcgccgacatgagggaggcggccgccgctgcgaaggctgcgcgcgcgtcggcacgcagtagcggcagcggcggcggcggtggcggcggcatcgtgcacgactaccgcccggcggtgctgccctactacgagaaatggaggaaagagtacgggcatggtggatctgatggtcgattctgcacagccactgcttatgtcatgggaagagagagttgatagaaatggtgggatcacagacattaagatcgacgatgacatcagggcttactctgcagatgtgatctctagaacgtgctttggaagcagctacatcaaaggaaaggaaatctttatgaagatcagagaactccagcaggctgtgtccaagccaaatgtgctagctgaaatgactggcctaaggttagggggtaaacgaaatactcgtgtatcaagtgcataattgattgtgaataaacaaaatgaaagaactattactgacccaaggcaacacattgattgaacagacctgtaaattgtaaaattaaagctataaatgcttgcaggttctttccttcaatgaggaacaagcaggcctgggagcttcacaaacaagtccgcaaactaattcttgaaatcgtaaaggaaagtggagaagacaggaacttactgagtgcaattcttcacagcgcaagcaccagtagggtgggcattgccgaggcagagaactttatagtggataactgcaagagcatatattttgcaggacatgagagcacagctgttacagctgcgtggtgtctaatgctccttggactgcacccagaatggcagaatcgagtacgagaagaggtgcatgaagtctgcagaggccagccagtagactcacggtcacttcagaagatgaaaaatgtatgctcttatccagttacatctcataatagttgtaagaagcgttgcctcgatttgttagaacataccactaatttcctgattgtttgccaatttagttgacaatggtgatccaggaaaccttgaggttgtacccagcaggtgcctttgtttcaaggcaggccctccaggaactgaagctcggtggcgtacatataccaaaaggtgtcaacatctacatccctgtctccacaatgcatcttgacccagagctatgggggcctgatgtgaaagagttcaacccagagcgcttctctgatgttcgaccccagctacattcatacttgccatttggtgctggggcccgaacctgcctagggcagggatttgctatggctgagctcaagatcctcatctctctcatcgtctccaagtttgttttgaagctctcaccacactaccagcattctccaacactgaaactcattgtggagccagaacttggtgtagacctcaccttaacgaaagtgcaaagtgtctgtactaagaggggcactgcaatttagtcatacaatgtcatggaatgaaacctgtgctatggtgaatgcagcttcccctgcggagaggggacaatttgtacagagacagctcatactatctacgcatgatcttttcaatgtgcatgattatagtaagaaatggtgccaaatgatccaatcatttataccaacattgtatgggaaaactatacagctattaaatttagtaatgaaacgaaatatattggaacattattaaggtgttcaattgacgccaccacagatatttgatgcttgtactgatgctgcataccaaacatatgaatatacatcaagcctctcattcgaattgcagcagaaatggg

SEQ ID NO: 7494 - DNA, 2511 bp, Zea Mays
atgggcgtccacaatcgcgtggtgcacgttctgccgctctgctcacgcccgcggccgaacctcccccgcatcccgcagccgccgacgctcaccttccatcctccgcgcagccactcatcccgcagccgcgatccccgcggcgctcaccttccatcccgcagcgcgcaccttcatcctccgccttccatcctccgcacagccactcatcccgcagccgcgatccccgcggcgctcaccttccatcccgcggcgcgcaccttcatcctccgcgaccgctcgcggatctctcatcgacgtcgatgctccgcgattaaggggatccgaggccaacaaacagcatggcgctccccgcggcgggcgggcgaggaggcatgcgcggatactcggcaggatgctccggcggaagcggagccacctccccgtcggccgcccgtgttctacagctccgtgttcgcgcaggtacgccagccgctcgacgaaatgctgtggttgcgctgacatatgctgcaaggaaatcttttttttgcccatatgtggggttggtggcatggcgtttttctatttggacttttgcgcgtgcagatcgaagagatcgggtggaagcaactggtgagcgccacaggagagggagtgtcctgtactcctgtctcaccttccgtgtcgtgtaaggattcatgttgctgccagtcggcactaacctctttctatatgtttatattgtacgaatgtttggagaaaaaaactactgccgttcaggtggttgagcaacgctggcgcattacatactaaattttgtcagtttgatagttgtttgaaaaggttatttcagaaacctgtctttgtccgaatgcaagagagagaacagacagagcgaatcttccattgatcatcagcacacgacatgaatttttttcttatcaatttccaccaatctttgtagggtaaaaacatctctggagatgctctaacatcccattctgtctctctgctattgtctttaagcgccaaaacttattgttcatttgatctcttttcatgtacacaaactcagcacggagctcaagctttgtttttttactactactactactatcctgtactacagtagtatgaagtatcgtatcatactcatgctctgtatttatatttgctagattctggctatgcgccatcctaggaaactcgtattagcaggctgtttaactgcactaagattattaattttaggtcatgacagctgtatcgacttctctaggttgggttgcaccaaatctgttagctttgtgaaggctgagcatctaaatggaggatgtctgcattgatgaaggagttcttcctgatcaaaagatttcatcagaaaagcaagtagaccaaaaagtgtctataaactttgattccagggaagagataagtgctgactctacaaaaactgcacatgagttgaaatcggaaatagttgtcctacctgtcaagtgtgatactcatgacaatattgtggaacagaactcctcatgcaaaaagcgtgatcttgaagataacaatactacagatgtatctaccgagtctaatgatgagggattaaatcccaaacaattaccatttcatgaagttgcacaagattaccagaaggttgatagtgtcatttcggagagcaatgaaaatcaggactggcttttcactggagatgcaacccatcagggacttgagaaatatgttatgacaaagttgtttaatcgagtattcgcatcagtcctagaagatgtgaagagtgatgaagaacttttttagaattaacttgtacgagaatgaaacatcctgtctggtatgagaattaacttccctcgtttttggcattttttgcttgatgtattgcatctctggcaagctgcacacatgaataggtttctggcagaaactgaaccaggattgaattgtacttgtgtcttgcgttgggttggtcttttggatctttctatgtattatgtctatactttgtagactactggccagccactccattcacgtattactcttccattgtgagtttttgctcttcactttcttatcactcacagtcactcagcttctcacatttccacacaagtagtagttaaggacacatttagtttcgaaggacagtgaactttgtatgattcattgtgaatctgctgatcttcaaattggacaacaaatgtatactccttcctattagaggtggtattgtgacaggagatgtcctcagcgtcccattccacagcgtctacggacttctggaggaggctcgccatagtagcagttctcttcctcccaatggattggttaatttggagctggtcacaaccaacaggctacaataatacgatgggcggatccaacaatgtaatggtgtaatgggcttggtcatatgcttggaggttaagaaattgacttgctggaccaatgtaaccgtatggctgatataattaatttcgtaaaccttctggatgaataaatgatctagcatcagtggca

SEQ ID NO: 7495 - DNA, 1885 bp, Zea Mays
atgggcgtccacaatcgcgtggtgcacgttctgccgctctgctcacgcccgcggccgaacctcccccgcatcccgcagccgccgacgctcaccttccatcctccgcgcagccactcatcccgcagccgcgatccccgcggcgctcaccttccatcccgcagcgcgcaccttcatcctccgccttccatcctccgcacagccactcatcccgcagccgcgatccccgcggcgctcaccttccatcccgcggcgcgcaccttcatcctccgcgaccgctcgcggatctctcatcgacgtcgatgctccgcgattaaggggatccgaggccaacaaacagcatggcgctccccgcggcgggcgggcgaggaggcatgcgcggatactcggcaggatgctccggcggaagcggagccacctccccgtcggccgcccgtgttctacagctccgtgttcgcgcagatcgaagagatcgggtggaagcaactggtgagcgccacaggagagggagtgtcctgtactcctgtctcaccttccgtgtcgtattctggctatgcgccatcctaggaaactcgtattagcaggctgtttaactgcactaagagtcatgacagctgtatcgacttctctaggttgggttgcaccaaatctgttagctttgtgaaggctgagcatctaaatggaggatgtctgcattgatgaaggagttcttcctgatcaaaagatttcatcagaaaagcaagtagaccaaaaagtgtctataaactttgattccagggaagagataagtgctgactctacaaaaactgcacatgagttgaaatcggaaatagttgtcctacctgtcaagtgtgatactcatgacaatattgtggaacagaactcctcatgcaaaaagcgtgatcttgaagataacaatactacagatgtatctaccgagtctaatgatgagggattaaatcccaaacaattaccatttcatgaagttgcacaagattaccagaaggttgatagtgtcatttcggagagcaatgaaaatcaggactggcttttcactggagatgcaacccatcagggacttgagaaatatgttatgacaaagttgtttaatcgagtattcgcatcagtcctagaagatgtgaagagtgatgaagaacttttttagaattaacttgtacgagaatgaaacatcctgtctggtatgagaattaacttccctcgtttttggcattttttgcttgatgtattgcatctctggcaagctgcacacatgaataggtttctggcagaaactgaaccaggattgaattgtacttgtgtcttgcgttgggttggtcttttggatctttctatgtattatgtctatactttgtagactactggccagccactccattcacgtattactcttccattgtgagtttttgctcttcactttcttatcactcacagtcactcagcttctcacatttccacacaagtagtagttaaggacacatttagtttcgaaggacagtgaactttgtatgattcattgtgaatctgctgatcttcaaattggacaacaaatgtatactccttcctattagaggtggtattgtgacaggagatgtcctcagcgtcccattccacagcgtctacggacttctggaggaggctcgccatagtagcagttctcttcctcccaatggattggttaatttggagctggtcacaaccaacaggctacaataatacgatgggcggatccaacaatgtaatggtgtaatgggcttggtcatatgcttggaggttaagaaattgacttgctggaccaatgtaaccgtatggctgatataattaatttcgtaaaccttctggatgaataaatgatctagcatcagtggca

SEQ ID NO: 7496 - DNA, 2375 bp, Zea Mays
atgggcgtccacaatcgcgtggtgcacgttctgccgctctgctcacgcccgcggccgaacctcccccgcatcccgcagccgccgacgctcaccttccatcctccgcgcagccactcatcccgcagccgcgatccccgcggcgctcaccttccatcccgcagcgcgcaccttcatcctccgccttccatcctccgcacagccactcatcccgcagccgcgatccccgcggcgctcaccttccatcccgcggcgcgcaccttcatcctccgcgaccgctcgcggatctctcatcgacgtcgatgctccgcgattaaggggatccgaggccaacaaacagcatggcgctccccgcggcgggcgggcgaggaggcatgcgcggatactcggcaggatgctccggcggaagcggagccacctccccgtcggccgcccgtgttctacagctccgtgttcgcgcagatcgaagagatcgggtggaagcaactggtgagcgccacaggagagggagtgtcctgtactcctgtctcaccttccgtgtcgtgtaaggattcatgttgctgccagtcggcactaacctctttctatatgtttatattgtacgaatgtttggagaaaaaaactactgccgttcaggtggttgagcaacgctggcgcattacatactaaattttgtcagtttgatagttgtttgaaaaggttatttcagaaacctgtctttgtccgaatgcaagagagagaacagacagagcgaatcttccattgatcatcagcacacgacatgaatttttttcttatcaatttccaccaatctttgtagggtaaaaacatctctggagatgctctaacatcccattctgtctctctgctattgtctttaagcgccaaaacttattgttcatttgatctcttttcatgtacacaaactcagcacggagctcaagctttgtttttttactactactactactatcctgtactacagtagtatgaagtatcgtatcatactcatgctctgtatttatatttgctagattctggctatgcgccatcctaggaaactcgtattagcaggctgtttaactgcactaagagtcatgacagctgtatcgacttctctaggttgggttgcaccaaatctgttagctttgtgaaggctgagcatctaaatggaggatgtctgcattgatgaaggagttcttcctgatcaaaagatttcatcagaaaagcaagtagaccaaaaagtgtctataaactttgattccagggaagagataagtgctgactctacaaaaactgcacatgagttgaaatcggaaatagttgtcctacctgtcaagtgtgatactcatgacaatattgtggaacagaactcctcatgcaaaaagcgtgatcttgaagataacaatactacagatgtatctaccgagtctaatgatgagggattaaatcccaaacaattaccatttcatgaagttgcacaagattaccagaaggttgatagtgtcatttcggagagcaatgaaaatcaggactggcttttcactggagatgcaacccatcagggacttgagaaatatgttatgacaaagttgtttaatcgagtattcgcatcagtcctagaagatgtgaagagtgatgaagaacttttttagaattaacttgtacgagaatgaaacatcctgtctggtatgagaattaacttccctcgtttttggcattttttgcttgatgtattgcatctctggcaagctgcacacatgaataggtttctggcagaaactgaaccaggattgaattgtacttgtgtcttgcgttgggttggtcttttggatctttctatgtattatgtctatactttgtagactactggccagccactccattcacgtattactcttccattgtgagtttttgctcttcactttcttatcactcacagtcactcagcttctcacatttccacacaagtagtagttaaggacacatttagtttcgaaggacagtgaactttgtatgattcattgtgaatctgctgatcttcaaattggacaacaaatgtatactccttcctattagaggtggtattgtgacaggagatgtcctcagcgtcccattccacagcgtctacggacttctggaggaggctcgccatagtagcagttctcttcctcccaatggattggttaatttggagctggtcacaaccaacaggctacaataatacgatgggcggatccaacaatgtaatggtgtaatgggcttggtcatatgcttggaggttaagaaattgacttgctggaccaatgtaaccgtatggctgatataattaatttcgtaaaccttctggatgaataaatgatctagcatcagtggca

SEQ ID NO: 7497 - DNA, 2488 bp, Zea Mays
atgggcgtccacaatcgcgtggtgcacgttctgccgctctgctcacgcccgcggccgaacctcccccgcatcccgcagccgccgacgctcaccttccatcctccgcgcagccactcatcccgcagccgcgatccccgcggcgctcaccttccatcccgcagcgcgcaccttcatcctccgccttccatcctccgcacagccactcatcccgcagccgcgatccccgcggcgctcaccttccatcccgcggcgcgcaccttcatcctccgcgaccgctcgcggatctctcatcgacgtcgatgctccgcgattaaggggatccgaggccaacaaacagcatggcgctccccgcggcgggcgggcgaggaggcatgcgcggatactcggcaggatgctccggcggaagcggagccacctccccgtcggccgcccgtgttctacagctccgtgttcgcgcagatcgaagagatcgggtggaagcaactggtgagcgccacaggagagggagtgtcctgtactcctgtctcaccttccgtgtcgtgtaaggattcatgttgctgccagtcggcactaacctctttctatatgtttatattgtacgaatgtttggagaaaaaaactactgccgttcaggtggttgagcaacgctggcgcattacatactaaattttgtcagtttgatagttgtttgaaaaggttatttcagaaacctgtctttgtccgaatgcaagagagagaacagacagagcgaatcttccattgatcatcagcacacgacatgaatttttttcttatcaatttccaccaatctttgtagggtaaaaacatctctggagatgctctaacatcccattctgtctctctgctattgtctttaagcgccaaaacttattgttcatttgatctcttttcatgtacacaaactcagcacggagctcaagctttgtttttttactactactactactatcctgtactacagtagtatgaagtatcgtatcatactcatgctctgtatttatatttgctagattctggctatgcgccatcctaggaaactcgtattagcaggctgtttaactgcactaagagtcatgacagctgtatcgacttctctaggttgggttgcaccaaatctgagctgtcatgacaaaaatcatgatgcaatacaagcagaatatgcttcctgaaagataaagtaatcacaaagttgaggcagataaaatggttgagcaaaccaatcaatctgaagttagctttgtgaaggctgagcatctaaatggaggatgtctgcattgatgaaggagttcttcctgatcaaaagatttcatcagaaaagcaagtagaccaaaaagtgtctataaactttgattccagggaagagataagtgctgactctacaaaaactgcacatgagttgaaatcggaaatagttgtcctacctgtcaagtgtgatactcatgacaatattgtggaacagaactcctcatgcaaaaagcgtgatcttgaagataacaatactacagatgtatctaccgagtctaatgatgagggattaaatcccaaacaattaccatttcatgaagttgcacaagattaccagaaggttgatagtgtcatttcggagagcaatgaaaatcaggactggcttttcactggagatgcaacccatcagggacttgagaaatatgttatgacaaagttgtttaatcgagtattcgcatcagtcctagaagatgtgaagagtgatgaagaacttttttagaattaacttgtacgagaatgaaacatcctgtctggtatgagaattaacttccctcgtttttggcattttttgcttgatgtattgcatctctggcaagctgcacacatgaataggtttctggcagaaactgaaccaggattgaattgtacttgtgtcttgcgttgggttggtcttttggatctttctatgtattatgtctatactttgtagactactggccagccactccattcacgtattactcttccattgtgagtttttgctcttcactttcttatcactcacagtcactcagcttctcacatttccacacaagtagtagttaaggacacatttagtttcgaaggacagtgaactttgtatgattcattgtgaatctgctgatcttcaaattggacaacaaatgtatactccttcctattagaggtggtattgtgacaggagatgtcctcagcgtcccattccacagcgtctacggacttctggaggaggctcgccatagtagcagttctcttcctcccaatggattggttaatttggagctggtcacaaccaacaggctacaataatacgatgggcggatccaacaatgtaatggtgtaatgggcttggtcatatgcttggaggttaagaaattgacttgctggaccaatgtaaccgtatggctgatataattaatttcgtaaaccttctggatgaataaatgatctagcatcagtggca

SEQ ID NO: 7498 - DNA, 1039 bp, Zea Mays
agtctggtaccgccggcaaagcagtcgttttcgtcctcttccttgattaaaccttccgtacccatatccacctgctgctccgaccttccagtcttctccgtaggggcttcgctccatagatttcgccgcaaggggcaacggcacacccaccaactgacctgacccacgagggatccgcagatgaagatcattccggtcccttgcctggatgacaactatgcctacttaatcgtggacgagagcaccaagaaggcagcggccgttgaccctgtggaaccggagaaggttctcaaggcggccggcgaggtcggcgcctacgtcgactgcgttctcaccacccatcaccactgggatcatgctggtggcaatgagaagatgaggctgcaggtgccagggataaaggtatttggaggatccctggacaatgtgaaaggctgcactgatcaggtggagaatggaatgaagttgtcacttgggaaggacattgagatactatgcctacacacgccttgccacactaaaggtcatatcagctactatgttactagtaaggagggtgaagatccagcggtcttcaccggagataccttgttcattgctgggtgtgggaagttttttgagggttctgcagagcaaatgtatcagtcccttattgttacactgggttcgctgccaaagtcaacccgagtttactgtgggcatgagtacactgtgaagaacctaaaattcatgctgacactggagccagagaatgagaagacgaaacagaaactggaatgggctgaaaagcagcgcgaagcgaatcagccaacagtgccctcgactataggagatgagtttgagataaatactttcatgcgtgttgatctaccagaaatacaggcgaaattcagtgtcaactctccagttgaagcaatgagagaggtcaggaagaccaaggataattggagaggttgaggacacccatggccgccactagtctgttgaaccagcattccaaagtgaactaatgcagaaaccttgccctgtaggtgggcgc

SEQ ID NO: 7499 - DNA, 1240 bp, Zea Mays
agtctggtaccgccggcaaagcagtcgttttcgtcctcttccttgattaaaccttccgtacccatatccacctgctgctccgaccttccagtcttctccgtaggggcttcgctccatagatttcgccgcaaggggcaacggcacacccaccaactgacctgacccacgagggatccgcagatgaagatcattccggtcccttgcctggatgacaactatgcctacttaatcgtggacgagagcaccaagaaggcagcggccgttgaccctgtggaaccggagaaggttctcaaggcggccggcgaggtcggcgcctacgtcgactgcgttctcaccacccatcaccactgggatcatgctggtggcaatgagaagatgaggctgcaggtgccagggataaaggtatttggaggatccctggacaatgtgaaaggctgcactgatcaggtggagaatggaatgaagttgtcacttgggaaggacattgagatactatgcctacacacgccttgccacactaaaggtcatatcagctactatgttactagtaaggagggtgaagatccagcggtcttcaccggagataccttgttcattgctgggtgtgggaagttttttgagggttctgcagagcaaatgtatcagtcccttattgttacactgggttcgctgccaaagtcaacccgagtttactgtgggcatgagtacactgtgaagaacctaaaattcatgctgacactggagccagagaatgagaagacgaaacagaaactggaatgggctgaaaagcagcgcgaagcgaatcagccaacagtgccctcgactataggagatgagtttgagataaatactttcatgcgtgttgatctaccagaaatacaggcgaaattcagtgtcaactctccagttgaagcaatgagagaggtcaggaagaccaaggataattggagaggtgggaatgaggtttactgccgtgcaatgctttgagaaatgtgttgttgtgaaggagaagactcctacaataagctccgcgttaatgagtagtaacaatacgctccttgtaacttgtggtctgtttgccaataataatgtacgaactgtagtgcctatcttgaaaatatgaagagctataatgggtataacctgcctgcattttatatttattcagggatcatcagtatatggattatgatcgatggatacagatgataaagatggatgagctgctatgctttcactg

SEQ ID NO: 7500 - DNA, 2012 bp, Zea Mays
agtctggtaccgccggcaaagcagtcgttttcgtcctcttccttgattaaaccttccgtacccatatccacctgctgctccgaccttccagtcttctccgtaggggcttcgctccatagatttcgccgcaaggggcaacggcacacccaccaactgacctgacccacgagggatccgcagatgaagatcattccggtcccttgcctggatgacaactatgcctacttaatcgtggacgagagcaccaagaaggcagcggccgttgaccctgtggaaccggagaaggttctcaaggcggccggcgaggtcggcgcctacgtcgactgcgttctcaccacccatcaccactgggatcatgctggtggcaatgagaagatgaggctgcaggtgccagggataaaggtatttggaggatccctggacaatgtgaaaggctgcactgatcaggtggagaatggaatgaagttgtcacttgggaaggacattgagatactatgcctacacacgccttgccacactaaaggtcatatcagctactatgttactagtaaggagggtgaagatccagcggtcttcaccggagataccttgttcattgctgggtgtgggaagttttttgagggttctgcagagcaaatgtatcagtcccttattgttacactgggttcgctgccaaagtcaacccgagtttactgtgggcatgaggtacaatctcttttttcagtttcattaaggaggaacctgaatgctagtggaccattgaacctgtatggtggatgtatataaagtaactgtgtctccctttgtcttgtaggatgtaaatattgtattgcatcttctaagaaaatttatattatcaatgactaaaggacatatgtacaaatctactttcttctgtttcatgttctcaggaataggcagtttccatattgattgactgtttattgaatttcttttgtagcagattctaaattctgtgatttgttgcatgtcttattttaatacatttatgctggttggaatgttatccaacagcaaggagttaatatagagatatgatgctcacatgtgcctccttttgttgctagctaatagagtttatggaattgtatatatgtggcatgcatgtttgttagttactaggctcgtcgtctttccattcatgctatagttttggtaacaggtgcttgagctgttcatgatcttttagtttgcttggttgaattttagctctcgagttgtaaaagatgatgtcaattttgattttgccaacaagaaagaaccagtaacatttggttgttttgtttatctttccttaatatggtatactaatcgtgctggcagaggcatactgtgctctttatggccttacctcaccttttgcttgttgagttgcagtacactgtgaagaacctaaaattcatgctgacactggagccagagaatgagaagacgaaacagaaactggaatgggctgaaaagcagcgcgaagcgaatcagccaacagtgccctcgactataggagatgagtttgagataaatactttcatgcgtgttgatctaccagaaatacaggcgaaattcagtgtcaactctccagttgaagcaatgagagaggtcaggaagaccaaggataattggagaggttgaggacacccatggccgccactagtctgttgaaccagcattccaaagtgaactaatgcagaaaccttgccctgtaggtgggaatgaggtttactgccgtgcaatgctttgagaaatgtgttgttgtgaaggagaagactcctacaataagctccgcgttaatgagtagtaacaatacgctccttgtaacttgtggtctgtttgccaataataatgtacgaactgtagtgcctatcttgaaaatatgaagagctataatgggtataacctgcctgcattttatatttattcagggatcatcagtatatggattatgatcgatggatacagatgataaagatggatgagctgctatgctttcactg

SEQ ID NO: 7501 - DNA, 572 bp, Zea Mays
ttagcagctcgctttcgcagtgggcggcgaggtgacgcttgcttgcgcgttgggcggtgactcatgccaccgtcctgatcgaactcacactataaaacccatgcgctgagagttacccttgacatcgtctctgttcttggcggccgcattggcacatacacatacaggactccggagtaccgagggcagagctcgtcgatcttcaagtcggcggtcaggaagcagctcgtggacgaaggctacaggatccgcggcaacgtcggggaccagtggagcgacctgcagggcgactgcgccggcgaccgcgtgttcaagatacccaaccccatgtactttgtcccctgaagcggacatagaccgggtgcctgattgatttcctcgtaaaattaagcatgagaatacggactactacttacctagggcaaacgtcaaagtgatctgtaaacggattacggatggccaatgcagaataagcacaggccgtaaagcatatataaaggaagaggaagaagagtattgacaggctcgaacccatcgagatcatatataaaatagctacaaactatctggtg

SEQ ID NO: 7502 - DNA, 585 bp, Zea Mays
ctaggaactgaaacgtctattcttttttttgtatgcaaggacaaaatcaataggtgaaagacgaaaatagctattcgcctattccgaccttgtttcttaagcattccattgaaccaaagttacagcagtacgaagtatctgacgaggcagacaacgtgtgcaccgtgaaccacatgcaggataccatcgatcatcgatgtcatggatacacgaattctgaatcagaaccacaattcaggctgacagaggactggattccttgggactgccaacggagagagcgcgactcccggaagcagagtgccggagctcctccaccatcctaaccacctgcgccatcgtcggacgccggtcgggagaccacgccgtgcacgccatggcgatacggagcatctggaccagctcgtcttctatgttgggatacttcatcagctggacgtcaaacacctcagcggtccactcctcgcggaccaccgaatgcacccacctcggtaggtcgacggcgtcgtcctgaccctgtgactgaagcggggccttgcccgtcagcgtctccatgaggaggacgccgaaaccgtacacgtcgga

SEQ ID NO: 7503 - DNA, 1831 bp, Zea Mays
gaggtgttgtagtttgctgcaagtgggagatttgtgtgatttatgatctcatgaagtttgaagctgtgtgcataagctagctgtttttttttccaatcatcatgtgcactcgaaacattggacctgcatttaacatattcagttgtgctgatcaaacactcggttcatcaaaatggagctgaaaatatattcttttgtctgtattcatcaatacaaggttttgttgaaggtctgagctgtgcaaagagagatggattccaaaaagaagaggaacaagaagaagaagggaaaccaagggaagaatgccgctgatgtcacatccattgctggggaagctgcttctcagaatcacaatcatgagttagccccaatagatcatcataaaggttctgatgcagatgatgtcatgtccagtgttggagaggaacttcctcagtacaagaatcatcagccaaatatacaggcagattataatggcacaagtgcttacgacactacatcctccattggagagtgtattgcatgctatcaaaacaacgaacctatgatgacacaggagaatcacaaggctagcaatgcagtccctgcagatcagaggagtgttggactgtcagagtctagtgtggagcttgacatgcatagacttcatgaagccaaactcgataaattacatgagacaataaagcagttggagaatgaaaagagtttgtggcttcaaaaagtgatcaccatggagggtgaacttgaaaagttgcataacgaagtgggttgtcatgctcaaaatgaggtccttttggaggaaaaactgaatagtctacagagtggttatgatgtgctgattaagaaggaggaagttgtggataacaaagtcaggtgcatagacaacatcaatgataccttaactcatcaagagtctttgcttaaagaaagattaagtgggctggaggaaacaaacaaatccctgctggtacaggtgaaggtgttggaggaagcttcaaacaatacttctgaggaaaatcagatgttggtaaaaaaaatatatgaacttgattcaagactacaagcacttgaagcaaaggctgctcctagtgaagccttaatgattgaaaagttccctgataataaggtgatggatcaagtgcattttgccaactcgccacttcagcaacagacaattgatttttcagagggtaacaaactgtttgctgagagaggtctgagcagtccagtgaaacttaatcctgacaacagctatcgtcaaatctacgacattcccagcaatgactatgctagtaattatacagaggaaacatcaatacaacttccagaaataggcaccagcaatactattgttcaaggtcatgttgatgtcaatgaacaccgatttgatggaccaagaacaatcgaagaaatcgttcctgttccattggatgagatacagatccatgaggatgtcccagggcaaccgggagcagccgatgagatagatgaggttccattttctgacgctccgatcattggtgctccattcagactgatctcatttgttgctaggcgccggagaaattcttgttcctttatactacctgttcttgaatatttgtcatccgctacttcatttttaaattaaaacacgataaataaaaaaagaacggagaagtacaatataagaagctatgtaccatgggcctctttacgggtctaaccatgcgaaaaagttgttctggaaattctattattaatgactgaattttggtgtgctgacactataacctgtgacagacacctatatgcttgatttattgcatcgtcttgttaatcttaatctttt

SEQ ID NO: 7504 - DNA, 2047 bp, Zea Mays
gaggtgttgtagtttgctgcaagtgggagatttgtgtgatttatgatctcatgaagtttgaagctgtgtgcataagctagctgtttttttttccaatcatcatgtgcactcgaaacattggacctgcatttaacatattcagttgtgctgatcaaacactcggttcatcaaaatggagctgaaaatatattcttttgtctgtattcatcaatacaaggttttgttgaaggtctgagctgtgcaaagagagatggattccaaaaagaagaggaacaagaagaagaagggaaaccaagggaagaatgccgctgatgtcacatccattgctggggaagctgcttctcagaatcacaatcatgagttagccccaatagatcatcataaaggttctgatgcagatgatgtcatgtccagtgttggagaggaacttcctcagtacaagaatcatcagccaaatatacaggcagattataatggcacaagtgcttacgacactacatcctccattggagagtgtattgcatgctatcaaaacaacgaacctatgatgacacaggagaatcacaaggctagcaatgcagtccctgcagatcagaggagtgttggactgtcagagtctagtgtggagcttgacatgcatagacttcatgaagccaaactcgataaattacatgagacaataaagcagttggagaatgaaaagagtttgtggcttcaaaaagtgatcaccatggagggtgaacttgaaaagttgcataacgaagtgggttgtcatgctcaaaatgaggtccttttggaggaaaaactgaatagtctacagagtggttatgatgtgctgattaagaaggaggaagttgtggataacaaagtcaggtgcatagacaacatcaatgataccttaactcatcaagagtctttgcttaaagaaagattaagtgggctggaggaaacaaacaaatccctgctggtacaggtgttggaggaagcttcaaacaatacttctgaggaaaatcagatgttggtaaaaaaaatatatgaacttgattcaagactacaagcacttgaagcaaaggctgctcctagtgaagccttaatgattgaaaagttccctgataataaggtgatggatcaagtgcattttgccaactcgccacttcagcaacagacaattgatttttcagagggtaacaaactgtttgctgagagaggtctgagcagtccagtgaaacttaatcctgacaacagctatcgtcaaatctacgacattcccagcaatgactatgctagtaattatacagaggaaacatcaatacaacttccagaaataggcaccagcaatactattgttcaaggtcatgttgatgtcaatgaacaccgatttgatggaccaagaacaatcgaagaaatcgttcctgttccattggatgagatacagatccatgaggatgtcccagggcaaccgggagcagccgatgagatagatgaggttccattttctgacgctccgatcattggtgctccattcagactgatctcatttgttgctaggtatgtcagcggcgctgatttggtcaaccaaaaataactgtctgcataccaggaattcaggacttttatgtcaggagttcctttttgatcccactgataattacgtcagtatcttgagataaagatggatagattggattcagaatagatatggagctgtattcattcgtgtcagtgctcacgtcactgccaattattctccttcccctgtacttttttcaggcgccggagaaattcttgttcctttatactacctgttcttgaatatttgtcatccgctacttcatttttaaattaaaacacgataaataaaaaaagaacggagaagtacaatataagaagctatgtaccatgggcctctttacgggtctaaccatgcgaaaaagttgttctggaaattctattattaatgactgaattttggtgtgctgacactataacctgtgacagacacctatatgcttgatttattgcatcgtcttgttaatcttaatctttt

SEQ ID NO: 7505 - DNA, 2110 bp, Zea Mays
cctagcttcacccctggattagagagaggtgttgtagtttgctgcaagtgggagatttgtgtgatttatgatctcatgaagtttgaagctgtgtgcataagctagctgtttttttttccaatcatcatgtgcactcgaaacattggacctgcatttaacatattcagttgtgctgatcaaacactcggttcatcaaaatggagctgaaaatatattcttttgtctgtattcatcaatacaaggttttgttgaaggtctgagctgtgcaaagagagatggattccaaaaagaagaggaacaagaagaagaagggaaaccaagggaagaatgccgctgatgtcacatccattgctggggaagctgcttctcagaatcacaatcatgagttagccccaatagatcatcataaaggttctgatgcagatgatgtcatgtccagtgttggagaggaacttcctcagtacaagaatcatcagccaaatatacaggcagattataatggcacaagtgcttacgacactacatcctccattggagagtgtattgcatgctatcaaaacaacgaacctatgatgacacaggagaatcacaaggctagcaatgcagtccctgcagatcagaggagtgttggactgtcagagtctagtgtggagcttgacatgcatagacttcatgaagccaaactcgataaattacatgagacaataaagcagttggagaatgaaaagagtttgtggcttcaaaaagtgatcaccatggagggtgaacttgaaaagttgcataacgaagtgggttgtcatgctcaaaatgaggtccttttggaggaaaaactgaatagtctacagagtggttatgatgtgctgattaagaaggaggaagttgtggataacaaagtcaggtgcatagacaacatcaatgataccttaactcatcaagagtctttgcttaaagaaagattaagtgggctggaggaaacaaacaaatccctgctggtacagtctggcaggtgaaggtgttggaggaagcttcaaacaatacttctgaggaaaatcagatgttggtaaaaaaaatatatgaacttgattcaagactacaagcacttgaagcaaaggctgctcctagtgaagccttaatgattgaaaagagtgtaacaaaaactgtaatgcagttccctgataataaggtgatggatcaagtgcattttgccaactcgccacttcagcaacagacaattgatttttcagagggtaacaaactgtttgctgagagaggtctgagcagtccagtgaaacttaatcctgacaacagctatcgtcaaatctacgacattcccagcaatgactatgctagtaattatacagaggaaacatcaatacaacttccagaaataggcaccagcaatactattgttcaaggtcatgttgatgtcaatgaacaccgatttgatggaccaagaacaatcgaagaaatcgttcctgttccattggatgagatacagatccatgaggatgtcccagggcaaccgggagcagccgatgagatagatgaggttccattttctgacgctccgatcattggtgctccattcagactgatctcatttgttgctaggtatgtcagcggcgctgatttggtcaaccaaaaataactgtctgcataccaggaattcaggacttttatgtcaggagttcctttttgatcccactgataattacgtcagtatcttgagataaagatggatagattggattcagaatagatatggagctgtattcattcgtgtcagtgctcacgtcactgccaattattctccttcccctgtacttttttcaggcgccggagaaattcttgttcctttatactacctgttcttgaatatttgtcatccgctacttcatttttaaattaaaacacgataaataaaaaaagaacggagaagtacaatataagaagctatgtaccatgggcctctttacgggtctaaccatgcgaaaaagttgttctggaaattctattattaatgactgaattttggtgtgctgacactataacctgtgacagacacctatatgcttgatttattgcatcgtcttgttaatcttaatctttt

SEQ ID NO: 7506 - DNA, 2000 bp, Zea Mays
cctagcttcacccctggattagagagaggtgttgtagtttgctgcaagtgggagatttgtgtgatttatgatctcatgaagtttgaagctgtgtgcataagctagctgtttttttttccaatcatcatgtgcactcgaaacattggacctgcatttaacatattcagttgtgctgatcaaacactcggttcatcaaaatggagctgaaaatatattcttttgtctgtattcatcaatacaaggttttgttgaaggtctgagctgtgcaaagagagatggattccaaaaagaagaggaacaagaagaagaagggaaaccaagggaagaatgccgctgatgtcacatccattgctggggaagctgcttctcagaatcacaatcatgagttagccccaatagatcatcataaaggttctgatgcagatgatgtcatgtccagtgttggagaggaacttcctcagtacaagaatcatcagccaaatatacaggcagattataatggcacaagtgcttacgacactacatcctccattggagagtgtattgcatgctatcaaaacaacgaacctatgatgacacaggagaatcacaaggctagcaatgcagtccctgcagatcagaggagtgttggactgtcagagtctagtgtggagcttgacatgcatagacttcatgaagccaaactcgataaattacatgagacaataaagcagttggagaatgaaaagagtttgtggcttcaaaaagtgatcaccatggagggtgaacttgaaaagttgcataacgaagtgggttgtcatgctcaaaatgaggtccttttggaggaaaaactgaatagtctacagagtggttatgatgtgctgattaagaaggaggaagttgtggataacaaagtcaggtgcatagacaacatcaatgataccttaactcatcaagagtctttgcttaaagaaagattaagtgggctggaggaaacaaacaaatccctgctggtacaggtgaaggtgttggaggaagcttcaaacaatacttctgaggaaaatcagatgttggtaaaaaaaatatatgaacttgattcaagactacaagcacttgaagcaaaggctgctcctagtgaagccttaatgattgaaaagggtaacaaactgtttgctgagagaggtctgagcagtccagtgaaacttaatcctgacaacagctatcgtcaaatctacgacattcccagcaatgactatgctagtaattatacagaggaaacatcaatacaacttccagaaataggcaccagcaatactattgttcaaggtcatgttgatgtcaatgaacaccgatttgatggaccaagaacaatcgaagaaatcgttcctgttccattggatgagatacagatccatgaggatgtcccagggcaaccgggagcagccgatgagatagatgaggttccattttctgacgctccgatcattggtgctccattcagactgatctcatttgttgctaggtatgtcagcggcgctgatttggtcaaccaaaaataactgtctgcataccaggaattcaggacttttatgtcaggagttcctttttgatcccactgataattacgtcagtatcttgagataaagatggatagattggattcagaatagatatggagctgtattcattcgtgtcagtgctcacgtcactgccaattattctccttcccctgtacttttttcaggcgccggagaaattcttgttcctttatactacctgttcttgaatatttgtcatccgctacttcatttttaaattaaaacacgataaataaaaaaagaacggagaagtacaatataagaagctatgtaccatgggcctctttacgggtctaaccatgcgaaaaagttgttctggaaattctattattaatgactgaattttggtgtgctgacactataacctgtgacagacacctatatgcttgatttattgcatcgtcttgttaatcttaatctttt

SEQ ID NO: 7507 - DNA, 2110 bp, Zea Mays
aaaatgtgcacccacagctcagtacctagcttcacccctggattagagagaggtgttgtagtttgctgcaagtgggagatttgtgtgatttatgatctcatgaagtttgaagctgtgtgcataagctagctgtttttttttccaatcatcatgtgcactcgaaacattggacctgcatttaacatattcagttgtgctgatcaaacactcggttcatcaaaatggagctgaaaatatattcttttgtctgtattcatcaatacaaggttttgttgaaggtctgagctgtgcaaagagagatggattccaaaaagaagaggaacaagaagaagaagggaaaccaagggaagaatgccgctgatgtcacatccattgctggggaagctgcttctcagaatcacaatcatgagttagccccaatagatcatcataaaggttctgatgcagatgatgtcatgtccagtgttggagaggaacttcctcagtacaagaatcatcagccaaatatacaggcagattataatggcacaagtgcttacgacactacatcctccattggagagtgtattgcatgctatcaaaacaacgaacctatgatgacacaggagaatcacaaggctagcaatgcagtccctgcagatcagaggagtgttggactgtcagagtctagtgtggagcttgacatgcatagacttcatgaagccaaactcgataaattacatgagacaataaagcagttggagaatgaaaagagtttgtggcttcaaaaagtgatcaccatggagggtgaacttgaaaagttgcataacgaagtgggttgtcatgctcaaaatgaggtccttttggaggaaaaactgaatagtctacagagtggttatgatgtgctgattaagaaggaggaagttgtggataacaaagtcaggtgcatagacaacatcaatgataccttaactcatcaagagtctttgcttaaagaaagattaagtgggctggaggaaacaaacaaatccctgctggtacagtctggcaggtgaaggtgttggaggaagcttcaaacaatacttctgaggaaaatcagatgttggtaaaaaaaatatatgaacttgattcaagactacaagcacttgaagcaaaggctgctcctagtgaagccttaatgattgaaaagttccctgataataaggtgatggatcaagtgcattttgccaactcgccacttcagcaacagacaattgatttttcagagggtaacaaactgtttgctgagagaggtctgagcagtccagtgaaacttaatcctgacaacagctatcgtcaaatctacgacattcccagcaatgactatgctagtaattatacagaggaaacatcaatacaacttccagaaataggcaccagcaatactattgttcaaggtcatgttgatgtcaatgaacaccgatttgatggaccaagaacaatcgaagaaatcgttcctgttccattggatgagatacagatccatgaggatgtcccagggcaaccgggagcagccgatgagatagatgaggttccattttctgacgctccgatcattggtgctccattcagactgatctcatttgttgctaggtatgtcagcggcgctgatttggtcaaccaaaaataactgtctgcataccaggaattcaggacttttatgtcaggagttcctttttgatcccactgataattacgtcagtatcttgagataaagatggatagattggattcagaatagatatggagctgtattcattcgtgtcagtgctcacgtcactgccaattattctccttcccctgtacttttttcaggcgccggagaaattcttgttcctttatactacctgttcttgaatatttgtcatccgctacttcatttttaaattaaaacacgataaataaaaaaagaacggagaagtacaatataagaagctatgtaccatgggcctctttacgggtctaaccatgcgaaaaagttgttctggaaattctattattaatgactgaattttggtgtgctgacactataacctgtgacagacacctatatgcttgatttattgcatcgtcttgttaatcttaatctttt

SEQ ID NO: 7508 - DNA, 1236 bp, Zea Mays
gaggtgttgtagtttgctgcaagtgggagatttgtgtgatttatgatctcatgaagtttgaagctgtgtgcataagctagctgtttttttttccaatcatcatgtgcactcgaaacattggacctgcatttaacatattcagttgtgctgatcaaacactcggttcatcaaaatggagctgaaaatatattcttttgtctgtattcatcaatacaaggttttgttgaaggtctgagctgtgcaaagagagatggattccaaaaagaagaggaacaagaagaagaagggaaaccaagggaagaatgccgctgatgtcacatccattgctggggaagctgcttctcagaatcacaatcatgagttagccccaatagatcatcataaaggttctgatgcagatgatgtcatgtccagtgttggagaggaacttcctcagtacaagaatcatcagccaaatatacaggcagattataatggcacaagtgcttacgacactacatcctccattggagagtgtattgcatgctatcaaaacaacgaacctatgatgacacaggagaatcacaaggctagcaatgcagtccctgcagatcagaggagtgttggactgtcagagtctagtgtggagcttgacatgcatagacttcatgaagccaaactcgataaattacatgagacaataaagcagttggagaatgaaaagagtttgtggcttcaaaaagtgatcaccatggagggtgaacttgaaaagttgcataacgaagtgggttgtcatgctcaaaatgaggtccttttggaggaaaaactgaatagtctacagagtggttatgatgtgctgattaagaaggaggaagttgtggataacaaagtcaggtgcatagacaacatcaatgataccttaactcatcaagagtctttgcttaaagaaagattaagtgggctggaggaaacaaacaaatccctgctggtacaggtgaaggtgttggaggaagcttcaaacaatacttctgaggaaaatcagatgttggtaaaaaaaatatatgaacttgattcaagactacaagcacttgaagcaaaggctgctcctagtgaagccttaatgattgaaaagagtgtaacaaaaactgtaatgcagttccctgataataaggtgatggatcaagtgcattttgccaactcgccacttcagcaacagacaattgatttttcagaggagtcgaggagagtcattcgtgg

SEQ ID NO: 7509 - DNA, 1038 bp, Zea Mays
tccagctttaccaccagggtttatttagttaccacttatcttgtagggaggagcttgcacgcatctacactgctgaaattgtatctgcagtcgcccacctccatgccaacggtattatgcatagagatttgaagcctgagaacatcttactggatgctgatggtcatgctatgctgactgactttggtgtggcaaaagaatttgatgaaaacactagatcaaactcaatgtgtggtactgttgaatacatggccccagaaattgttcagggccgaggtcatgataaggctgcagactggtggagtgtgggagtccttctttttgaaatgcttacaggaaagccaccgtttgttggtggaaacagagacaagattcagcagaagatagtaaaggagaagataaagctgccaacatatttatctagtgaagttcactcaatgttgaaaggattattgcacaaagaagctggcagacggctgggaagcggaccaggcggcagtgacgaaatcaagaaccacaagtggttcaagtctgtaaactggaagaggctggaggcccggcagatcgagccaagcttccggccgaatgttgctggcaagacctgcattgcgaactttgacgagtgctggacgaacatgcccgtgcttgattctccggtggccagccctgttgcggccaacagcaactttgtggggttcagttatgtgaggcccgcaccgttcctccagaagccgagtccacttggctaaagaactacttccgtgatctgatatctaacccggagttcaaataactatctttgagtctgaatcctatgtatttcttcaagacattagtgatgggaatctaaccttattgttgtgttgtgggtaggccagccaagcgcctattgcttgagaacaacagcttggcaagtgacaatgtgcaatattgccagaagttcttattgaagcgccataataattctcctacgtcaatttgaacttgctcggtctattcaattgtggccttataatgcaatttcattctctggtctag

SEQ ID NO: 7510 - DNA, 998 bp, Zea Mays
aggtactcctttcagacgaagtaccgactttaccttgtcctggactttataaatggggccatctcttcttccagctttaccaccagggtttatttagggaggagcttgcacgcatctacactgctgaaattgtatctgcagtcgcccacctccatgccaacggtattatgcatagagatttgaagcctgagaacatcttactggatgctgatggtcataaattgttcagggccgaggtcatgataaggctgcagactggtggagtgtgggagtccttctttttgaaatgcttacaggaaagccaccgtttgttggtggaaacagagacaagattcagcagaagatagtaaaggagaagataaagctgccaacatatttatctagtgaagttcactcaatgttgaaaggattattgcacaaagaagctggcagacggctgggaagcggaccaggcggcagtgacgaaatcaagaaccacaagtggttcaagtctgtaaactggaagaggctggaggcccggcagatcgagccaagcttccggccgaatgttgctggcaagacctgcattgcgaactttgacgagtgctggacgaacatgcccgtgcttgattctccggtggccagccctgttgcggccaacagcaactttgtggggttcagttatgtgaggcccgcaccgttcctccagaagccgagtccacttggctaaagaactacttccgtgatctgatatctaacccggagttcaaataactatctttgagtctgaatcctatgtatttcttcaagacattagtgatgggaatctaaccttattgttgtgttgtgggtaggccagccaagcgcctattgcttgagaacaacagcttggcaagtgacaatgtgcaatattgccagaagttcttattgaagcgccataataattctcctacgtcaatttgaacttgctcggtctattcaattgtggccttataatgcaatttcattctctggtctag

SEQ ID NO: 7511 - DNA, 1091 bp, Zea Mays
tgaggtactcctttcagacgaagtaccgactttaccttgtcctggactttataaatggggccatctcttcttccagctttaccaccagggtttatttagggaggagcttgcacgcatctacactgctgaaattgtatctgcagtcgcccacctccatgccaacggtattatgcatagagatttgaagcctgagaacatcttactggatgctgatggtcatgctatgctgactgactttggtgtggcaaaagaatttgatgaaaacactagatcaaactcaatgtgtggtactgttgaatacatggccccagaaattgttcagggccgaggtcatgataaggctgcagactggtggagtgtgggagtccttctttttgaaatgcttacaggaaagccaccgtttgttggtggaaacagagacaagattcagcagaagatagtaaaggagaagataaagctgccaacatatttatctagtgaagttcactcaatgttgaaaggattattgcacaaagaagctggcagacggctgggaagcggaccaggcggcagtgacgaaatcaagaaccacaagtggttcaagtctgtaaactggaagaggctggaggcccggcagatcgagccaagcttccggccgaatgttgctggcaagacctgcattgcgaactttgacgagtgctggacgaacatgcccgtgcttgattctccggtggccagccctgttgcggccaacagcaactttgtggggttcagttatgtgaggcccgcaccgttcctccagaagccgagtccacttggctaaagaactacttccgtgatctgatatctaacccggagttcaaataactatctttgagtctgaatcctatgtatttcttcaagacattagtgatgggaatctaaccttattgttgtgttgtgggtaggccagccaagcgcctattgcttgagaacaacagcttggcaagtgacaatgtgcaatattgccagaagttcttattgaagcgccataataattctcctacgtcaatttgaacttgctcggtctattcaattgtggccttataatgcaatttcattctctggtctag

SEQ ID NO: 7512 - DNA, 2042 bp, Zea Mays
gctatcccccaccgcccaccggccgccccctctgctgctgccagcaagacgagccttcgaaccttccagttccatccatcgccgccctcctcctgaggagcatccgaaacaagagcagcggcagccgccaacgcccgcgcccgccatcccgacgatgcgccgacccacactctcgctcgcgctcgggctcgggctcgggctctccctcgtcgccctcttcgcggcccggggcgcccacgcctcaatccacgagtacggcggcggcgacttcgcgccgcgggccaactccttcttcttccacggtgggagcgaggggctctacgcgtctgaccactcgtccaactcctccgcatccttcatcagatttgacaccgttgtatttcgtcgcaccctggagtcagcatctaggcatgaggagatgcaacaaaagacaggattggtggaggctataattgttgagatacaggatagaggcaaaattggaggttcatatctgcactctgatgcaatatgttgcacacctgagcttgataaggagaaatcttgtagagtaggtgaggtgatcatacgtccaaatcctgagaaccccgactggcctaagaggatccagacattctttgatggtaaaaatgaagaaaccactatggtaactcaaattgtgtcgataaacaaaactgggatgtattacctctattttatgttctgtgatcctcaacttaagggattgaagattacaggaagaactgtttggagaaatccacagggttaccttcctggtaaaatggctccaatgatgacattttatggtttcatgtcacttgcatatcttgtacttggacttctatggttcattcagtttgtgcgatgctggaaggacattttgcagctgcattaccatataacagctgttattgctcttggcatgtgtgaaatggctttttggtattttgagtatgctaactttaattcaactggaacaagacctatgggcattaccttgtgggcagttacatttacagctgtgaagaagactgtttctcggcttcttctattagtagtttcaatgggctatggtgttgttctacccacattgggtggcataacatcaagagttgctgctcttggtttcatctattttgttgcttcagaagctcttgaacttgttgaaaatctgggaaatatcaatgacttctctggaaagacaaggctattcctagtgttgcctgtcgctgtacttgatgctacctttatcatctggatattttcatccctctctagaactttggagaagctgcagctgcggagaagcatggcaaaacttgaattatatagaaagtttacaaattctctggctgtgtcagtgcttatctcaatcgcttggattggctacgagctatatttcaatgcaactgacccgttgagtgaactttggcaacgggcttggatcatcccctccttttggaatgtcctttcctatgccctcctcggcatcatatgcatcctttggtctccatctcgcaatccaacagggtttgcatattcagaggatgcaggtgagggagctgatgaggaagggctctctctagtaggcagtgcggtgaaaggaaccggagatatggtaaacatgcatatctttccggaggataagcgtgcatgataagttttggcctgaatgcagctgtactcctggcagaatgctatgtgaagtacctttttcctctggattcacgacttagctgacatcttctaaagattgcgtaagattccagatgtacaggtggtgacttgtgttgaacgatttgaccaagagatgtttacttcagttgtggctacccaatacaaaaaggtcggcaaaataaactatcactgagagcataagagggtttgtctttgtaatccttgtgatggtgacgtagctcgtaggtgattgaaatgtatcattcccagagctgagatgtactcactccgttccaaattaaaattcgtttttctttttattagatttatacaataatgtatgtgttatatatatatatattcat

SEQ ID NO: 7513 - DNA, 2119 bp, Zea Mays
gctatcccccaccgcccaccggccgccccctctgctgctgccagcaagacgagccttcgaaccttccagttccatccatcgccgccctcctcctgaggagcatccgaaacaagagcagcggcagccgccaacgcccgcgcccgccatcccgacgatgcgccgacccacactctcgctcgcgctcgggctcgggctcgggctctccctcgtcgccctcttcgcggcccggggcgcccacgcctcaatccacgagtacggcggcggcgacttcgcgccgcgggccaactccttcttcttccacggtgggagcgaggggctctacgcgtctgaccactcgtccaactcctccgcatccttcatcagatttgacaccgttgtatttcgtcgcaccctggagtcagcatctaggcatgaggagatgcaacaaaagacaggattggtggaggctataattgttgagatacaggatagaggcaaaattggaggttcatatctgcactctgatgcaatatgttgcacacctgagcttgataaggagaaatcttgtagagtaggtgaggtgatcatacgtccaaatcctgagaaccccgactggcctaagaggatccagacattctttgatggtaaaaatgaagaaaccactatggtaactcaaattgtgtcgataaacaaaactgggatgtattacctctattttatgttctgtgatcctcaacttaagggattgaagattacaggaagaactgtttggagaaatccacagggttaccttcctggtaaaatggctccaatgatgacattttatggtttcatgtcacttgcatatcttgtacttggacttctatggttcattcagtttgtgcgatgctggaaggacattttgcagctgcattaccatataacagctgttattgctcttggcatgtgtgaaatggctttttggtattttgagtatgctaactttaattcaactggaacaagacctatgggcattaccttgtgggcagttacatttacagctgtgaagaagactgtttctcggcttcttctattagtagtttcaatgggctatggtgttgttctacccacattgggtggcataacatcaagagttgctgctcttggtttcatctattttgttgcttcagaagctcttgaacttgttgaaaatctgggaaatatcaatgacttctctggaaagacaaggctattcctagtgttgcctgtcgctgtacttgatgctacctttatcatctggatattttcatccctctctagaactttggagaagctgcagctgcggagaagcatggcaaaacttgaattatatagaaagtttacaaattctctggctgtatatgataaaacggtcaaaggcaatggaaagcaattgcatcatgggaatgagcggaggagcaagagccaagttttatgtcgttttccctcttctatgtggtgatcataaaatagctatatttcaatgcaactgacccgttgagtgaactttggcaacgggcttggatcatcccctccttttggaatgtcctttcctatgccctcctcggcatcatatgcatcctttggtctccatctcgcaatccaacagggtttgcatattcagaggatgcaggtgagggagctgatgaggaagggctctctctagtaggcagtgcggtgaaaggaaccggagatatggtaaacatgcatatctttccggaggataagcgtgcatgataagttttggcctgaatgcagctgtactcctggcagaatgctatgtgaagtacctttttcctctggattcacgacttagctgacatcttctaaagattgcgtaagattccagatgtacaggtggtgacttgtgttgaacgatttgaccaagagatgtttacttcagttgtggctacccaatacaaaaaggtcggcaaaataaactatcactgagagcataagagggtttgtctttgtaatccttgtgatggtgacgtagctcgtaggtgattgaaatgtatcattcccagagctgagatgtactcactccgttccaaattaaaattcgtttttctttttattagatttatacaataatgtatgtgttatatatatatatattcat

SEQ ID NO: 7514 - DNA, 2060 bp, Zea Mays
gctatcccccaccgcccaccggccgccccctctgctgctgccagcaagacgagccttcgaaccttccagttccatccatcgccgccctcctcctgaggagcatccgaaacaagagcagcggcagccgccaacgcccgcgcccgccatcccgacgatgcgccgacccacactctcgctcgcgctcgggctcgggctcgggctctccctcgtcgccctcttcgcggcccggggcgcccacgcctcaatccacgagtacggcggcggcgacttcgcgccgcgggccaactccttcttcttccacggtgggagcgaggggctctacgcgtctgaccactcgtccaactcctccgcatccttcatcagatttgacaccgttgtatttcgtcgcaccctggagtcagcatctaggcatgaggagatgcaacaaaagacaggattggtggaggctataattgttgagatacaggatagaggcaaaattggaggttcatatctgcactctgatgcaatatgttgcacacctgagcttgataaggagaaatcttgtagagtaggtgaggtgatcatacgtccaaatcctgagaaccccgactggcctaagaggatccagacattctttgatggtaaaaatgaagaaaccactatggtaactcaaattgtgtcgataaacaaaactgggatgtattacctctattttatgttctgtgatcctcaacttaagggattgaagattacaggaagaactgtttggagaaatccacagggttaccttcctggtaaaatggctccaatgatgacattttatggtttcatgtcacttgcatatcttgtacttggacttctatggttcattcagtttgtgcgatgctggaaggacattttgcagctgcattaccatataacagctgttattgctcttggcatgtgtgaaatggctttttggtattttgagtatgctaactttaattcaactggaacaagacctatgggcattaccttgtgggcagttacatttacagctgtgaagaagactgtttctcggcttcttctattagtagtttcaatgggctatggtgttgttctacccacattgggtggcataacatcaagagttgctgctcttggtttcatctattttgttgcttcagaagctcttgaacttgttgaaaatctgggaaatatcaatgacttctctggaaagacaaggctattcctagtgttgcctgtcgctgtacttgatgctacctttatcatctggatattttcatccctctctagaactttggagaagctgcagatatgataaaacggtcaaaggcaatggaaagcaattgcatcatgggaatgagcggaggagcaagagccaagttttatgtcgttttccctcttctatgtggtgatcataaaatagctatatttcaatgcaactgacccgttgagtgaactttggcaacgggcttggatcatcccctccttttggaatgtcctttcctatgccctcctcggcatcatatgcatcctttggtctccatctcgcaatccaacagggtttgcatattcagaggatgcaggtgagggagctgatgaggaagggctctctctagtaggcagtgcggtgaaaggaaccggagatatggtaaacatgcatatctttccggaggataagcgtgcatgataagttttggcctgaatgcagctgtactcctggcagaatgctatgtgaagtacctttttcctctggattcacgacttagctgacatcttctaaagattgcgtaagattccagatgtacaggtggtgacttgtgttgaacgatttgaccaagagatgtttacttcagttgtggctacccaatacaaaaaggtcggcaaaataaactatcactgagagcataagagggtttgtctttgtaatccttgtgatggtgacgtagctcgtaggtgattgaaatgtatcattcccagagctgagatgtactcactccgttccaaattaaaattcgtttttctttttattagatttatacaataatgtatgtgttatatatatatatattcat

SEQ ID NO: 7515 - DNA, 1829 bp, Zea Mays
gctatcccccaccgcccaccggccgccccctctgctgctgccagcaagacgagccttcgaaccttccagttccatccatcgccgccctcctcctgaggagcatccgaaacaagagcagcggcagccgccaacgcccgcgcccgccatcccgacgatgcgccgacccacactctcgctcgcgctcgggctcgggctcgggctctccctcgtcgccctcttcgcggcccggggcgcccacgcctcaatccacgagtacggcggcggcgacttcgcgccgcgggccaactccttcttcttccacggtgggagcgaggggctctacgcgtctgaccactcgtccaactcctccgcatccttcatcagatttgacaccgttgtatttcgtcgcaccctggagtcagcatctaggcatgaggagatgcaacaaaagacaggattggtggaggctataattgttgagatacaggatagaggcaaaattggaggttcatatctgcactctgatgcaatatgttgcacacctgagcttgataaggagaaatcttgtagagtaggtgaggtgatcatacgtccaaatcctgagaaccccgactggcctaagaggatccagacattctttgatggtaaaaatgaagaaaccactatggtaactcaaattgtgtcgataaacaaaactgggatgtattacctctattttatgttctgtgatcctcaacttaagggattgaagattacaggaagaactgtttggagaaatccacagggttaccttcctggtaaaatggctccaatgatgacattttatggtttcatgtcacttgcatatcttgtacttggacttctatggttcattcagtttgtgcgatgctggaaggacattttgcagctgcattaccatataacagctgttattgctcttggcatgtgtgaaatggctttttggtattttgagtatgctaactttaattcaactggaacaagacctatgggcattaccttgtgggcagttacatttacagctgtgaagaagactgtttctcggcttcttctattagtagtttcaatgggctatggtgttgttctacccacattgggtggcataacatcaagagttgctgctcttggtttcatctattttgttgcttcagaagctcttgaacttgttgaaaatctgggaaatatcaatgacttctctggaaagacaaggctattcctagtgttgcctgtcgctgtacttgatgctacctttatcatctggatattttcatccctctctagaactttggagaagctgcagctgcggagaagcatggcaaaacttgaattatatagaaagtttacaaattctctggctgtgtcagtgcttatctcaatcgcttggattggctacgaggtatcttttatcaactctaaagttcatttatgtggtccatgtaatgtagatatgataaaacggtcaaaggcaatggaaagcaattgcatcatgggaatgagcggaggagcaagagccaagttttatgtcgttttccctcttctatgtggtgatcataaaatagctatatttcaatgcaactgacccgttgagtgaactttggcaacgggcttggatcatcccctccttttggaatgtcctttcctatgccctcctcggcatcatatgcatcctttggtctccatctcgcaatccaacaggttaccctgtgaagaaggcagcacaagcatatattctgaaacagatttacaaacgtattctttataatattcataatgaactttgctgtaaagcaacttctatcttccatgaagatgttccctgttcaactatatat

SEQ ID NO: 7516 - DNA, 1830 bp, Zea Mays
gctatcccccaccgcccaccggccgccccctctgctgctgccagcaagacgagccttcgaaccttccagttccatccatcgccgccctcctcctgaggagcatccgaaacaagagcagcggcagccgccaacgcccgcgcccgccatcccgacgatgcgccgacccacactctcgctcgcgctcgggctcgggctcgggctctccctcgtcgccctcttcgcggcccggggcgcccacgcctcaatccacgagtacggcggcggcgacttcgcgccgcgggccaactccttcttcttccacggtgggagcgaggggctctacgcgtctgaccactcgtccaactcctccgcatccttcatcagatttgacaccgttgtatttcgtcgcaccctggagtcagcatctaggcatgaggagatgcaacaaaagacaggattggtggaggctataattgttgagatacaggatagaggcaaaattggaggttcatatctgcactctgatgcaatatgttgcacacctgagcttgataaggagaaatcttgtagagtaggtgaggtgatcatacgtccaaatcctgagaaccccgactggcctaagaggatccagacattctttgatggtaaaaatgaagaaaccactatggtaactcaaattgtgtcgataaacaaaactgggatgtattacctctattttatgttctgtgatcctcaacttaagggattgaagattacaggaagaactgtttggagaaatccacagggttaccttcctggtaaaatggctccaatgatgacattttatggtttcatgtcacttgcatatcttgtacttggacttctatggttcattcagtttgtgcgatgctggaaggacattttgcagctgcattaccatataacagctgttattgctcttggcatgtgtgaaatggctttttggtattttgagtatgctaactttaattcaactggaacaagacctatgggcattaccttgtgggcagttacatttacagctgtgaagaagactgtttctcggcttcttctattagtagtttcaatgggctatggtgttgttctacccacattgggtggcataacatcaagagttgctgctcttggtttcatctattttgttgcttcagaagctcttgaacttgttgaaaatctgggaaatatcaatgacttctctggaaagacaaggctattcctagtgttgcctgtcgctgtacttgatgctacctttatcatctggatattttcatccctctctagaactttggagaagctgcagatatgataaaacggtcaaaggcaatggaaagcaattgcatcatgggaatgagcggaggagcaagagccaagttttatgtcgttttccctcttctatgtggtgatcataaaataggtttggagatgtccatagacacttcattttagccattgtaatcatagatctgcttgataaatgtttgagaaaaaaaccctaaaacagtacctttttttctgcaattcatattgactatggcctggcttgtttttgtcttgaatcagctatatttcaatgcaactgacccgttgagtgaactttggcaacgggcttggatcatcccctccttttggaatgtcctttcctatgccctcctcggcatcatatgcatcctttggtctccatctcgcaatccaacaggttaccctgtgaagaaggcagcacaagcatatattctgaaacagatttacaaacgtattctttataatattcataatgaactttgctgtaaagcaacttctatcttccatgaagatgttccctgttcaactatatat

SEQ ID NO: 7517 - DNA, 5352 bp, Zea Mays
gccacacgcacggctccatccttctgtccacgctcgcgccgccagggcgctcgagctcgccgtcgtcatctcgtcgggccgccgcctcgcagcttcgcccgcggctctggtccgcgccccgccaaggcccagccccaagctgccagcggcctccggcgttgctcgccgctcactgcgcgccgtctcgcgctctcgcgccctcgcccagtcctgctctcccttcgtcgctccgcggctccgccggcgtctgggcatccggccttcgggctttggtggcgccccccaccggccaccggcccaccccagcgggcagcggccactgcaactctgcggctctgccaggaacaaggaggaacagtggcgattctgccagggacagggaggagcagtggcagacaacgtccttccttttgtttggcccggggcttcggaattatctggagccgctactgcccccagcgttcggactcccgggtcgcaggcagccacgtctcgtcctggctctgggctcgccgcgctatcgtctcggccattcgctccgacgtccgtattcaatagatttgccctactcgtgaccacgagaatccggcgaggagggagaccgctcgtgcggagtctataatggctgacgggcagcatattcaggcagcatcagaggaagtggattcaatccacttcagcttctatagtgatgatgaaattaagaggatcagcattaaaaagatcaccaagtcggagcgccttgatgccaaaaaccttcctgtgccaggtggattactggaccctgcaatgggacctatcaatgatattgatatctgcaagagttgtggtcagcattctgttcgttgccctggtcacttcggtcatattgagttggcaaaaccattgttcaatcctttgctgtttatgagtctgaaaaaccttctccatgtcacgtgtttccattgtcacaagttccgcctgaacaaggaacaggttgacagatatgtgaatgaacttgaacttttagtaaagggtgatattgtctgtgctaaaaatttggaagactcagtagaagaagcatatctttccaaggaagatgaaaacatgaacaagaccacttcaggtgataactcatcttctgtgaaagacaagaaaacctggacatctatccaattgaaagaggttttgtctattttttccaagataatgaaaaagagacagaagaagtgtgcaaaatgtgacatgaagagcccaacaatctcaagtcctatatttggttggctggtcaaggacacaaaggcttctgctgtaagaacaaatgcaattgctgattttaaactcaagggagatggtgatattcacaactcaggggaaacaggggtttctggtcttgaggaagagtcatcttcacctggaatggtgtctaaagactcaatcaatgaagttagaggtctttctgatgatacaattaaagaattggtagcatcatcaggaaaaaaacatctattgcctacagaggttgaatctattctcaaggacttgtggaaaaatgaagctaggttctgcatgttactttgtgatttccagaagaatatgtcaagtgaaccagaaaagagaaggggctatgaaatgttcttcttgagtagtctccttgtggcaccaaatagattccgcccatcaactagctctagtcttggaattatggaacatcctcaaagtgttctgctaagtaaagtgcaagaatccaatcttgcgctacaacataacaatgcatcttctaaccatatggatgttcttcaaagatggatggatctacaacggagtgtaaatgtgctatatgatagtagcaaaggccttgcaagaagcgagaagaatgctcatggtatacgccagctattggaaaagaaagaaggaattcttcgacaaaagatgatggggaagagggttaattatgcatgccgatctgttatatctccagatccgtacttggctgttaatgaaattggcattcctcctgtttttgcgacacgattgacatatcctgagaaagtaacaccctggaataccaaaaggctccaagaagctataaggaatggtgccgatatacatccaggtgcaacacattacagggacaacaatagcatgtataagttacaggcagtccctgccaaacgccgttccattgctaagatgctacctgcatctagaggatcaatttgtcagccagggagagatcctaattgtgagtttgaaagcaaggttgtatatcggcatcttcaagatggtgacattgtacttgtcaataggcagcctactcttcacaagcccagcatgatggctcattttgttcgggtgttacctggagaaaagacgttacgaatgcactacgccaattgcagcacctacaatgctgattttgacggagatgagatgaatgttcatgttccgcaagatgaaatatctcgtgctgaggccatgaatattgttgacgcaaacaagcaatacattggtcctaggagtggggatgctgtcagaggtctcatacaggaccacattgttggtgctgtactattgacaaaaccagacacattgctaagccgtgaagaatatagtcagcttgtctttgggtcttgtgtgccgtcctcaaattgtggctctcatcaccctgctaaggtgtctgctattgaggattacgatacacttgaacttgtccatcctgctatttggaagccaaggcccttatggacaggaaaacaggttataacaaccatcttgaatcatttaacaaaaggttgtcctccatttactgtggagcagaagggaaaaataccaaaagaatatctgaaagaagatccttccgctcaaaaggaaaaagaagatccttccgctcgaaaagaagctcattctgctaaaaaaggaaaacgagaagatccttccgctcaaaaagaaaaagattcttcagttaataaagaaaaacaagagaagatacaaaaacaaaaacaaaaagatcgttctgaactggtcttatatattcacaataatgagctcataaagggcataatagacaaggcccagtttgggaagtatgggatagttcatacagttcatgaactctatggtgcatatacagctgggatactgctctcgacattcagccgcttatttacactgttcttgcagttgcatgggtttacttgtggggtagatgacctgctactattgccagagaaggataaactgagaagtaaaattcttagtggaagcgaagtgcgtagtaatgaagtccactggaaatttactggagctgacgaagatcataaaggtgatctggtaaaattgcatatggaggttgagaaggctgtaagaagtaacggtgaatcggacacggctaccttggacaatgatatgaaaaatgctctaaatgggataacaaccgacgtcaataaaatattatttcctgatggtctacaaaagccctttcctggaaattgtctctctcttatgactacaactggagctaaaggtggtccggttaacatgaatcaaatatcatcattactaggccagcaagagctagaaggaaagcgtgttccacggatggtttctgggaagactttaccgtgctttccgccatgggatatttcttcaagagctggtggctttatcagtgatcgatttttaactggtctgcgtcctcaagagtattactttcactgtatggcaggcagagaggggtaactgttacaggcatttcaagttttgcattacatgggtatccaatatccatgcatcttcacaccctaaactatatgtatatggattggttggctacatctttctgaagaataaatgattgtcatatattcttaaattggttggttgacacagcagtcaaaacatcccgtagtggataccttcagcgttgtcttatcaaatgtctggaatcgttgaaagtctcctatgatcacacggttcgggatgctgatggatcaattgtacagttctgctatggagaagatggagttgatgtgctgaaaactagctttctgaacgagttcaaagaacttgctgataacagaaaagctgtccttgccaagctcggtggctgcagtaaggatcccacattatcaaaatgtaatggatacattactgaactgcctcctaaattgattgataaagcggaagagtttcttaagcattcaaaggaatgctgtcgttacaacattgaggcaaaggaattaaaggagttacttaaagtcaagttcctatccagtcttgtagatcctggtgaggctgttggtgtggttgctgctcagtcaataggagaaccttctacgcagatgacgctcaacacttttcatcttgctggaaggggtgacatgaatgtaactcttggtataccccggctgaaagaaatactgatgactgcatcagataatattaggacgcctgttatgaagtgtcctttgctcgaacatatttctgaggatgatgctaaaatggtggttgcaaagcttaggagggttcgtgtggctgatgtagtggagaaaattgaagtctgcacagttcctttttacaactctaatgggcgtgtttcaaccctgtacaagttacagatgaaactctatccacaagaccagcttgagtcaggtcttactatagatgagtgtcaggcaaccttgagaacagtttttgttgaggcaatggaacatgcaattgaaaagcatctagatctgctatacaaaataaatgaaatccgtgctgttaagatagaagatacagagggctcattattaaatggtgatgaagaatctcaaagtagacatgctgatggaggagacactggtactagtgatgatgacgatcaaaatgataatgatgttgacttgggaactgatgcagaaaagatgaaacggcaagagaaagatgagatggagtatgatgatgatactgaaaccgaggagggaatgggtagcgaatctgaggagagcgatgaggatccagctgagtcaggtgatgattcacaagaggctgacaaagaacacacgatctcgaagtctgagacgacttcagtggatgacctgccatattctgtaaaaaaggggaaaaaatcaaaagatgatcgtggaacagctaaactagaagagaaaaatcaaaatgagggaagattagatgaccagaaacagggtcaaataaagaagcgcaggaaaaagttaaaacatactatccatgttgaatccagtgatttggattttgagattcactatgcctttcatgatgaacctcatattttactagctcagttgttgatgtgcaggggcggaccgtccgggttaggagcgcggaccgtccgcaattggcaaaaagtgg

SEQ ID NO: 7518 - DNA, 3758 bp, Zea Mays
gcaacgactgctatgcaagcagtccttctgtgcaagcgtgcaagcaaaccatctgatccatcagattacgatccaaccacagatacaaccatgaaagtaacaccctggaataccaaaaggctccaagaagctataaggaatggtgccgatatacatccaggtgcaacacattacagggacaacaatagcatgtataagttacaggcagtccctgccaaacgccgttccattgctaagatgctacctgcatctagaggatcaatttgtcagccagggagagatcctaattgtgagtttgaaagcaaggttgtatatcggcatcttcaagatggtgacattgtacttgtcaataggcagcctactcttcacaagcccagcatgatggctcattttgttcgggtgttacctggagaaaagacgttacgaatgcactacgccaattgcagcacctacaatgctgattttgacggagatgagatgaatgttcatgttccgcaagatgaaatatctcgtgctgaggccatgaatattgttgacgcaaacaagcaatacattggtcctaggagtggggatgctgtcagaggtctcatacaggaccacattgttggtgctgtactattgacaaaaccagacacattgctaagccgtgaagaatatagtcagcttgtctttgggtcttgtgtgccgtcctcaaattgtggctctcatcaccctgctaaggtgtctgctattgaggattacgatacacttgaacttgtccatcctgctatttggaagccaaggcccttatggacaggaaaacaggttataacaaccatcttgaatcatttaacaaaaggttgtcctccatttactgtggagcagaagggaaaaataccaaaagaatatctgaaagaagatccttccgctcaaaaggaaaaagaagatccttccgctcgaaaagaagctcattctgctaaaaaaggaaaacgagaagatccttccgctcaaaaagaaaaagattcttcagttaataaagaaaaacaagagaagatacaaaaacaaaaacaaaaagatcgttctgaactggtcttatatattcacaataatgagctcataaagggcataatagacaaggcccagtttgggaagtatgggatagttcatacagttcatgaactctatggtgcatatacagctgggatactgctctcgacattcagccgcttatttacactgttcttgcagttgcatgggtttacttgtggggtagatgacctgctactattgccagagaaggataaactgagaagtaaaattcttagtggaagcgaagtgcgtagtaatgaagtccactggaaatttactggagctgacgaagatcataaaggtgatctggtaaaattgcatatggaggttgagaaggctgtaagaagtaacggtgaatcggacacggctaccttggacaatgatatgaaaaatgctctaaatgggataacaaccgacgtcaataaaatattatttcctgatggtctacaaaagccctttcctggaaattgtctctctcttatgactacaactggagctaaaggtggtccggttaacatgaatcaaatatcatcattactaggccagcaagagctagaaggaaagcgtgttccacggatggtttctgggaagactttaccgtgctttccgccatgggatatttcttcaagagctggtggctttatcagtgatcgatttttaactggtctgcgtcctcaagagtattactttcactgtatggcaggcagagaggggttggttgacacagcagtcaaaacatcccgtagtggataccttcagcgttgtcttatcaaatgtctggaatcgttgaaagtctcctatgatcacacggttcgggatgctgatggatcaattgtacagttctgctatggagaagatggagttgatgtgctgaaaactagctttctgaacgagttcaaagaacttgctgataacagaaaagctgtccttgccaagctcggtggctgcagtaaggatcccacattatcaaaatgtaatggatacattactgaactgcctcctaaattgattgataaagcggaagagtttcttaagcattcaaaggaatgctgtcgttacaacattgaggcaaaggaattaaaggagttacttaaagtcaagttcctatccagtcttgtagatcctggtgaggctgttggtgtggttgctgctcagtcaataggagaaccttctacgcagatgacgctcaacacttttcatcttgctggaaggggtgacatgaatgtaactcttggtataccccggctgaaagaaatactgatgactgcatcagataatattaggacgcctgttatgaagtgtcctttgctcgaacatatttctgaggatgatgctaaaatggtggttgcaaagcttaggagggttcgtgtggctgatgtagtggagaaaattgaagtctgcacagttcctttttacaactctaatgggcgtgtttcaaccctgtacaagttacagatgaaactctatccacaagaccagcttgagtcaggtcttactatagatgagtgtcaggcaaccttgagaacagtttttgttgaggcaatggaacatgcaattgaaaagcatctagatctgctatacaaaataaatgaaatccgtgctgttaagatagaagatacagagggctcattattaaatggtgatgaagaatctcaaagtagacatgctgatggaggagacactggtactagtgatgatgacgatcaaaatgataatgatgttgacttgggaactgatgcagaaaagatgaaacggcaagagaaagatgagatggagtatgatgatgatactgaaaccgaggagggaatgggtagcgaatctgaggagagcgatgaggatccagctgagtcaggtgatgattcacaagaggctgacaaagaacacacgatctcgaagtctgagacgacttcagtggatgacctgccatattctgtaaaaaaggggaaaaaatcaaaagatgatcgtggaacagctaaactagaagagaaaaatcaaaatgagggaagattagatgaccagaaacagggtcaaataaagaagcgcaggaaaaagttaaaacatactatccatgttgaatccagtgatttggattttgagattcactatgcctttcatgatgaacctcatattttactagctcagccgttgatgtgcaggggtagaccgtccgggcgtggagcgtggaccgtccatggttggcagaaagtgggcaatgactaagaagtgattggtgtctataaatacaaccccaaccacctccattcacttcatccaagcatcccattcattctcattcaatacaagagcaagcacttcatttcaagacacattcaaagcttccaaactccttcaagtgttataatagtgactagtgatcattagtgattagtgccttggaaagtctagagagagtgtgatcttgtgattttcttgttgattggctttcttaatcgtgctttcttcatctccttctaaactctcaagtgacttgtaaagttagcaagagacacctaattgtgtggtgatccttgcggggtctaagtgaccctcgagattaagaagaagcactcaaccggtctaagtgaccttttgagagagggaaagggttgaaagagacccgacctacgtggcctcctcaacggggggtaggttctttggaatcaaacctctggaaacaaagtgtctttgtg

SEQ ID NO: 7519 - DNA, 4983 bp, Zea Mays
gcaacgactgctatgcaagcagtccttctgtgcaagcgtgcaagcaaaccatctgatccatcagattacgatccaaccacagatacaaccatgaaagtaacaccctggaataccaaaaggctccaagaagctataaggaatggtgccgatatacatccaggtgcaacacattacagggacaacaatagcatgtataagttacaggcagtccctgccaaacgccgttccattgctaagatgctacctgcatctagaggatcaatttgtcagccagggagagatcctaattgtgagtttgaaagcaaggttgtatatcggcatcttcaagatggtgacattgtacttgtcaataggcagcctactcttcacaagcccagcatgatggctcattttgttcgggtgttacctggagaaaagacgttacgaatgcactacgccaattgcagcacctacaatgctgattttgacggagatgagatgaatgttcatgttccgcaagatgaaatatctcgtgctgaggccatgaatattgttgacgcaaacaagcaatacattggtcctaggagtggggatgctgtcagaggtctcatacaggtgtctgctattgaggattacgatacacttgaacttgtccatcctgctatttggaagccaaggcccttatggacaggaaaacaggttataacaaccatcttgaatcatttaacaaaaggttgtcctccatttactgtggagcagaagggaaaaataccaaaagaatatctgaaagaagatccttccgctcaaaaggaaaaagaagatccttccgctcgaaaagaagctcattctgctaaaaaaggaaaacgagaagatccttccgctcaaaaagaaaaagattcttcagttaataaagaaaaacaagagaagatacaaaaacaaaaacaaaaagatcgttctgaactggtcttatatattcacaataatgagctcataaagggcataatagacaaggcccagtttgggaagtatgggatagttcatacagttcatgaactctatggtgcatatacagctgggatactgctctcgacattcagccgcttatttacactgttcttgcagttgcatgggtttacttgtggggtagatgacctgctactattgccagagaaggataaactgagaagtaaaattcttagtggaagcgaagtgcgtagtaatgaagtccactggaaatttactggagctgacgaagatcataaaggtgatctggtaaaattgcatatggaggttgagaaggctgtaagaagtaacggtgaatcggacacggctaccttggacaatgatatgaaaaatgctctaaatgggataacaaccgacgtcaataaaatattatttcctgatggtctacaaaagccctttcctggaaattgtctctctcttatgactacaactggagctaaaggtggtccggttaacatgaatcaaatatcatcattactaggccagcaagagctagaaggaaagcgtgttccacggatggtttctgggaagactttaccgtgctttccgccatgggatatttcttcaagagctggtggctttatcagtgatcgatttttaactggtctgcgtcctcaagagtattactttcactgtatggcaggcagagaggggttggttgacacagcagtcaaaacatcccgtagtggataccttcagcgttgtcttatcaaatgtctggaatcgttgaaagtctcctatgatcacacggttcgggatgctgatggatcaattgtacagttctgctatggagaagatggagttgatgtgctgaaaactagctttctgaacgagttcaaagaacttgctgataacagaaaagctgtccttgccaagctcggtggctgcagtaaggatcccacattatcaaaatgtaatggatacattactgaactgcctcctaaattgattgataaagcggaagagtttcttaagcattcaaaggaatgctgtcgttacaacattgaggcaaaggaattaaaggagttacttaaagtcaagttcctatccagtcttgtagatcctggtgaggctgttggtgtggttgctgctcagtcaataggagaaccttctacgcagatgacgctcaacacttttcatcttgctggaaggggtgacatgaatgtaactcttggtataccccggctgaaagaaatactgatgactgcatcagataatattaggacgcctgttatgaagtgtcctttgctcgaacatatttctgaggatgatgctaaaatggtggttgcaaagcttaggagggttcgtgtggctgatgtagtggagaaaattgaagtctgcacagttcctttttacaactctaatgggcgtgtttcaaccctgtacaagttacagatgaaactctatccacaagaccagcttgagtcaggtcttactatagatgagtgtcaggcaaccttgagaacagtttttgttgaggcaatggaacatgcaattgaaaagcatctagatctgctatacaaaataaatgaaatccgtgctgttaagatagaagatacagagggctcattattaaatggtgatgaagaatctcaaagtagacatgctgatggaggagacactggtactagtgatgatgacgatcaaaatgataatgatgttgacttgggaactgatgcagaaaagatgaaacggcaagagaaagatgagatggagtatgatgatgatactgaaaccgaggagggaatgggtagcgaatctgaggagagcgatgaggatccagctgagtcaggtgatgattcacaagaggctgacaaagaacacacgatctcgaagtctgagacgacttcagtggatgacctgccatattctgtaaaaaaggggaaaaaatcaaaagatgatcgtggaacagctaaactagaagagaaaaatcaaaatgagggaagattagatgaccagaaacagggtcaaataaagaagcgcaggaaaaagttaaaacatactatccatgttgaatccagtgatttggattttgagattcactatgcctttcatgatgaacctcatattttactagctcagattgccaaaaagatagctaggactattcttgtgaaggcctgcaataacattgatcattgtaagatcgtcaagccaatgcacaaccatacgcgtctagagaccgccggagtgaactttgaagtggtatggaatctcagtgaatacatcagcgtcaatgacatcacatcaaatgatatccatgccatgctgaagacatacggggtggaggccgcacggggcaccatcatcaaggaagtgagcggcgtgtttgaaccctatggcatcaatgttgacatgaggcacctgagcctgatcgcagactttatgaccttggatggcggataccggcctatgaacaggctggggattggccagttcagcacctcgccatttggcaagatgacgttcgagacagcaacaaagttcattgtggatgcagccacacatggggaggcagattttctggagtgcccctcagcgagtgtctgccttgggaagcccccgaaggttgggactgggatctttgggctactgcagaatcttgaattggagcagcccaagaatatctaaaatctgcatttggtgcacgtctggccaagctgccttctgaaggttcacaagttttggtcctgtcagcctttgcacggcagaatgtgctttagtttgttacggtgtggcacgctgcatctgtggtggcttagtggcagcatgccatttcatacgggcatgctgctggaaaaactagcagaacatgtcaaataccagttagtgttctggaattctggattaatttacagcatgatagctagttgtacacatgctttagaatgccgttgttgtccagtgcttgttaagaaagaactgggtcatctttgttgccagggtctcaaaaaacaaccctgcatgacgccaaggacccaggcaccagtgttcgaattatcgacgggcagacatcatatatggatgcgatattctattgacacaatctcaggttgactgctcacctatgtactaaatctgcctaccctgtgatgtggaaattgaaatactagaagcatttgtaggacttttaattagaggactcaacagtcacttatcctagtggcttgggaggtttgaaagcactggaatgcttgcgtgtttgaaagagtcggtctttgtggttctttaaaatattggtaacgaaggcttgatgtgcggctggagcaaggaccttgtgtacctgttagtcttgttcagttatttctatgtctcgtggaagagattaaaaaattgtgaaggattttgatttgctatggattgaaatccatgtaaatctccttcaatctatatagattttgatgaaaccgaataaacccttatagagggcatgaggtaggctaggaaatcttgttaatctgatagtagaggtgtacatttaggctgtgtcttgtgggctgactcgaagcacgaaaaaagcacggcccaagacagtaataatttatgcactaaggcaactaaggaagcatggaagaactacccaacgcctgaattggagttagttgttgtagtgcatgctctaaaatttttgaggcactatccatatgtttggttccctataagtcgagacaagcatgtatgagcttagctagtattggtagaaaaagagtgagttcatgcagattcttttgtttggttgcttgtataggctcgtgcagaatagacatagactttgttatgttggttgcactgaaacgtgtattatagaagggtgtataaatagatcttcaaatattatatattataatatattataagtggtttagttttgtttacaaaaatctcagaaacataagtataaaattggttcgatgattaaatcttttaattagaagatataataaaaaagaacctcaagaagcgtctcgtttttgtgtgcct

SEQ ID NO: 7520 - DNA, 6998 bp, Zea Mays
gccacacgcacggctccatccttctgtccacgctcgcgccgccagggcgctcgagctcgccgtcgtcatctcgtcgggccgccgcctcgcagcttcgcccgcggctctggtccgcgccccgccaaggcccagccccaagctgccagcggcctccggcgttgctcgccgctcactgcgcgccgtctcgcgctctcgcgccctcgcccagtcctgctctcccttcgtcgctccgcggctccgccggcgtctgggcatccggccttcgggctttggtggcgccccccaccggccaccggcccaccccagcgggcagcggccactgcaactctgcggctctgccaggaacaaggaggaacagtggcgattctgccagggacagggaggagcagtggcagacaacgtccttccttttgtttggcccggggcttcggaattatctggagccgctactgcccccagcgttcggactcccgggtcgcaggcagccacgtctcgtcctggctctgggctcgccgcgctatcgtctcggccattcgctccgacgtccgtattcaatagatttgccctactcgtgaccacgagaatccggcgaggagggagaccgctcgtgcggagtctataatggctgacgggcagcatattcaggcagcatcagaggaagtggattcaatccacttcagcttctatagtgatgatgaaattaagaggatcagcattaaaaagatcaccaagtcggagcgccttgatgccaaaaaccttcctgtgccaggtggattactggaccctgcaatgggacctatcaatgatattgatatctgcaagagttgtggtcagcattctgttcgttgccctggtcacttcggtcatattgagttggcaaaaccattgttcaatcctttgctgtttatgagtctgaaaaaccttctccatgtcacgtgtttccattgtcacaagttccgcctgaacaaggaacaggttgacagatatgtgaatgaacttgaacttttagtaaagggtgatattgtctgtgctaaaaatttggaagactcagtagaagaagcatatctttccaaggaagatgaaaacatgaacaagaccacttcaggtgataactcatcttctgtgaaagacaagaaaacctggacatctatccaattgaaagaggttttgtctattttttccaagataatgaaaaagagacagaagaagtgtgcaaaatgtgacatgaagagcccaacaatctcaagtcctatatttggttggctggtcaaggacacaaaggcttctgctgtaagaacaaatgcaattgctgattttaaactcaagggagatggtgatattcacaactcaggggaaacaggggtttctggtcttgaggaagagtcatcttcacctggaatggtgtctaaagactcaatcaatgaagttagaggtctttctgatgatacaattaaagaattggtagcatcatcaggaaaaaaacatctattgcctacagaggttgaatctattctcaaggacttgtggaaaaatgaagctaggttctgcatgttactttgtgatttccagaagaatatgtcaagtgaaccagaaaagagaaggggctatgaaatgttcttcttgagtagtctccttgtggcaccaaatagattccgcccatcaactagctctagtcttggaattatggaacatcctcaaagtgttctgctaagtaaagtgcaagaatccaatcttgcgctacaacataacaatgcatcttctaaccatatggatgttcttcaaagatggatggatctacaacggagtgtaaatgtgctatatgatagtagcaaaggccttgcaagaagcgagaagaatgctcatggtatacgccagctattggaaaagaaagaaggaattcttcgacaaaagatgatggggaagagggttaattatgcatgccgatctgttatatctccagatccgtacttggctgttaatgaaattggcattcctcctgtttttgcgacacgattgacatatcctgagaaagtaacaccctggaataccaaaaggctccaagaagctataaggaatggtgccgatatacatccaggtgcaacacattacagggacaacaatagcatgtataagttacaggcagtccctgccaaacgccgttccattgctaagatgctacctgcatctagaggatcaatttgtcagccagggagagatcctaattgtgagtttgaaagcaaggttgtatatcggcatcttcaagatggtgacattgtacttgtcaataggcagcctactcttcacaagcccagcatgatggctcattttgttcgggtgttacctggagaaaagacgttacgaatgcactacgccaattgcagcacctacaatgctgattttgacggagatgagatgaatgttcatgttccgcaagatgaaatatctcgtgctgaggccatgaatattgttgacgcaaacaagcaatacattggtcctaggagtggggatgctgtcagaggtctcatacaggaccacattgttggtgctgtactattgacaaaaccagacacattgctaagccgtgaagaatatagtcagcttgtctttgggtcttgtgtgccgtcctcaaattgtggctctcatcaccctgctaaggtgtctgctattgaggattacgatacacttgaacttgtccatcctgctatttggaagccaaggcccttatggacaggaaaacaggttataacaaccatcttgaatcatttaacaaaaggttgtcctccatttactgtggagcagaagggaaaaataccaaaagaatatctgaaagaagatccttccgctcaaaaggaaaaagaagatccttccgctcgaaaagaagctcattctgctaaaaaaggaaaacgagaagatccttccgctcaaaaagaaaaagattcttcagttaataaagaaaaacaagagaagatacaaaaacaaaaacaaaaagatcgttctgaactggtcttatatattcacaataatgagctcataaagggcataatagacaaggcccagtttgggaagtatgggatagttcatacagttcatgaactctatggtgcatatacagctgggatactgctctcgacattcagccgcttatttacactgttcttgcagagaaggataaactgagaagtaaaattcttagtggaagcgaagtgcgtagtaatgaagtccactggaaatttactggagctgacgaagatcataaaggtgatctggtaaaattgcatatggaggttgagaaggctgtaagaagtaacggtgaatcggacacggctaccttggacaatgatatgaaaaatgctctaaatgggataacaaccgacgtcaataaaatattatttcctgatggtctacaaaagccctttcctggaaattgtctctctcttatgactacaactggagctaaaggtggtccggttaacatgaatcaaatatcatcattactaggccagcaagagctagaaggaaagcgtgttccacggatggtttctgggaagactttaccgtgctttccgccatgggatatttcttcaagagctggtggctttatcagtgatcgatttttaactggtctgcgtcctcaagagtattactttcactgtatggcaggcagagaggggttggttgacacagcagtcaaaacatcccgtagtggataccttcagcgttgtcttatcaaatgtctggaatcgttgaaagtctcctatgatcacacggttcgggatgctgatggatcaattgtacagttctgctatggagaagatggagttgatgtgctgaaaactagctttctgaacgagttcaaagaacttgctgataacagaaaagctgtccttgccaagctcggtggctgcagtaaggatcccacattatcaaaatgtaatggatacattactgaactgcctcctaaattgattgataaagcggaagagtttcttaagcattcaaaggaatgctgtcgttacaacattgaggcaaaggaattaaaggagttacttaaagtcaagttcctatccagtcttgtagatcctggtgaggctgttggtgtggttgctgctcagtcaataggagaaccttctacgcagatgacgctcaacacttttcatcttgctggaaggggtgacatgaatgtaactcttggtataccccggctgaaagaaatactgatgactgcatcagataatattaggacgcctgttatgaagtgtcctttgctcgaacatatttctgaggatgatgctaaaatggtggttgcaaagcttaggagggttcgtgtggctgatgtagtggagaaaattgaagtctgcacagttcctttttacaactctaatgggcgtgtttcaaccctgtacaagttacagatgaaactctatccacaagaccagcttgagtcaggtcttactatagatgagtgtcaggcaaccttgagaacagtttttgttgaggcaatggaacatgcaattgaaaagcatctagatctgctatacaaaataaatgaaatccgtgctgttaagatagaagatacagagggctcattattaaatggtgatgaagaatctcaaagtagacatgctgatggaggagacactggtactagtgatgatgacgatcaaaatgataatgatgttgacttgggaactgatgcagaaaagatgaaacggcaagagaaagatgagatggagtatgatgatgatactgaaaccgaggagggaatgggtagcgaatctgaggagagcgatgaggatccagctgagtcaggtgatgattcacaagaggctgacaaagaacacacgatctcgaagtctgagacgacttcagtggatgacctgccatattctgtaaaaaaggggaaaaaatcaaaagatgatcgtggaacagctaaactagaagagaaaaatcaaaatgagggaagattagatgaccagaaacagggtcaaataaagaagcgcaggaaaaagttaaaacatactatccatgttgaatccagtgatttggattttgagattcactatgcctttcatgatgaacctcatattttactagctcagattgccaaaaagatagctaggactattcttgtgaaggcctgcaataacattgatcattgtaagatcgtcaagccaatgcacaaccatacgcgtctagagaccgccggagtgaactttgaagtggtatggaatctcagtgaatacatcagcgtcaatgacatcacatcaaatgatatccatgccatgctgaagacatacggggtggaggccgcacggggcaccatcatcaaggaagtgagcggcgtgtttgaaccctatggcatcaatgttgacatgaggcacctgagcctgatcgcagactttatgaccttggatggcggataccggcctatgaacaggctggggattggccagttcagcacctcgccatttggcaagatgacgttcgagacagcaacaaagttcattgtggatgcagccacacatggggaggcagattttctggagtgcccctcagcgagtgtctgccttgggaagcccccgaaggttgggactgggatctttgggctactgcagaatcttgaattggagcagcccaagaatatctaaaatctgcatttggtgcacgtctggccaagctgccttctgaaggttcacaagttttggtcctgtcagcctttgcacggcagaatgtgctttagtttgttacggtgtggcacgctgcatctgtggtggcttagtggcagcatgccatttcatacgggcatgctgctggaaaaactagcagaacatgtcaaataccagttagtgttctggaattctggattaatttacagcatgatagctagttgtacacatgctttagaatgccgttgttgtccagtgcttgttaagaaagaactgggtcatctttgttgccagggtctcaaaaaacaaccctgcatgacgccaaggacccaggcaccagtgttcgaattatcgacgggcagacatcatatatggatgcgatattctattgacacaatctcaggttgactgctcacctatgtactaaatctgcctaccctgtgatgtggaaattgaaatactagaagcatttgtaggacttttaattagaggactcaacagtcacttatcctagtggcttgggaggtttgaaagcactggaatgcttgcgtgtttgaaagagtcggtctttgtggttctttaaaatattggtaacgaaggcttgatgtgcggctggagcaaggaccttgtgtacctgttagtcttgttcagttatttctatgtctcgtggaagagattaaaaaattgtgaaggattttgatttgctatggattgaaatccatgtaaatctccttcaatctatatagattttgatgaaaccgaataaacccttatagagggcatgaggtaggctaggaaatcttgttaatctgatagtagaggtgtacatttaggctgtgtcttgtgggctgactcgaagcacgaaaaaagcacggcccaagacagtaataatttatgcactaaggcaactaaggaagcatggaagaactacccaacgcctgaattggagttagttgttgtagtgcatgctctaaaatttttgaggcactatccatatgtttggttccctataagtcgagacaagcatgtatgagcttagctagtattggtagaaaaagagtgagttcatgcagattcttttgtttggttgcttgtataggctcgtgcagaatagacatagactttgttatgttggttgcactgaaacgtgtattatagaagggtgtataaatagatcttcaaatattatatattataatatattataagtggtttagttttgtttacaaaaatctcagaaacataagtataaaattggttcgatgattaaatcttttaattagaagatataataaaaaagaacctcaagaagcgtctcgtttttgtgtgcct

SEQ ID NO: 7521 - DNA, 3243 bp, Zea Mays
gcaacgactgctatgcaagcagtccttctgtgcaagcgtgcaagcaaaccatctgatccatcagattacgatccaaccacagatacaaccatgaaagtaacaccctggaataccaaaaggctccaagaagctataaggaatggtgccgatatacatccaggtgcaacacattacagggacaacaatagcatgtataagttacaggcagtccctgccaaacgccgttccattgctaagatgctacctgcatctagaggatcaatttgtcagccagggagagatcctaattgtgagtttgaaagcaaggttgtatatcggcatcttcaagatggtgacattgtacttgtcaataggcagcctactcttcacaagcccagcatgatggctcattttgttcgggtgttacctggagaaaagacgttacgaatgcactacgccaattgcagcacctacaatgctgattttgacggagatgagatgaatgttcatgttccgcaagatgaaatatctcgtgctgaggccatgaatattgttgacgcaaacaagcaatacattggtcctaggagtggggatgctgtcagaggtctcatacaggaccacattgttggtgctgtactattgacaaaaccagacacattgctaagccgtgaagaatatagtcagcttgtctttgggtcttgtgtgccgtcctcaaattgtggctctcatcaccctgctaaggtgtctgctattgaggattacgatacacttgaacttgtccatcctgctatttggaagccaaggcccttatggacaggaaaacaggttataacaaccatcttgaatcatttaacaaaaggttgtcctccatttactgtggagcagaagggaaaaataccaaaagaatatctgaaagaagatccttccgctcaaaaggaaaaagaagatccttccgctcgaaaagaagctcattctgctaaaaaaggaaaacgagaagatccttccgctcaaaaagaaaaagattcttcagttaataaagaaaaacaagagaagatacaaaaacaaaaacaaaaagatcgttctgaactggtcttatatattcacaataatgagctcataaagggcataatagacaaggcccagtttgggaagtatgggatagttcatacagttcatgaactctatggtgcatatacagctgggatactgctctcgacattcagccgcttatttacactgttcttgcagttgcatgggtttacttgtggggtagatgacctgctactattgccagagaaggataaactgagaagtaaaattcttagtggaagcgaagtgcgtagtaatgaagtccactggaaatttactggagctgacgaagatcataaaggtgatctggtaaaattgcatatggaggttgagaaggctgtaagaagtaacggtgaatcggacacggctaccttggacaatgatatgaaaaatgctctaaatgggataacaaccgacgtcaataaaatattatttcctgatggtctacaaaagccctttcctggaaattgtctctctcttatgactacaactggagctaaaggtggtccggttaacatgaatcaaatatcatcattactaggccagcaagagctagaaggaaagcgtgttccacggatggtttctgggaagactttaccgtgctttccgccatgggatatttcttcaagagctggtggctttatcagtgatcgatttttaactggtctgcgtcctcaagagtattactttcactgtatggcaggcagagaggggttggttgacacagcagtcaaaacatcccgtagtggataccttcagcgttgtcttatcaaatgtctggaatcgttgaaagtctcctatgatcacacggttcgggatgctgatggatcaattgtacagttctgctatggagaagatggagttgatgtgctgaaaactagctttctgaacgagttcaaagaacttgctgataacagaaaagctgtccttgccaagctcggtggctgcagtaaggatcccacattatcaaaatgtaatggatacattactgaactgcctcctaaattgattgataaagcggaagagtttcttaagcattcaaaggaatgctgtcgttacaacattgaggcaaaggaattaaaggagttacttaaagtcaagttcctatccagtcttgtagatcctggtgaggctgttggtgtggttgctgctcagtcaataggagaaccttctacgcagatgacgctcaacacttttcatcttgctggaaggggtgacatgaatgtaactcttggtataccccggctgaaagaaatactgatgactgcatcagataatattaggacgcctgttatgaagtgtcctttgctcgaacatatttctgaggatgatgctaaaatggtggttgcaaagcttaggagggttcgtgtggctgatgtagtggagaaaattgaagtctgcacagttcctttttacaactctaatgggcgtgtttcaaccctgtacaagttacagatgaaactctatccacaagaccagcttgagtcaggtcttactatagatgagtgtcaggcaaccttgagaacagtttttgttgaggcaatggaacatgcaattgaaaagcatctagatctgctatacaaaataaatgaaatccgtgctgttaagatagaagatacagagggctcattattaaatggtgatgaagaatctcaaagtagacatgctgatggaggagacactggtactagtgatgatgacgatcaaaatgataatgatgttgacttgggaactgatgcagaaaagatgaaacggcaagagaaagatgagatggagtatgatgatgatactgaaaccgaggagggaatgggtagcgaatctgaggagagcgatgaggatccagctgagtcaggtgatgattcacaagaggctgacaaagaacacacgatctcgaagtctgagacgacttcagtggatgacctgccatattctgtaaaaaaggggaaaaaatcaaaagatgatcgtggaacagctaaactagaagagaaaaatcaaaatgagggaagattagatgaccagaaacagggtcaaataaagaagcgcaggaaaaagttaaaacatactatccatgttgaatccagtgatttggattttgagattcactatgcctttcatgatgaacctcatattttactagctcagcgtccatttcactatcgaaagctaagatactcg

SEQ ID NO: 7522 - DNA, 3233 bp, Zea Mays
gcaacgactgctatgcaagcagtccttctgtgcaagcgtgcaagcaaaccatctgatccatcagattacgatccaaccacagatacaaccatgaaagtaacaccctggaataccaaaaggctccaagaagctataaggaatggtgccgatatacatccaggtgcaacacattacagggacaacaatagcatgtataagttacaggcagtccctgccaaacgccgttccattgctaagatgctacctgcatctagaggatcaatttgtcagccagggagagatcctaattgtgagtttgaaagcaaggttgtatatcggcatcttcaagatggtgacattgtacttgtcaataggcagcctactcttcacaagcccagcatgatggctcattttgttcgggtgttacctggagaaaagacgttacgaatgcactacgccaattgcagcacctacaatgctgattttgacggagatgagatgaatgttcatgttccgcaagatgaaatatctcgtgctgaggccatgaatattgttgacgcaaacaagcaatacattggtcctaggagtggggatgctgtcagaggtctcatacaggaccacattgttggtgctgtactattgacaaaaccagacacattgctaagccgtgaagaatatagtcagcttgtctttgggtcttgtgtgccgtcctcaaattgtggctctcatcaccctgctaaggtgtctgctattgaggattacgatacacttgaacttgtccatcctgctatttggaagccaaggcccttatggacaggaaaacaggttataacaaccatcttgaatcatttaacaaaaggttgtcctccatttactgtggagcagaagggaaaaataccaaaagaatatctgaaagaagatccttccgctcaaaaggaaaaagaagatccttccgctcgaaaagaagctcattctgctaaaaaaggaaaacgagaagatccttccgctcaaaaagaaaaagattcttcagttaataaagaaaaacaagagaagatacaaaaacaaaaacaaaaagatcgttctgaactggtcttatatattcacaataatgagctcataaagggcataatagacaaggcccagtttgggaagtatgggatagttcatacagttcatgaactctatggtgcatatacagctgggatactgctctcgacattcagccgcttatttacactgttcttgcagttgcatgggtttacttgtggggtagatgacctgctactattgccagagaaggataaactgagaagtaaaattcttagtggaagcgaagtgcgtagtaatgaagtccactggaaatttactggagctgacgaagatcataaaggtgatctggtaaaattgcatatggaggttgagaaggctgtaagaagtaacggtgaatcggacacggctaccttggacaatgatatgaaaaatgctctaaatgggataacaaccgacgtcaataaaatattatttcctgatggtctacaaaagccctttcctggaaattgtctctctcttatgactacaactggagctaaaggtggtccggttaacatgaatcaaatatcatcattactaggccagcaagagctagaaggaaagcgtgttccacggatggtttctgggaagactttaccgtgctttccgccatgggatatttcttcaagagctggtggctttatcagtgatcgatttttaactggtctgcgtcctcaagagtattactttcactgtatggcaggcagagaggggttggttgacacagcagtcaaaacatcccgtagtggataccttcagcgttgtcttatcaaatgtctggaatcgttgaaagtctcctatgatcacacggttcgggatgctgatggatcaattgtacagttctgctatggagaagatggagttgatgtgctgaaaactagctttctgaacgagttcaaagaacttgctgataacagaaaagctgtccttgccaagctcggtggctgcagtaaggatcccacattatcaaaatgtaatggatacattactgaactgcctcctaaattgattgataaagcggaagagtttcttaagcattcaaaggaatgctgtcgttacaacattgaggcaaaggaattaaaggagttacttaaagtcaagttcctatccagtcttgtagatcctggtgaggctgttggtgtggttgctgctcagtcaataggagaaccttctacgcagatgacgctcaacacttttcatcttgctggaaggggtgacatgaatgtaactcttggtataccccggctgaaagaaatactgatgactgcatcagataatattaggacgcctgttatgaagtgtcctttgctcgaacatatttctgaggatgatgctaaaatggtggttgcaaagcttaggagggttcgtgtggctgatgtagtggagaaaattgaagtctgcacagttcctttttacaactctaatgggcgtgtttcaaccctgtacaagttacagatgaaactctatccacaagaccagcttgagtcaggtcttactatagatgagtgtcaggcaaccttgagaacagtttttgttgaggcaatggaacatgcaattgaaaagcatctagatctgctatacaaaataaatgaaatccgtgctgttaagatagaagatacagagggctcattattaaatggtgatgaagaatctcaaagtagacatgctgatggaggagacactggtactagtgatgatgacgatcaaaatgataatgatgttgacttgggaactgatgcagaaaagatgaaacggcaagagaaagatgagatggagtatgatgatgatactgaaaccgaggagggaatgggtagcgaatctgaggagagcgatgaggatccagctgagtcaggtgatgattcacaagaggctgacaaagaacacacgatctcgaagtctgagacgacttcagtggatgacctgccatattctgtaaaaaaggggaaaaaatcaaaagatgatcgtggaacagctaaactagaagagaaaaatcaaaatgagggaagattagatgaccagaaacagggtcaaataaagaagcgcaggaaaaagttaaaacatactatccatgttgaatccagtgatttggattttgagattcactatgcctttcatgatgaacctcatattttactagctcaggattgactacatataacttgaca

SEQ ID NO: 7523 - DNA, 5079 bp, Zea Mays
gccacacgcacggctccatccttctgtccacgctcgcgccgccagggcgctcgagctcgccgtcgtcatctcgtcgggccgccgcctcgcagcttcgcccgcggctctggtccgcgccccgccaaggcccagccccaagctgccagcggcctccggcgttgctcgccgctcactgcgcgccgtctcgcgctctcgcgccctcgcccagtcctgctctcccttcgtcgctccgcggctccgccggcgtctgggcatccggccttcgggctttggtggcgccccccaccggccaccggcccaccccagcgggcagcggccactgcaactctgcggctctgccaggaacaaggaggaacagtggcgattctgccagggacagggaggagcagtggcagacaacgtccttccttttgtttggcccggggcttcggaattatctggagccgctactgcccccagcgttcggactcccgggtcgcaggcagccacgtctcgtcctggctctgggctcgccgcgctatcgtctcggccattcgctccgacgtccgtattcaatagatttgccctactcgtgaccacgagaatccggcgaggagggagaccgctcgtgcggagtctataatggctgacgggcagcatattcaggcagcatcagaggaagtggattcaatccacttcagcttctatagtgatgatgaaattaagaggatcagcattaaaaagatcaccaagtcggagcgccttgatgccaaaaaccttcctgtgccaggtggattactggaccctgcaatgggacctatcaatgatattgatatctgcaagagttgtggtcagcattctgttcgttgccctggtcacttcggtcatattgagttggcaaaaccattgttcaatcctttgctgtttatgagtctgaaaaaccttctccatgtcacgtgtttccattgtcacaagttccgcctgaacaaggaacaggttgacagatatgtgaatgaacttgaacttttagtaaagggtgatattgtctgtgctaaaaatttggaagactcagtagaagaagcatatctttccaaggaagatgaaaacatgaacaagaccacttcaggtgataactcatcttctgtgaaagacaagaaaacctggacatctatccaattgaaagaggttttgtctattttttccaagataatgaaaaagagacagaagaagtgtgcaaaatgtgacatgaagagcccaacaatctcaagtcctatatttggttggctggtcaaggacacaaaggcttctgctgtaagaacaaatgcaattgctgattttaaactcaagggagatggtgatattcacaactcaggggaaacaggggtttctggtcttgaggaagagtcatcttcacctggaatggtgtctaaagactcaatcaatgaagttagaggtctttctgatgatacaattaaagaattggtagcatcatcaggaaaaaaacatctattgcctacagaggttgaatctattctcaaggacttgtggaaaaatgaagctaggttctgcatgttactttgtgatttccagaagaatatgtcaagtgaaccagaaaagagaaggggctatgaaatgttcttcttgagtagtctccttgtggcaccaaatagattccgcccatcaactagctctagtcttggaattatggaacatcctcaaagtgttctgctaagtaaagtgcaagaatccaatcttgcgctacaacataacaatgcatcttctaaccatatggatgttcttcaaagatggatggatctacaacggagtgtaaatgtgctatatgatagtagcaaaggccttgcaagaagcgagaagaatgctcatggtatacgccagctattggaaaagaaagaaggaattcttcgacaaaagatgatggggaagagggttaattatgcatgccgatctgttatatctccagatccgtacttggctgttaatgaaattggcattcctcctgtttttgcgacacgattgacatatcctgagaaagtaacaccctggaataccaaaaggctccaagaagctataaggaatggtgccgatatacatccaggtgcaacacattacagggacaacaatagcatgtataagttacaggcagtccctgccaaacgccgttccattgctaagatgctacctgcatctagaggatcaatttgtcagccagggagagatcctaattgtgagtttgaaagcaaggttgtatatcggcatcttcaagatggtgacattgtacttgtcaataggcagcacctacaatgctgattttgacggagatgagatgaatgttcatgttccgcaagatgaaatatctcgtgctgaggccatgaatattgttgacgcaaacaagcaatacattggtcctaggagtggggatgctgtcagaggtctcatacaggaccacattgttggtgctgtactattgacaaaaccagacacattgctaagccgtgaagaatatagtcagcttgtctttgggtcttgtgtgccgtcctcaaattgtggctctcatcaccctgctaaggtgtctgctattgaggattacgatacacttgaacttgtccatcctgctatttggaagccaaggcccttatggacaggaaaacaggttataacaaccatcttgaatcatttaacaaaaggttgtcctccatttactgtggagcagaagggaaaaataccaaaagaatatctgaaagaagatccttccgctcaaaaggaaaaagaagatccttccgctcgaaaagaagctcattctgctaaaaaaggaaaacgagaagatccttccgctcaaaaagaaaaagattcttcagttaataaagaaaaacaagagaagatacaaaaacaaaaacaaaaagatcgttctgaactggtcttatatattcacaataatgagctcataaagggcataatagacaaggcccagtttgggaagtatgggatagttcatacagttcatgaactctatggtgcatatacagctgggatactgctctcgacattcagccgcttatttacactgttcttgcagttgcatgggtttacttgtggggtagatgacctgctactattgccagagaaggataaactgagaagtaaaattcttagtggaagcgaagtgcgtagtaatgaagtccactggaaatttactggagctgacgaagatcataaaggtgatctggtaaaattgcatatggaggttgagaaggctgtaagaagtaacggtgaatcggacacggctaccttggacaatgatatgaaaaatgctctaaatgggataacaaccgacgtcaataaaatattatttcctgatggtctacaaaagccctttcctggaaattgtctctctcttatgactacaactggagctaaaggtggtccggttaacatgaatcaaatatcatcattactaggccagcaagagctagaaggaaagcgtgttccacggatggtttctgggaagactttaccgtgctttccgccatgggatatttcttcaagagctggtggctttatcagtgatcgatttttaactggtctgcgtcctcaagagtattactttcactgtatggcaggcagagaggggttggttgacacagcagtcaaaacatcccgtagtggataccttcagcgttgtcttatcaaatgtctggaatcgttgaaagtctcctatgatcacacggttcgggatgctgatggatcaattgtacagttctgctatggagaagatggagttgatgtgctgaaaactagctttctgaacgagttcaaagaacttgctgataacagaaaagctgtccttgccaagctcggtggctgcagtaaggatcccacattatcaaaatgtaatggatacattactgaactgcctcctaaattgattgataaagcggaagagtttcttaagcattcaaaggaatgctgtcgttacaacattgaggcaaaggaattaaaggagttacttaaagtcaagttcctatccagtcttgtagatcctggtgaggctgttggtgtggttgctgctcagtcaataggagaaccttctacgcagatgacgctcaacacttttcatcttgctggaaggggtgacatgaatgtaactcttggtataccccggctgaaagaaatactgatgactgcatcagataatattaggacgcctgttatgaagtgtcctttgctcgaacatatttctgaggatgatgctaaaatggtggttgcaaagcttaggagggttcgtgtggctgatgtagtggagaaaattgaagtctgcacagttcctttttacaactctaatgggcgtgtttcaaccctgtacaagttacagatgaaactctatccacaagaccagcttgagtcaggtcttactatagatgagtgtcaggcaaccttgagaacagtttttgttgaggcaatggaacatgcaattgaaaagcatctagatctgctatacaaaataaatgaaatccgtgctgttaagatagaagatacagagggctcattattaaatggtgatgaagaatctcaaagtagacatgctgatggaggagacactggtactagtgatgatgacgatcaaaatgataatgatgttgacttgggaactgatgcagaaaagatgaaacggcaagagaaagatgagatggagtatgatgatgatactgaaaccgaggagggaatgggtagcgaatctgaggagagcgatgaggatccagctgagtcaggtgatgattcacaagaggctgacaaagaacacacgatctcgaagtctgagacgacttcagtggatgacctgccatattctgtaaaaaaggggaaaaaatcaaaagatgatcgtggaacagctaaactagaagagaaaaatcaaaatgagggaagattagatgaccagaaacagggtcaaataaagaagcgcaggaaaaagttaaaacatactatccatgttgaatccagtgatttggattttgagattcactatgcctttcatgatgaacctcatattttactagctcaggattgactacatataacttgaca

SEQ ID NO: 7524 - DNA, 3694 bp, Zea Mays
gccacacgcacggctccatccttctgtccacgctcgcgccgccagggcgctcgagctcgccgtcgtcatctcgtcgggccgccgcctcgcagcttcgcccgcggctctggtccgcgccccgccaaggcccagccccaagctgccagcggcctccggcgttgctcgccgctcactgcgcgccgtctcgcgctctcgcgccctcgcccagtcctgctctcccttcgtcgctccgcggctccgccggcgtctgggcatccggccttcgggctttggtggcgccccccaccggccaccggcccaccccagcgggcagcggccactgcaactctgcggctctgccaggaacaaggaggaacagtggcgattctgccagggacagggaggagcagtggcagacaacgtccttccttttgtttggcccggggcttcggaattatctggagccgctactgcccccagcgttcggactcccgggtcgcaggcagccacgtctcgtcctggctctgggctcgccgcgctatcgtctcggccattcgctccgacgtccgtattcaatagatttgccctactcgtgaccacgagaatccggcgaggagggagaccgctcgtgcggagtctataatggctgacgggcagcatattcaggcagcatcagaggaagtggattcaatccacttcagcttctatagtgatgatgaaattaagaggatcagcattaaaaagatcaccaagtcggagcgccttgatgccaaaaaccttcctgtgccaggtggattactggaccctgcaatgggacctatcaatgatattgatatctgcaagagttgtggtcagcattctgttcgttgccctggtcacttcggtcatattgagttggcaaaaccattgttcaatcctttgctgtttatgagtctgaaaaaccttctccatgtcacgtgtttccattgtcacaagttccgcctgaacaaggaacaggttgacagatatgtgaatgaacttgaacttttagtaaagggtgatattgtctgtgctaaaaatttggaagactcagtagaagaagcatatctttccaaggaagatgaaaacatgaacaagaccacttcaggtgataactcatcttctgtgaaagacaagaaaacctggacatctatccaattgaaagaggttttgtctattttttccaagataatgaaaaagagacagaagaagtgtgcaaaatgtgacatgaagagcccaacaatctcaagtcctatatttggttggctggtcaaggacacaaaggcttctgctgtaagaacaaatgcaattgctgattttaaactcaagggagatggtgatattcacaactcaggggaaacaggggtttctggtcttgaggaagagtcatcttcacctggaatggtgtctaaagactcaatcaatgaagttagaggtctttctgatgatacaattaaagaattggtagcatcatcaggaaaaaaacatctattgcctacagaggttgaatctattctcaaggacttgtggaaaaatgaagctaggttctgcatgttactttgtgatttccagaagaatatgtcaagtgaaccagaaaagagaaggggctatgaaatgttcttcttgagtagtctccttgtggcaccaaatagattccgcccatcaactagctctagtcttggaattatggaacatcctcaaagtgttctgctaagtaaagtgcaagaatccaatcttgcgctacaacataacaatgcatcttctaaccatatggatgttcttcaaagatggatggatctacaacggagtgtaaatgtgctatatgatagtagcaaaggccttgcaagaagcgagaagaatgctcatggtatacgccagctattggaaaagaaagaaggaattcttcgacaaaagatgatggggaagagggttaattatgcatgccgatctgttatatctccagatccgtacttggctgttaatgaaattggcattcctcctgtttttgcgacacgattgacatatcctgagaaagtaacaccctggaataccaaaaggctccaagaagctataaggaatggtgccgatatacatccaggtgcaacacattacagggacaacaatagcatgtataagttacaggcagtccctgccaaacgccgttccattgctaagatgctacctgcatctagaggatcaatttgtcagccagggagagatcctaattgtgagtttgaaagcaaggttgtatatcggcatcttcaagatggtgacattgtacttgtcaataggcagcctactcttcacaagcccagcatgatggctcattttgttcgggtgttacctggagaaaagacgttacgaatgcactacgccaattgcagcacctacaatgctgattttgacggagatgagatgaatgttcatgttccgcaagatgaaatatctcgtgctgaggccatgaatattgttgacgcaaacaagcaatacattggtcctaggagtggggatgctgtcagaggtctcatacaggaccacattgttggtgctgtactattgacaaaaccagacacattgctaagccgtgaagaatatagtcagcttgtctttgggtcttgtgtgccgtcctcaaattgtggctctcatcaccctgctaaggtgtctgctattgaggattacgatacacttgaacttgtccatcctgctatttggaagccaaggcccttatggacaggaaaacaggttataacaaccatcttgaatcatttaacaaaaggttgtcctccatttactgtggagcagaagggaaaaataccaaaagaatatctgaaagaagatccttccgctcaaaaggaaaaagaagatccttccgctcgaaaagaagctcattctgctaaaaaaggaaaacgagaagatccttccgctcaaaaagaaaaagattcttcagttaataaagaaaaacaagagaagatacaaaaacaaaaacaaaaagatcgttctgaactggtcttatatattcacaataatgagctcataaagggcataatagacaaggcccagtttgggaagtatgggatagttcatacagttcatgaactctatggtgcatatacagctgggatactgctctcgacattcagccgcttatttacactgttcttgcaggataaactgagaagtaaaattcttagtggaagcgaagtgcgtagtaatgaagtccactggaaatttactggagctgacgaagatcataaaggtgatctggtaaaattgcatatggaggttgagaaggctgtaagaagtaacggtgaatcggacacggctaccttggacaatgatatgaaaaatgctctaaatgggataacaaccgacgtcaataaaatattatttcctgatggtctacaaaagccctttcctggaaattgtctctctcttatgactacaactggagctaaaggtggtccggttaacatgaatcaaatatcatcattactaggccagcaagagctagaaggaaagcgtgttccacggatggtttctgggaagactttaccgtgctttccgccatgggatatttcttcaagagctggtggctttatcagtgatcgatttttaactggtctgcgtcctcaagagtattactttcactgtatggcaggcagagaggggtaactgttacaggcatttcaagttttgc

SEQ ID NO: 7525 - DNA, 282 bp, Zea Mays
acctccgcggtcgacgaggacgaaggtgggtcgtcccccggcctgcttgggcttgaacgagatgtcgaagctctggcacgccttccggttggactttgggtactcgaccaatccgtgcagggtgcccccgtactgcggcaccccgaagttgccgatggcgcactcgtacttgcccttgagctcgtcgggggacgtcacctggatgctgttcttctccaccacgaacctccccgccgccgcgtccgccaacgcgagcaccaccacgaccagaagcgccagcca

SEQ ID NO: 7526 - DNA, 1663 bp, Zea Mays
cacacatccacactcacctgttgcctctatatccaccgccccaccgccgtagcaccagaaagaaatgtacagtctacacagctgaccagagagctagtgcaagcgatctagcaagttttaatcttggaagaagccagctaggcgcgtgaatatggatcgcctcactgtgatggcgccgccgctgctcgtcctcctcctgctgctcctctcgcggtgctcggcggcggcgtcacggcgcggcgggggctggtgggaggagggcgagggggagtggaggccgagcgaggaggaagagaagggcaaaggcaaagggagggggctgttcctgctgcaccgggtggagaaggtggtggagtcggagggcgggcaggtgcgcgtggtgcgcggccagccgtggccgccggcgtccttcgcctgccgcgaggggctcatgcacatcggcttcatcaccatggagcccaagacgctgttcgtgccgcagtacctcgactccagcatcactctcttcgtgcagcggggggaagcgaaggttgggtatattcacaaggacgagctcgtggagaggaagctcaagatgggcgacgtcctccacatcgacgccggctccaccttctacatggtcaaccccggcaaaggccagaggctgcagatcatatgcagcgtggacgcctccgatagccttggctttggacctccttatcaggccttcttcctcggcggcgcaggggacccggcgtcggtcattgccggttttgggccgaagacgcttacccgtgccttcaacgccacctacgacgagttggcgcgtatcctgttgccacgaaccggcggccccatcgtgtactacaccgcggacgcggagccagagagcggtgccgccgaagaggagcgcgggcaggtcgacgggcacgacggtgtgctggacaggggagcgcgacgcgagggcgccggcgcgtgggtgccgggtggcaggggagacggaggcgacgagtgcggcggggtcgatgctggcgccgcacgtgaaccctcgggcgacggagtacggcgtggagctgggcggggaaggcacggtccaggtggtgttcccgaacgggtccctggcgatgagcgaggtggtgcgccccggcgacgtgttctggatcccgcgctacttccccttctgccaggtggcggcgcgggccgggcccttcgagttcttcggcttcaccacctcggcgcgccgcaaccggccgcagttcctggtcggcgcctcctcggtgctccgtaccatgctagggccggagatcgccgccgcgttcggcgctcgcgagaaggagttcagtaagctggtgcgtgcgcaacgggaggccctgattatgccgtcctctcctgggaaggaggaggaggagcatgggaagaaagggagggagaaagaggagtcactgccgatggttgtcgagcaggcggcggcggagtgagctgcttgatctttcagtcttggactcttggcttcctcagaagcgcgcgcgcgccaccggaaagtgtttctactcttgttactgcgccttgtcagtgatcgtgttgttggttttttttttcgtggcgccgtctataaataaaagtgctttgtgcgtttacagctatgaaatcaggattatcatccgtaactcgtaagctggacgcc

SEQ ID NO: 7527 - DNA, 3248 bp, Zea Mays
gaactttggaacatgatcgaccatgattagctgaaacctgaaagtatgtgtacaaccgcctgctgctcgtttggatggtagtgctgctggcggtgccaaacttgaaatgagaacctattgttgctatattttttctccagtcatcaggcttcttgaattttgaatggttcataattttcaaaaatcaatggccacgatttgttcgagatattactttttgttactcggctgataccagatgcaaaaggaacatcatgcaatcagcggcttgagagaattagtggaacacagcatacttacatattacgagttcccttcagaaatgaaaatgggatacttaagaaatggatatcaagatttgatgtgtggccatatctggaaacatttgctgaggatgctgctggtgaaattgctgctgaattacaaggtactccagacttcataattggaaactacagtgatggaaatcttgtggcatcgttgctatcttacaagatgggaattacccagtgcaacattgctcatgctctggaaaagactaagtatccagattcagacatattttggaagaatttcgatgagaagtaccatttctcctgtcagttcacggctgatataattgctatgaacaatgctgattttatcatcaccagcacataccaagaaatcgctggaaggtttttattctgcttccgtcttgttggccactgtagatttcttttgtgacttagcattcaccaattaatttgcatgcacactgaatcatgtttacctcactcatgcatatactgttctgatgttaagttactgtattaattgtagttatggtaacatgcaatccatgctttttcatgcattaatcttgcatggactgtgatcacatatgtataatagctattcttaatttcctacaagacgctcatatactaattttttcctctctctcagcaaaaatactgttggacagtatgagagtcatactgcctttactctgcctggtctgtaccgagttgtccatgggatcgatgtcttcgatccaaagttcaatatagtctctcctggagctgacatgtccatatactttccacataccgagaaggccaagcgactcacctctcttcatggttcaatcgaaaatttgatttatgacccggagcaaaacgatgaacacattgggcatctggatgaccggtcaaagcccatcctcttctccatggcaagactcgacagggtgaagaacataacggggctggtcgaagcttttgctaagtgcgctaagctgagggagctggtaaaccttgtcgtcgttgccgggtacaatgatgtcaacaagtccaaggacagggaagagatcgcggagatagagaagatgcatgaactcatcaagacccacaacttgttcgggcagttccgctggatctctgcccagacaaacagggcccgtaacggcgagctctatcgctacatcgctgatacccatggtgctttcgtacagccggccttctatgaagcgttcggtctcaccgtcgttgaggccatgacctgtggacttcctactttcgcgacgctccatggagggccagctgagatcatagagcatggcgtctcgggcttccacattgacccgtaccaccccgagcaggctgctaatctgatggccgacttcttcgagcggtgcaagcaagacccagatcactgggtgaaaatatctggagcagggctgcagcgcatatacgagaagtacacatggaagatatactcagagaggttgatgacactggccggggtctacggtttctggaagtacgtgtcgaagctcgagaggctggagacgaggcgctaccttgagatgttctacatactgaagttccgcgagctggcgaagaccgtgccgcttgcaattgaccaaccgcagtagcttgcgcaactgcgactgcgtagcacttggtacaagactgaaacctgaaggaccttcagtaatttaggcgcggcagacggtagccaataaaatgtgccggagctgaactggtttttattatgtacataatggcagtataacaaaattactgaaggcaggtgggttgcagttgtgtgttcgttactgtttactgtaatatgtcaagctgtcggctgcaatttctttgctggcaagccgcaggcactggtgaagtgctgataaatacatcatattctgttgacctgtgaagaaacttgttcaaggtagattccattgtactagctctgttgctcagcatctccttgtttgggaacattaacaaccagctctcacccctcaataaaatagtcgcatcatgtagctacagttttcatctcaaatccatgtggatcggataagtcaaaatccttaaatttttttttctaatagcatccaatctatatgccataggatcggaataaccctgaaccacatgtctgagacatgggagtgtcaaccgtgccaaacgattcaagaaagaagaacgcgactacaagctcattaaccggctttaaatgtgaatatgtcatacccccttaaccgaaattaatctacaattcgcaacgcaacgcgccgcgtcgttgccagtgtgccacacgggggggaaagaatggtgctaggcactgtcacacgctgatgtcgtaccgtggaacactctgcggtgcggcggcgcggcagagcgggcacgtcgtgctcactcggaaccacgcctggatgcactccgcgtggaacccgtgaccgcagcccagcacgagccgcgtagcggcctcgccgtccccgggctccgcaaggcacaccgcgcactcgaccttgccgtccgcgccgctgcgtgccgtggccacgggcaccgacaccgagagcgagagcggcgatgccgtcgttgcgcgaggcggtccgtaggccgccgccgcgtcccgaggcgggcaagacagcggccgagcggacgaggtggctccgccggtggcgttgcttctggttccgtgcttcctgcactgccagatgaagcgccacacgaggtagagcagcacgacgaggacgctgagggccgccagcgctgacgaggcgcggctggagacccgcccgtgcggcgccggcgcaatgccaccgctatcggtgtccatcgtcgacgagtatcgggctatcggcctaggctctggccacccccgttagctgacaaaactagccggtacgcaccagctcgcatagccggtatagtacgcactactacgcagtctatgcagaggggaagttc

SEQ ID NO: 7528 - DNA, 3696 bp, Zea Mays
tcgcatctctcgccacttcgcaattcgccagtcgccaccggcaccaccacacccaccctcgcggccgcgaacaaacgacccactgaccactggcgggctgcacggcagccatgtctgcgccgaagctggaccgcaacccgagcatccgcgaccgcgtcgaggacaccctccacgcgcaccgcaacgagctcgtcgccctcctgtccaagtacgtgaacaaggggaagggcatcctgcagccgcaccacatcctcgacgcgctcgacgaggtccagggctccgggggccgcgcgctagccgagggacccttcctcgacgtcctccgctccgcgcaggaggcgatcgtgctgccgccgttcgtggccatcgcggtgcgcccgcgcccgggagtttgggagtacgtccgcgtcaacgttcacgagctcagcgtcgagcagctcacagtctcggagtacctccgcttcaaggaggagcttgtcgacggccagcacaatgatccctacgttctcgagcttgacttcgagccgttcaatgtctcagtcccacgcccaaatcggtcatcatctattggaaacggtgtgcagttcctcaaccgacacttgtcctcaatcatgttccgcaacagggattgcttggagcccctgctggatttcctccgtggccaccggcacaaggggcatgttatgatgcttaatgatagaatacaaagcttggggaggcttcagtctgtgctgaccaaagctgaggagcacttgtcaaagctccctgctgacacaccatactcacaatttgcttataaatttcaagagtggggcctggagaaaggttggggtgatacagcagggcatgttttggaaatgatccatctccttctagatattattcaagcgccagacccatctacactagagaaattcttggggaggatccccatgatttttaacgttgttgtggtatcccctcatggatactttggtcaagctaatgtattaggcttgccagacacaggaggacagatcgtctatatactggaccaagtccgtgcactagaaaatgagatggttctccgtttaaagaaacaagggcttgatgtttccccaaagattctcattgatgctgctggtgaaattgctgctgaattacaaggtactccagacttcataattggaaactacagtgatggaaatcttgtggcatcgttgctatcttacaagatgggaattacccagtgcaacattgctcatgctctggaaaagactaagtatccagattcagacatattttggaagaatttcgatgagaagtaccatttctcctgtcagttcacggctgatataattgctatgaacaatgctgattttatcatcaccagcacataccaagaaatcgctggaagcaaaaatactgttggacagtatgagagtcatactgcctttactctgcctggtctgtaccgagttgtccatgggatcgatgtcttcgatccaaagttcaatatagtctctcctggagctgacatgtccatatactttccacataccgagaaggccaagcgactcacctctcttcatggttcaatcgaaaatttgatttatgacccggagcaaaacgatgaacacattgggcatctggatgaccggtcaaagcccatcctcttctccatggcaagactcgacagggtgaagaacataacggggctggtcgaagcttttgctaagtgcgctaagctgagggagctggtaaaccttgtcgtcgttgccgggtacaatgatgtcaacaagtccaaggacagggaagagatcgcggagatagagaagatgcatgaactcatcaagacccacaacttgttcgggcagttccgctggatctctgcccagacaaacagggcccgtaacggcgagctctatcgctacatcgctgatacccatggtgctttcgtacagccggccttctatgaagcgttcggtctcaccgtcgttgaggccatgacctgtggacttcctactttcgcgacgctccatggagggccagctgagatcatagagcatggcgtctcgggcttccacattgacccgtaccaccccgagcaggctgctaatctgatggccgacttcttcgagcggtgcaagcaagacccagatcactgggtgaaaatatctggagcagggctgcagcgcatatacgagaagtacacatggaagatatactcagagaggttgatgacactggccggggtctacggtttctggaagtacgtgtcgaagctcgagaggctggagacgaggcgctaccttgagatgttctacatactgaagttccgcgagctggcgaagaccgtgccgcttgcaattgaccaaccgcagtagcttgcgcaactgcgactgcgtagcacttggtacaagactgaaacctgaaggaccttcagtaatttaggcgcggcagacggtagccaataaaatgtgccggagctgaactggtttttattatgtacataatggcagtataacaaaattactgaaggcaggtgggttgcagttgtgtgttcgttactgtttactgtaatatgtcaagctgtcggctgcaatttctttgctggcaagccgcaggcactggtgaagtgctgataaatacatcatattctgttgacctgtgaagaaacttgttcaaggtagattccattgtactagctctgttgctcagcatctccttgtttgggaacattaacaaccagctctcacccctcaataaaatagtcgcatcatgtagctacagttttcatctcaaatccatgtggatcggataagtcaaaatccttaaatttttttttctaatagcatccaatctatatgccataggatcggaataaccctgaaccacatgtctgagacatgggagtgtcaaccgtgccaaacgattcaagaaagaagaacgcgactacaagctcattaaccggctttaaatgtgaatatgtcatacccccttaaccgaaattaatctacaattcgcaacgcaacgcgccgcgtcgttgccagtgtgccacacgggggggaaagaatggtgctaggcactgtcacacgctgatgtcgtaccgtggaacactctgcggtgcggcggcgcggcagagcgggcacgtcgtgctcactcggaaccacgcctggatgcactccgcgtggaacccgtgaccgcagcccagcacgagccgcgtagcggcctcgccgtccccgggctccgcaaggcacaccgcgcactcgaccttgccgtccgcgccgctgcgtgccgtggccacgggcaccgacaccgagagcgagagcggcgatgccgtcgttgcgcgaggcggtccgtaggccgccgccgcgtcccgaggcgggcaagacagcggccgagcggacgaggtggctccgccggtggcgttgcttctggttccgtgcttcctgcactgccagatgaagcgccacacgaggtagagcagcacgacgaggacgctgagggccgccagcgctgacgaggcgcggctggagacccgcccgtgcggcgccggcgcaatgccaccgctatcggtgtccatcgtcgacgagtatcgggctatcggcctaggctctggccacccccgttagctgacaaaactagccggtacgcaccagctcgcatagccggtatagtacgcactactacgcagtctatgcagaggggaagttc

SEQ ID NO: 7529 - DNA, 2830 bp, Zea Mays
cttcttttaatgaaaaaaaatctgaggaaagtaccttatgacttcatggtacaatgtaaaatctgtgaatagttagttaggagacgatatttgataccccctcaatttcaaattgcaattcgtttttttttctagatttgtagttttactatgtaactcagtgaaaattatatacctagaaagcaagacaacttacaatttgtaatggagagagtacatattaagaaaaggtccaacactcaaaaggatgctgctggtgaaattgctgctgaattacaaggtactccagacttcataattggaaactacagtgatggaaatcttgtggcgtcattgctatcttacaagatgggaattacccagtgcaacattgctcatgctctagaaaagactaagtatccagattcagacatattttggaagaatttcgatgagaagtaccatttctcctgccagttcactgctgatataattgctatgaacaatgctgattttatcatcaccagcacataccaagaaattgctggaagcaaaaatactgttggacagtatgagagtcatactgcctttactctgcctggtctgtaccgagttgtccatgggatcgatgtcttcgatccaaagttcaatatagtctctcctggagctgacatgtccatatactttccacataccgagaaggccaagcgactcacctctcttcatggttcaatcgaaaatttgatttatgacccggagcaaaacgatgaacacattgggcatctggatgaccggtcaaagcccatcctcttctccatggcaagactcgacagggtgaagaacataacggggctggtcgaagcttttgctaagtgcgctaagctgagggagctggtaaaccttgtcgtcgttgccgggtacaatgatgtcaacaagtccaaggacagggaagagatcgcggagatagagaagatgcatgaactcatcaagacccacaacttgttcgggcagttccgctggatctctgcccagacaaacagggcccgtaacggcgagctctatcgctacatcgctgatacccatggtgctttcgtacagccggccttctatgaagcgttcggtctcaccgtcgttgaggccatgacctgtggacttcctactttcgcgacgctccatggagggccagctgagatcatagagcatggcgtctcgggcttccacattgacccgtaccaccccgagcaggctgctaatctgatggccgacttcttcgagcggtgcaagcaagacccagatcactgggtgaaaatatctggagcagggctgcagcgcatatacgagaagtacacatggaagatatactcagagaggttgatgacactggccggggtctacggtttctggaagtacgtgtcgaagctcgagaggctggagacgaggcgctaccttgagatgttctacatactgaagttccgcgagctggcgaagaccgtgccgcttgcaattgaccaaccgcagtagcttgcgcaactgcgactgcgtagcacttggtacaagactgaaacctgaaggaccttcagtaatttaggcgcggcagacggtagccaataaaatgtgccggagctgaactggtttttattatgtacataatggcagtataacaaaattactgaaggcaggtgggttgcagttgtgtgttcgttactgtttactgtaatatgtcaagctgtcggctgcaatttctttgctggcaagccgcaggcactggtgaagtgctgataaatacatcatattctgttgacctgtgaagaaacttgttcaaggtagattccattgtactagctctgttgctcagcatctccttgtttgggaacattaacaaccagctctcacccctcaataaaatagtcgcatcatgtagctacagttttcatctcaaatccatgtggatcggataagtcaaaatccttaaatttttttttctaatagcatccaatctatatgccataggatcggaataaccctgaaccacatgtctgagacatgggagtgtcaaccgtgccaaacgattcaagaaagaagaacgcgactacaagctcattaaccggctttaaatgtgaatatgtcatacccccttaaccgaaattaatctacaattcgcaacgcaacgcgccgcgtcgttgccagtgtgccacacgggggggaaagaatggtgctaggcactgtcacacgctgatgtcgtaccgtggaacactctgcggtgcggcggcgcggcagagcgggcacgtcgtgctcactcggaaccacgcctggatgcactccgcgtggaacccgtgaccgcagcccagcacgagccgcgtagcggcctcgccgtccccgggctccgcaaggcacaccgcgcactcgaccttgccgtccgcgccgctgcgtgccgtggccacgggcaccgacaccgagagcgagagcggcgatgccgtcgttgcgcgaggcggtccgtaggccgccgccgcgtcccgaggcgggcaagacagcggccgagcggacgaggtggctccgccggtggcgttgcttctggttccgtgcttcctgcactgccagatgaagcgccacacgaggtagagcagcacgacgaggacgctgagggccgccagcgctgacgaggcgcggctggagacccgcccgtgcggcgccggcgcaatgccaccgctatcggtgtccatcgtcgacgagtatcgggctatcggcctaggctctggccacccccgttagctgacaaaactagccggtacgcaccagctcgcatagccggtatagtacgcactactacgcagtctatgcagaggggaagttc

SEQ ID NO: 7530 - DNA, 673 bp, Zea Mays
caatcctaagcgggtgtttggcaaaatcagctcagcttcataaaactttaggccccgtttgatactgctcctagccggcttcggctctggctcctcgtcggagccctcccaaacggcatggtgaaaatagctccacactgggagcaggagctagtttgagggccgagagccggagcccgaaaaagtggctctaaccggctccgtgatgaccatctctggcgagcgtggagactgcacgagcgtgcgcgccgccaaacagtagcatgagcgcggagtcggcaggcacaagcgttgggattccttgccgaagcttgaggaggaggtgtggccgtgaagaacgcgtgcgaaggcgcacacgaagtgtttgtgtaaatgtccaatagcactttggacatttgagttataaaataaattaaaaaagtgtttgggagtcactgttttgtcaaatgatttgtaaaagacatcggctccggtagagaagctgctcttttaaaagagccgctgttggagccagttttagaggagccagagccctcccaaacagggccttagagttaagtagctatactttaaagttacaaaatttctaaaaatgtttgacttacagatgtaacatccaaaattttatatggggattgatataagtttttttcaaaaaaaatatttgagttaa

SEQ ID NO: 7531 - DNA, 285 bp, Zea Mays
atggcaccgacaaggcgactagtctcgattaatctcagacaacagagcatcaagccatcaagtaaaggctataatgcttggcaagaaaatctaaaggaggctgggggcacactcagtctgaggagagttcatcttgcaatccctatagcgggactgcagaagtttgaagcggacatggattacacaatgcttgagaaagggcactcggcagagatagtgacagcagccggcagcaacttgggtaaggttttcgacagcgctttaagggatcaggcaacagtttga

SEQ ID NO: 7532 - DNA, 4272 bp, Zea Mays
atgtcggcgaccatggcctctgccagtcagccctcctcgcagcaacctccacctccaccgctcactgccgaaatcgttctccgcctcgcctcgcgcgacccctccaccgcggtgcccctcctcccggagctcccgcccgacgatctcgccgatatcgttgcctcgctcaccgccacctcccccgcgggccacctctcccttctccccgcgatcctcgctctcttaccctccccatcctctgcctcctccgcgttcgccgctctcctctccgcgcccagctggccctcctccacgctcctcgccgtcgccacactactccgcgacctcccgccggcctaccgcacccgcatccccgccttcctcgggaagatcatctctctccttccaagtgcggatgcccaggacctccctgctctctcctaccagctcctcctgctcgcgtccaagccgctctacccgcgcgtcgtcctcgcgggactcctgcgcttcttcggcggccgccgcggcgcccgcgttcgcgcgccgccgtctatcgcgcggcaggtcgagagcaccgcgctgatgaacgtctcgttcgcggtcaagcaggaccccgcgctggcgagggaggtcctggccgccatcaaggctgacgccgcgggcgctctcagtggatttgcggtggcagtgatgctgttcgtggccagggtgccgaggttcaacgagggtgccgtgagtgtgctccgggatgcggtcgtggtgtcccgccgggattaccgaatgtcaaggcggtgcaagtggttgccggattgtatggaaggggaatatgcacgggccactcaatgtgtcgagaagggaatactaaaatctgtcgacgagagcattgttggcagggagcatgttgtgccaagcattgttcaggtggcttttcgcctgttagaagtctcagaaggtgatcaaggtgaggaagctggcttaggtgaaggagtaatgagcaccgaagaaataggcattaatatgctcaaatcattgtttgaggtccatgaaatggcacggactgagataattgaacagtgcaagttccggattctctcggcaaagcctcagcaaagtgtgccagttctcaggttgattggatgcttgattttgagtcatccatttccaatgctggaattcattgcacatttaaaggagttgttggattatttttcttttatgaatgacaagatatcaactgctttgatcagttgcatcttgccactcacaaagttcagccgtgatctgaaggattacgtaatactggttgtaagaaaggcgatgttcaagagggaggacatggttcgaattgctgctacaaatgctataattgagctgattattgcagaaaacaagaaaaatgaagccaatccttttgaagattcaacaagtcagccaagctctagccaacagcctgaaacacatctagagtttggtaggtgtctctttcaggaactaagtgggttgcttcggagatgtctctcacatcaggccagtgtcaaagaggtcttgtacgagggtcttatacgtactgctatctctgatccagctgtttctgacaatatccttgattttctctggcctcacttccaaaactattactcagaggatgcagaatgtcctcttaaaattggttcatgcttcaaagtagagcatgccaaactatgcattgtggaacctttagattgtctgctgtcatgtatctcaagaattctgcaaattaagcaacatagtaaatgtgaacgaccacgtgatgcatattggaagtgctttggttttgctgcttcacaagataatgaggttggacgagcatcatcaagtgatttattcgtgaaagctttatcaagcatccaaaagtatttgaggatatccctcacagagaggacaaagccaagaagctggatctctttcttcaccatcagagatggctcattgtcataactttgctatgcttggaatcattgaggtttttattgatttttctgcttcaaaactggagaaagcctctggcaaatcgaaggaaatgatagaaaaagaaatcgtggagcttgttgatgcgcacagtggctttgagaaaaaaattagcagtggtagggaaaggatagcacggagaagagcaaatgctggtgatgctacagataagcacaccaacgaacccagggagaattctaatgcttcattgcagaaacatcatggaaacaggggtaaatttgctgattcgagtttgtatgaactttcggtaatgtgtgtcaagcagtgccatgctgataactacaacaatgttagtcaacattctagccaaactaaattgaaccagagctccaatttgacatcctttgtactgaaagcctttcttgaattgttgaaatcacttgcatcaaagcacagtagggacttcacaataaagctgcatggagattttaaaaagttaagccagccaataatgcagctagtatggtgttttctgttagacccaattcaagaaaatggtggaagcaagaagaacatgacccaaggaaagaaaaacactgagtgcaaaaaggatcagttatatttggctctgacatgcctaaaaaaattccttgagccaagtgtttcaggagaacactctagtgatatcattgattttctaatatctttggctccacctaatatagaggatacaatgggtactggggatcttgacaataatgataccactatggttgaagatagaagcacaagaaatgtccatgtgattttgaacatactgaagacgttatatgccagacttcttacccaatcagttttacgtgaatctgaggctgtaattgaattgattctgggtatttcaagaaaactgcaacttgaacgaaggcatcttgttggaaaatgggctacagatctatgtagaaagaaaaccatgcaaagtcctagaatggcacgagagatgttaaaactagctatacatcttacaccagctccagatgacatgattcttgtttatgaggtgtctactgagttgatgaatttaatgacctctggagatgatggagattcttctgatacatttcatatcattaactgtaaaacaaagagctcactcgctgctctctctcttcaaatggttgagtcatctcttactgaattggattggggctttggaaagcttaaagcaatgcttacattaggttatgattgtgctaacattgatgaagatcaaccagcagatgaaataatgctaaggttggctttggagaaagcactctactcgagatcaacattagtagttcaagtgctctcttcctttgcacatatgagccctatggatactcaagcagaacattttctgaaattgactgtcaagttctacaagcttttaactcgcatgtcaaagtcccagattgtacctaaaggctacagacaatccattccaagcctcaagtttcagaaactggcagaagtaacttgcaaaatgctcaccgctcccctttatgattttgtgtttcaacagaatcagcaaatacccataaagggaaacctcgccaaaattagaagagaaaccaaatgtatccctgatcttatttttcagattgaggattatgagaagtatttaatacagctaagcaaactaactaaggtaaaccttttgaggcatgccaaacgcagtgtagcaagagacttccagataaaagataaatctgggggacaacaggaagatgatcacattccagacaatgctgcagcatctgataacgaggctgataaggacgcaatgggtccaaacgcaccagttgaatcatgtgctgacgatgctcaaaaatcatatgctgacgaaaatgcatcatgtgaaagtgggcatgatgaggatgcaggaggtccaaacactccagcagaagcagatgctgatgaaatcattaggtctagcattccatatggtagtccagtccaggagtctgaatctgatagagaagaggaagaattattagcacggacgaagagagctaagacaaaacaagttgtgcaggattctgatgaggatgcagatgagtaggtttttaaacattatcaatagttcaattttcgaagcgtctattgtgggcaacatcatgccaaggtgtatatacataagtttttatgggttatcttgctgattatagacgatgaacacaagagatgtaaaatatatggttttgcaaaaattcttgtgggccatcatgttgattatagaccatgcacagaacatatgtaaaatactttattgtaaattataagtta

SEQ ID NO: 7533 - DNA, 3946 bp, Zea Mays
cctaggtctgcatctgtactttccacgacatgttcaatctccttctacggccatgtctagactttccacatcggactcatcaagtgtgagccaaaagctaacatattctccagcaaagaataaacatgagttcacactgccgacagccttagccggtatggagcttggcctcgagtgtaggcccccaggaatgtcaggctaacaccaagccaagctgggttcgtcttctacatagtctcgtttgccaatatgcgatggaccccgcgctggcgagggaggtcctggccgccatcaaggctgacgccgcgggcgctctcagtggatttgcggtggcagtgatgctgttcgtggccagggtgccgaggttcaacgagggtgccgtgagtgtgctccgggatgcggtcgtggtgtcccgccgggattaccgaatgtcaaggcggtgcaagtggttgccggattgtatggaaggggaatatgcacgggccactcaatgtgtcgagaagggaatactaaaatctgtcgacgagagcattgttggcagggagcatgttgtgccaagcattgttcaggtggcttttcgcctgttagaagtctcagaaggtgatcaaggtgaggaagctggcttaggtgaaggagtaatgagcaccgaagaaataggcattaatatgctcaaatcattgtttgaggtccatgaaatggcacggactgagataattgaacagtgcaagttccggattctctcggcaaagcctcagcaaagtgtgccagttctcaggttgattggatgcttgattttgagtcatccatttccaatgctggaattcattgcacatttaaaggagttgttggattatttttcttttatgaatgacaagatatcaactgctttgatcagttgcatcttgccactcacaaagttcagccgtgatctgaaggattacgtaatactggttgtaagaaaggcgatgttcaagagggaggacatggttcgaattgctgctacaaatgctataattgagctgattattgcagaaaacaagaaaaatgaagccaatccttttgaagattcaacaagtcagccaagctctagccaacagcctgaaacacatctagagtttggtaggtgtctctttcaggaactaagtgggttgcttcggagatgtctctcacatcaggccagtgtcaaagaggtcttgtacgagggtcttatacgtactgctatctctgatccagctgtttctgacaatatccttgattttctctggcctcacttccaaaactattactcagaggatgcagaatgtcctcttaaaattggttcatgcttcaaagtagagcatgccaaactatgcattgtggaacctttagattgtctgctgtcatgtatctcaagaattctgcaaattaagcaacatagtaaatgtgaacgaccacgtgatgcatattggaagtgctttggttttgctgcttcacaagataatgaggttggacgagcatcatcaagtgatttattcgtgaaagctttatcaagcatccaaaagtatttgaggatatccctcacagagcagagaggacaaagccaagaagctggatctctttcttcaccatcagagatggctcattgtcataactttgctatgcttggaatcattgaggtttttattgatttttctgcttcaaaactggagaaagcctctggcaaatcgaaggaaatgatagaaaaagaaatcgtggagcttgttgatgcgcacagtggctttgagaaaaaaattagcagtggtagggaaaggatagcacggagaagagcaaatgctggtgatgctacagataagcacaccaacgaacccagggagaattctaatgcttcattgcagaaacatcatggaaacaggggtaaatttgctgattcgagtttgtatgaactttcggtaatgtgtgtcaagcagtgccatgctgataactacaacaatgttagtcaacattctagccaaactaaattgaaccagagctccaatttgacatcctttgtactgaaagcctttcttgaattgttgaaatcacttgcatcaaagcacagtagggacttcacaataaagctgcatggagattttaaaaagttaagccagccaataatgcagctagtatggtgttttctgttagacccaattcaagaaaatggtggaagcaagaagaacatgacccaaggaaagaaaaacactgagtgcaaaaaggatcagttatatttggctctgacatgcctaaaaaaattccttgagccaagtgtttcaggagaacactctagtgatatcattgattttctaatatctttggctccacctaatatagaggatacaatgggtactggggatcttgacaataatgataccactatggttgaagatagaagcacaagaaatgtccatgtgattttgaacatactgaagacgttatatgccagacttcttacccaatcagttttacgtgaatctgaggctgtaattgaattgattctgggtatttcaagaaaactgcaacttgaacgaaggcatcttgttggaaaatgggctacagatctatgtagaaagaaaaccatgcaaagtcctagaatggcacgagagatgttaaaactagctatacatcttacaccagctccagatgacatgattcttgtttatgaggtgtctactgagttgatgaatttaatgacctctggagatgatggagattcttctgatacatttcatatcattaactgtaaaacaaagagctcactcgctgctctctctcttcaaatggttgagtcatctcttactgaattggattggggctttggaaagcttaaagcaatgcttacattaggttatgattgtgctaacattgatgaagatcaaccagcagatgaaataatgctaaggttggctttggagaaagcactctactcgagatcaacattagtagttcaagtgctctcttcctttgcacatatgagccctatggatactcaagcagaacattttctgaaattgactgtcaagttctacaagcttttaactcgcatgtcaaagtcccagattgtacctaaaggctacagacaatccattccaagcctcaagtttcagaaactggcagaagtaacttgcaaaatgctcaccgctcccctttatgattttgtgtttcaacagaatcagcaaatacccataaagggaaacctcgccaaaattagaagagaaaccaaatgtatccctgatcttatttttcagattgaggattatgagaagtatttaatacagctaagcaaactaactaaggtaaaccttttgaggcatgccaaacgcagtgtagcaagagacttccagataaaagataaatctgggggacaacaggaagatgatcacattccagacaatgctgcagcatctgataacgaggctgataaggacgcaatgggtccaaacgcaccagttgaatcatgtgctgacgatgctcaaaaatcatatgctgacgaaaatgcatcatgtgaaagtgggcatgatgaggatgcaggaggtccaaacactccagcagaagcagatgctgatgaaatcattaggtctagcattccatatggtagtccagtccaggagtctgaatctgatagagaagaggaagaattattagcacggacgaagagagctaagacaaaacaagttgtgcaggattctgatgaggatgcagatgagtaggtttttaaacattatcaatagttcaattttcgaagcgtctattgtgggcaacatcatgccaaggtgtatatacataagtttttatgggttatcttgctgattatagacgatgaacacaagagatgtaaaatatatggttttgcaaaaattcttgtgggccatcatgttgattatagaccatgcacagaacatatgtaaaatactttattgtaaattataagtta

SEQ ID NO: 7534 - DNA, 4359 bp, Zea Mays
cgcacttcagttctctatcccattatatttttaggaatgaaatgatgaagtcctgattctcttacgccacctcgggataacacgttcattcaaagccagaggtctagggagctgagtttctacctacaacattttcctcagctttatttcttgtgctacctatgtaacaaaatacatactaaaacataaaaataccatgttttgcagtagttgaaagttcattcaaataaaaaaatttggacggctgaatatcgaccatcaacaaagttcacactgccgacagccttagccggtatggagcttggcctcgagtgtaggcccccaggaatgtcaggctaacaccaagccaagctgggttcgtcttctacatagtctcgtttgccaatatgcgatggaccccgcgctggcgagggaggtcctggccgccatcaaggctgacgccgcgggcgctctcagtggatttgcggtggcagtgatgctgttcgtggccagggtgccgaggttcaacgagggtgccgtgagtgtgctccgggatgcggtcgtggtgtcccgccgggattaccgaatgtcaaggtgacggattgctcgttactctacctattgtgattgctagtgtttgctttagaaatttgttctgatcagatggcggatgtctctcaggcggtgcaagtggttgccggattgtatggaaggggaatatgcacgggccactcaatgtgtcgagaagggaatactaaaatctgtcgacgagagcattgttggcagggagcatgttgtgccaagcattgttcaggtggcttttcgcctgttagaagtctcagaaggtgatcaaggtgaggaagctggcttaggtgaaggagtaatgagcaccgaagaaataggcattaatatgctcaaatcattgtttgaggtccatgaaatggcacggactgagataattgaacagtgcaagttccggattctctcggcaaagcctcagcaaagtgtgccagttctcaggttgattggatgcttgattttgagtcatccatttccaatgctggaattcattgcacatttaaaggagttgttggattatttttcttttatgaatgacaagatatcaactgctttgatcagttgcatcttgccactcacaaagttcagccgtgatctgaaggattacgtaatactggttgtaagaaaggcgatgttcaagagggaggacatggttcgaattgctgctacaaatgctataattgagctgattattgcagaaaacaagaaaaatgaagccaatccttttgaagattcaacaagtcagccaagctctagccaacagcctgaaacacatctagagtttggtaggtgtctctttcaggaactaagtgggttgcttcggagatgtctctcacatcaggtttcactggtttcattatgatgtactaccatacaactgcttcatctctagtaagacatacggtttccagcatagttagtttgctcttgcaggccagtgtcaaagaggtcttgtacgagggtcttatacgtactgctatctctgatccagctgtttctgacaatatccttgattttctctggcctcacttccaaaactattactcagaggatgcagaatgtcctcttaaaattggttcatgcttcaaagtagagcatgccaaactatgcattgtggaacctttagattgtctgctgtcatgtatctcaagaattctgcaaattaagcaacatagtaaatgtgaacgaccacgtgatgcatattggaagtgctttggttttgctgcttcacaagataatgaggttggacgagcatcatcaagtgatttattcgtgaaagctttatcaagcatccaaaagtatttgaggatatccctcacaggtttgtgatatatcatagataaagcaagccaatcagagcaaaataatgctattcaagactcaagaggtttgtgcttataatttctgcatgttgacagagcagagaggacaaagccaagaagctggatctctttcttcaccatcagagatggctcattgtcataactttgctatgcttggaatcattgaggtttttattgatttttctgcttcaaaactggagaaagcctctggcaaatcgaaggaaatgatagaaaaagaaatcgtggagcttgttgatgcgcacagtggctttgagaaaaaaattagcagtggtagggaaaggatagcacggagaagagcaaatgctggtgatgctacagataagcacaccaacgaacccagggagaattctaatgcttcattgcagaaacatcatggaaacaggggtaaatttgctgattcgagtttgtatgaactttcggtaatgtgtgtcaagcagtgccatgctgataactacaacaatgttagtcaacattctagccaaactaaattgaaccagagctccaatttgacatcctttgtactgaaagcctttcttgaattgttgaaatcacttgcatcaaagcacagtagggacttcacaataaagctgcatggagattttaaaaagttaagccagccaataatgcagctagtatggtgttttctgttagacccaattcaagaaaatggtggaagcaagaagaacatgacccaaggaaagaaaaacactgagtgcaaaaaggatcagttatatttggctctgacatgcctaaaaaaattccttgagccaagtgtttcaggagaacactctagtgatatcattgattttctaatatctttggctccacctaatatagaggatacaatgggtactggggatcttgacaataatgataccactatggttgaagatagaagcacaagaaatgtccatgtgattttgaacatactgaagacgttatatgccagacttcttacccaatcagttttacgtgaatctgaggctgtaattgaattgattctgggtatttcaagaaaactgcaacttgaacgaaggcatcttgttggaaaatgggctacagatctatgtagaaagaaaaccatgcaaagtcctagaatggcacgagagatgttaaaactagctatacatcttacaccagctccagatgacatgattcttgtttatgaggtgtctactgagttgatgaatttaatgacctctggagatgatggagattcttctgatacatttcatatcattaactgtaaaacaaagagctcactcgctgctctctctcttcaaatggttgagtcatctcttactgaattggattggggctttggaaagcttaaagcaatgcttacattaggttatgattgtgctaacattgatgaagatcaaccagcagatgaaataatgctaaggttggctttggagaaagcactctactcgagatcaacattagtagttcaagtgctctcttcctttgcacatatgagccctatggatactcaagcagaacattttctgaaattgactgtcaagttctacaagcttttaactcgcatgtcaaagtcccagattgtacctaaaggctacagacaatccattccaagcctcaagtttcagaaactggcagaagtaacttgcaaaatgctcaccgctcccctttatgattttgtgtttcaacagaatcagcaaatacccataaagggaaacctcgccaaaattagaagagaaaccaaatgtatccctgatcttatttttcagattgaggattatgagaagtatttaatacagctaagcaaactaactaaggtaaaccttttgaggcatgccaaacgcagtgtagcaagagacttccagataaaagataaatctgggggacaacaggaagatgatcacattccagacaatgctgcagcatctgataacgaggctgataaggacgcaatgggtccaaacgcaccagttgaatcatgtgctgacgatgctcaaaaatcatatgctgacgaaaatgcatcatgtgaaagtgggcatgatgaggatgcaggaggtccaaacactccagcagaagcagatgctgatgaaatcattaggtctagcattccatatggtagtccagtccaggagtctgaatctgatagagaagaggaagaattattagcacggacgaagagagctaagacaaaacaagttgtgcaggattctgatgaggatgcagatgagtaggtttttaaacattatcaatagttcaattttcgaagcgtctattgtgggcaacatcatgccaaggtgtatatacataagtttttatgggttatcttgctgattatagacgatgaacacaagagatgtaaaatatatggttttgcaaaaattcttgtgggccatcatgttgattatagaccatgcacagaacatatgtaaaatactttattgtaaattataagtta

SEQ ID NO: 7535 - DNA, 555 bp, Zea Mays
taactggctacttctgctgcgcttgcatgcattcacacgccaacgtgcagctgatgtgcggcggcaccgtggtggccaacgcgacgacaagcatcacaggatccttcatcctcaccccgctccttggctccggcaccggcatcgccggcggtggcagcagcacaatcatcgcgaccattgctggccagcccttcacaatcatcaacgaaatgatcattttcaccacggggctctcctccttagcttaggtcgatcggctggtaacaagagctagcttcatctatctggtggtgtgtgttgatccgcgacgacaaggaactttatataaaatacgaataaatcggcatccagcaattcggatctaatgatcaagttaccatgctttcctttctagcgacacatcccgtgtacttgttactaagctaagctcatatatgtaatatatgtgtgggtatatataaatgaagtcttgcctgttgtggttatatatctcgtttgaacttattctgaagtgatgaaggaatgatgaaatcatgataggttcatggtgtttcc

SEQ ID NO: 7536 - DNA, 808 bp, Zea Mays
ctgagacacaacaagcagcaagctactagctagcctactacagcctcatcacttgttagcctagccatagtccacacgacaaactgatcgatggcgcccaccaagagccatgtcctcctcgccgctctcctcaccgtcgtcgccgccgtcggccagacgcctcgcgctgcggaggggttcaatattcctggtcttggcagcatgctgaatcccattcccgtcgtcgccggtgtagtgccgtgcagcatcgggagctccatcaacccggcgctggtgccagggttccctaacgccaacgtgcagctgatgtgcggcggcaccgtggtggccaacgcgacgacaagcatcacaggatccttcatcctcaccccgctccttggctccggcaccggcatcgccggcggtggcagcagcacaatcatcgcgaccattgctggccagcccttcacaatcatcaacgaaatgatcattttcaccacggggctctcctccttagcttaggtcgatcggctggtaacaagagctagcttcatctatctggtggtgtgtgttgatccgcgacgacaaggaactttatataaaatacgaataaatcggcatccagcaattcggatctaatgatcaagttaccatgctttcctttctagcgacacatcccgtgtacttgttactaagctaagctcatatatgtaatatatgtgtgggtatatataaatgaagtcttgcctgttgtggttatatatctcgtttgaacttattctgaagtgatgaaggaatgatgaaatcatgataggttcatggtgtttcc

SEQ ID NO: 7537 - DNA, 345 bp, Zea Mays
ccgggctccagcagcaccctgagacacaacaagcagcaagctactagctagcctactacagcctcatcacttgttagcctagccatagtccacacgacaaactgatcgatggcgcccaccaagagccatgtcctcctcgccgctctcctcaccgtcgtcgccgccgtcggccagacgcctcgcgctgcggaggggttcaatattcctggtcttggcagcatgctgaatcccattcccgtcgtcgccggtgtagtgccgtgcagcatcgggagctccatcaacccggcgctggtgccagggttccctattacttgccgttcccttatattatatgtttctcttgtt

SEQ ID NO: 7538 - DNA, 814 bp, Zea Mays
aaccagccgagcccctgactgatctataaataagcgctgcctgctcggcatcgtaccttcttctcgaccagatccggaagttctgtgggtagaggactagagactgcagatcgagggtctggcagcgggccgtggcagttgggtgattacgacgaagagagatgggcctcctcgacaagctgtggtcggttcagaaggaaatcatcgtccgacgcatacgagagggcgaccccgccagggacgaccagccaccctcctcccttcgacgtgtgaactgaccgcaccctcgcacttgtttttgctccttcacaagcatcatctacggtagacagggaggaccggagaagaaagacatcaagaggggaacggggatgatctagtcgcgggttgtcttacctctactgtgatatattatattgtagatatatctgtatggtttccttcctagtatgtggcatatgatgtataataataatacgtcgaacgctcatggtactgtgctgtgtgtgccatgtgcataggggtgggtgcctcagggtcagggattcgtgtgcgctatgccgcagcttggatctcgccgtgggccgtgtcgtgtgtttcctcctgctctgctatgtatgtcatcactgacggtgtgtggaggttgggttcatatatatgcttgtaatgttagctggtttgaggtgtggactacgagagtagttttgttcagtgtctggtatctagtagctgaaggtgtttgcttgaactctgtgaactgtgatgtgggataatgctaagaagatgaatagatgatcgttgggttgtcttgtcg

SEQ ID NO: 7539 - DNA, 832 bp, Zea Mays
gtcccggatcccggtggtttacccctgcggcctccgccgctccgcggctctgcctcttcctccgcttctccttgccccgcgtgcgcgaccgacgccgccgccgcctccgccctaagagtcttcgtaggacactccgtcaggaattcttcgggacccttcgccggcgacgagtacatccaccccttcccttcatgctatgctgaaaccaatcactcaaaccctaacttcagctatttgtattcgtctgacgtgacgatgtctggtcatacccaacctgaaggaccacaccaacttgattcaaaacatgctgcaaattcatgccgaaagaatgtacccggtacatcgttcgtctcagatttgagggatcacatccacgagttcatcaatgcctctgcagatgaacaccggacatgcttcacaaagactctcaaaaggatgttcgatatgtcaaagactgtcactgatagatcctctgaagcagaggaagctggacccgaaagtgtcttgccacttcagaccacagtgtcgcggtagaagtttcgccacttcatattgcctccgtagaaataggataaagctagaaagcctcgccctccgcggatggagaaatttgttattttgtcactctcaattttgactctattaggtctataactggtcggatcatctgtgtctatgatttgtgggtctgattacatattgacaaagcccacagataataatagcaaaattatcaatcgctcccgctgaggaggccagttgcccagactaatacgtttgtacattgaatgcaataattttagattatatggcttctggattttgattttca

SEQ ID NO: 7540 - DNA, 1552 bp, Zea Mays
caacatccaggtctgctggaggcgccatacagtcccggatcccggtggtttacccctgcggcctccgccgctccgcggctctgcctcttcctccgcttctccttgccccgcgtgcgcgaccgacgccgccgccgcctccgccctaagagtcttcgtaggacactccgtcaggaattcttcgggacccttcgccggcgacgagtacatccaccccttcccttcatgctatgctgaaaccaatcactcaaaccctaacttcagctatttgtattcggttcgaatctaattaccagcatgtacatgtattatgcctaccaacatcgattttgttttgcaaattttattgggtgtacatgtcttttactgggtccgcgccttgactcgatttgagtctgtatatggtcttggtggctaattagccaaccacataccgcagccagaccatggcagcaacccctgtgtggattggtcagtaagcacacctatattaactcgtgttgtgccaatcgaaggtgtcaccctgcctagtgtggttccttatctgacaccaactcacaactcggcatgaaacaactgatttttatagtttcctgtagatcaatatgaaagtgttttcctcgcaaaaggggaaaaaagaagagatactgaaatttagtgcctatagtgttcttctggacccagaccctagaccaccccactcaggttggagcctccggcactggctctgcctttttttactgttcttttagacctgatgctgaatgactaattgactattctcgttttgatattctgtaacgtcttcgcgttttatcttgaggtttgtggatacagagaagcatggtgactcattagccacttgcatgcttcacctagatatgattttcgcggctgtcttatataatggtctcatgggttggagacagtgctgtcttattgcatattcacggaagagtctgaacatctgacgtgacgatgtctggtcatacccaacctgaaggaccacaccaacttgattcaaaacatgctgcaaattcatgccgaaagaatgtacccggtacatcgttcgtctcagatttgagggatcacatccacgagttcatcaatgcctctgcagatgaacaccggacatgcttcacaaagactctcaaaaggatgttcgatatgtcaaagactgtcactgatagatcctctgaagcagaggaagctggacccgaaagtgtcttgccacttcagaccacagtgtcgcggtagaagtttcgccacttcatattgcctccgtagaaataggataaagctagaaagcctcgccctccgcggatggagaaatttgttattttgtcactctcaattttgactctattaggtctataactggtcggatcatctgtgtctatgatttgtgggtctgattacatattgacaaagcccacagataataatagcaaaattatcaatcgctcccgctgaggaggccagttgcccagactaatacgtttgtacattgaatgcaataattttagattatatggcttctggattttgattttca

SEQ ID NO: 7541 - DNA, 811 bp, Zea Mays
gcttgctggatcagaccgaaacaacatccaggtctgctggaggcgccatacagtcccggatcccggtggtttacccctgcggcctccgccgctccgcggctctgcctcttcctccgcttctccttgccccgcgtgcgcgaccgacgccgccgccgcctccgccctaagagtcttcgtaggacactccgtcaggaattcttcgggacccttcgccggcgacgatctgacgtgacgatgtctggtcatacccaacctgaaggaccacaccaacttgattcaaaacatgctgcaaattcatgccgaaagaatgtacccggtacatcgttcgtctcagatttgagggatcacatccacgagttcatcaatgcctctgcagatgaacaccggacatgcttcacaaagactctcaaaaggatgttcgatatgtcaaagactgtcactgatagatcctctgaagcagaggaagctggacccgaaagtgtcttgccacttcagaccacagtgtcgcggtagaagtttcgccacttcatattgcctccgtagaaataggataaagctagaaagcctcgccctccgcggatggagaaatttgttattttgtcactctcaattttgactctattaggtctataactggtcggatcatctgtgtctatgatttgtgggtctgattacatattgacaaagcccacagataataatagcaaaattatcaatcgctcccgctgaggaggccagttgcccagactaatacgtttgtacattgaatgcaataattttagattatatggcttctggattttgattttca

SEQ ID NO: 7542 - DNA, 1872 bp, Zea Mays
aagatcgggcgtcgcccgtccgtctcctctccccgctccgctggtcgccttctcccctccccgcgaactcgggctcaaagcaaaccaaaccccttctagggtttgcgctccgggcatgatccccttgtagccaccgcctcccatggccctagccgtgtcctgctggccatgaccacctcggcttccccactcttccccaacccgcgcaagcgccacctcgacgcctccccccttccccgccacttccacggcccgcagagccaaacccgcctaagccagcgccaccgccgccggttcttcttgccgctaccaccgaaggcgcggtccttcgcttccgacatgggaaatcacatgtccagtgccttcggttggcccagtgatgacgggcgggggctcctctgttgctggatcggcaaggcgcggggtctcacggtggccatggatgtggaggcggggacgggactgcatttggtggaccggcggagggttacggattcgaggaagactacgttgaaggaggaggcggtgaagcctccccaatggaagaaaaggaggcccttctacaaggaggcgttggaggcagcagcgacacattacgatccgaggctggaggcaatcgggatcgagataaggctccaaaaggagaagcttgcctatataccaaagtcggataaggctgccaaggaggatatgtctgaactatttaaacctctcactgctgaggaggaaaatgatgttcatgactgtctctacagtagaggctcgagtagcaaagttctagtgctgcatgaaccatctaacattgaggttagcaaagagaaattccagtgcttgagacgtggctgctggttaaatgatgaggttattaatctgtaccttgaattgttgaaggagcgagaaaaaagagaaccaaacaggtttctgaaatgtcatttctttaatacattcttttataagaagcttgcttgtggaaaaaatggttatgattacaaatctgttaaaagatggacctcccaaaggaagttgggatatgaactcattgaatgcgataaagtaatatatttgtccctgtgcataaagatgtacattggtgtttagcaattataaacgtgaaggaaaatttctttcagtatcttgattcccttggtggcatggatcataatgtaccaaaagtactggctcgatatatttcagaggaagtgaaggacaaaagtaacagagtaatcaacaccagtttgtggcatgaagagctagttgatattcctttacagcggaatgggtgggactgcggtatgtttatgctcaagtacattgatttccacagcagaggactgcccctgtcttttagtcaggaacacatggagtattttaggaagaggacagcgaaggagatcttaagactaagagctgactgatggatagacattcatcactttttggaacagaggctgactttttttactgcattttggggattataataaataaaagctgctaagtcaagtctatggcattgttgagcatgctcagggtggggtcatctacctgagatggttggtaatgtggccctgataatgtaaatactatagatattctgtagagaaattttgtttagggatttatttgactcggagaagcagtgaggggggaaatagatgtagctacgctgatattcgttgttggtttaaagttgtttcagattaatttgttcttgtggaattattttgcagccatggttgtcatacttaagttacccttgaatctccttggagaatagttgtatccgaaatctaatttagcgctaaagggttggctgccctggtctggcctagacggtggactgatgtcaggacttttacattaaggaagggc

SEQ ID NO: 7543 - DNA, 1829 bp, Zea Mays
aagatcgggcgtcgcccgtccgtctcctctccccgctccgctggtcgccttctcccctccccgcgaactcgggctcaaagcaaaccaaaccccttctagggtttgcgctccgggcatgatccccttgtagccaccgcctcccatggccctagccgtgtcctgctggccatgaccacctcggcttccccactcttccccaacccgcgcaagcgccacctcgacgcctccccccttccccgccacttccacggcccgcagagccaaacccgcctaagccagcgccaccgccgccggttcttcttgccgctaccaccgaaggcgcggtccttcgcttccgacatgggaaatcacatgtccagtgccttcggttggcccagtgatgacgggcgggggctcctctgttgctggatcggcaaggcgcggggtctcacggtggccatggatgtggaggcggggacgggactgcatttggtggaccggcggagggttacggattcgaggaagactacgttgaaggaggaggcggtgaagcctccccaatggaagaaaaggaggcccttctacaaggaggcgttggaggcagcagcgacacattacgatccgaggctggaggcaatcgggatcgagataaggctccaaaaggagaagcttgcctatataccaaagtcggataaggctgccaaggaggatatgtctgaactatttaaacctctcactgctgaggaggaaaatgatgttcatgactgtctctacagtagaggctcgagtagcaaagttctagtgctgcatgaaccatctaacattgaggttagcaaagagaaattccagtgcttgagacgtggctgctggttaaatgatgaggttattaatctgtaccttgaattgttgaaggagcgagaaaaaagagaaccaaacagcttgcttgtggaaaaaatggttatgattacaaatctgttaaaagatggacctcccaaaggaagttgggatatgaactcattgaatgcgataaagtaatatatttgtccctgtgcataaagatgtacattggtgtttagcaattataaacgtgaaggaaaatttctttcagtatcttgattcccttggtggcatggatcataatgtaccaaaagtactggctcgatatatttcagaggaagtgaaggacaaaagtaacagagtaatcaacaccagtttgtggcatgaagagctagttgatattcctttacagcggaatgggtgggactgcggtatgtttatgctcaagtacattgatttccacagcagaggactgcccctgtcttttagtcaggaacacatggagtattttaggaagaggacagcgaaggagatcttaagactaagagctgactgatggatagacattcatcactttttggaacagaggctgactttttttactgcattttggggattataataaataaaagctgctaagtcaagtctatggcattgttgagcatgctcagggtggggtcatctacctgagatggttggtaatgtggccctgataatgtaaatactatagatattctgtagagaaattttgtttagggatttatttgactcggagaagcagtgaggggggaaatagatgtagctacgctgatattcgttgttggtttaaagttgtttcagattaatttgttcttgtggaattattttgcagccatggttgtcatacttaagttacccttgaatctccttggagaatagttgtatccgaaatctaatttagcgctaaagggttggctgccctggtctggcctagacggtggactgatgtcaggacttttacattaaggaagggc

SEQ ID NO: 7544 - DNA, 3607 bp, Zea Mays
cgtccttcaacctctaaatgtggcggaagggaatcgtccaccaaacttcgacctctaaatgtggcggaagggaatcgtccaccaaacgtcagttgcttcctcctcccgcctcgatctgaaaagttccgagctcgtgtctatgctgcttgcgaccttcttcctcgaggcgatagttggattgcaacggttctcgtcggagctcgacacgaagctgagcggcaggagggcgaagtgtggcgaatatgattttaggctggtcctgatttagttgagataaaggtaagcaagtcgtcgtagcaatcaaggtcgagctcggtcgccatggcggcgcggaggacttgggacgcaccatacctatctttgtcgcgtgttggtgagttggcgagtctggttgcagtagcttcgctttggtctgtgaggtggatggcgagcgacggctgcaaaaagtgacgtcggaaaagacgcgtgcaaggtgctcgatgtaatgcctgtgtacaacaaatgtgaaggaaatatacgactagtaatcagtttgtcattttatatccatacaaaactattaattaattcatgatgctggagtatttcatcatttttaatggcgtacgtttaatccaattgaaatataagaaaaacaaagaataaatatggtagtttatgtattctaacgctatagatatagaggaccgaatttagaaaatattgttgaagatgagaaatatatagaagaccaaaatcttttaaaatgtactataaagaaataaaatatttttttagagggtgaaatttatgacgttcctcgaggctggagaagcctgaaggtgctcctggactacccagccggccaggcgttcgcgttcacgtggcacgtgagagtcgcgtgatgcggtgcatgggccggcccgtacctatttggaatttcacaaaaaaaaaggggtgggggaagatcgggcgtcgcccgtccgtctcctctccccgctccgctggtcgccttctcccctccccgcgaactcgggctcaaagcaaaccaaaccccttctagggtttgcgctccgggcatgatccccttgtagccaccgcctcccatggccctagccgtgtcctgctggccatgaccacctcggcttccccactcttccccaacccgcgcaagcgccacctcgacgcctccccccttccccgccacttccacggcccgcagagccaaacccgcctaagccagcgccaccgccgccggttcttcttgccgctaccaccgaaggcgcggtccttcgcttccgacatgggaaatcacatgtccagtgccttcggttggcccagtgatgacgggcgggggctcctctgttgctggatcggcaaggcgcggggtctcacggtggccatggatgtggaggcggggacgggactgcatttggtggaccggcggagggttacggattcgaggaagactacgttgaaggaggaggcggtgaagcctccccaatggaagaaaaggaggcccttctacaaggaggcgttggaggcagcagcgacacattacgatccgaggctggaggcaatcgggatcgagataaggctccaaaaggagaagcttgcctatataccaaagtcggataaggctgccaaggaggatatgtctgaactatttaaacctctcactgctgaggaggaaaatgatgttcatgactgtctctacagtagaggctcgagtagcaaagttctagtgctgcatgaaccatctaacattgaggttagcaaagagaaattccagtgcttgagacgtggctgctggttaaatgatgaggttattaatctgtaccttgaattgttgaaggagcgagaaaaaagagaaccaaacaggatgtttgcatcttttttccgtactaaaattggcatttttttgtgtatcctccttgaagaagttttttgttttgtttctaaatgaactagttgatgttgaattgttgattgaattttcagtattagctcttataagaaatgtagatgacgtaatcaaatttgaatgatagcatatcatagtttagttttgtggtggttcatttattacatcaagtattaatccctcttatttataaatgtgttaatagcttggataattagttgtcaagttgtacatttggctgctaattctgcacaaatctatatctgttatgaacttgcattactaatttatatatggtagttgctatagttttaatgtgatcgatttgtaatggtatgtggtcgtatagttaggaaagtttaattacatattttccatggcggtttacatttgtagatataattggcatcctgaatctctgagttgttcgacactttaccttcttggtttcttagatcgtattatctacccaaaccccttagattgcattattattacttgatttgctttcttggttccttatactatactatcttgctttgcacttttgtttggtattgtatactgataatatttgatatatctttgtttcttgtttggtgtacccaaattgtatttaatgaaatcacatattggcctctgtatatcagttattagctatgttcacttttgtttaaacccctttctcactgatgacatggacttctgccttgcatgtatctgccttcgtttattgttcatggatttttttttgcctatgaatgttgatccttactgacttcctgaatgttactcagcttgcttgtggaaaaaatggttatgattacaaatctgttaaaagatggacctcccaaaggaagttgggatatgaactcattgaatgcgataaaatatttgtccctgtgcataaagatgtacattggtgtttagcaattataaacgtgaaggaaaatttctttcagtatcttgattcccttggtggcatggatcataatgtaccaaaagtactggctcgatatatttcagaggaagtgaaggacaaaagtaacagagtaatcaacaccagtttgtggcatgaagagctagttgatattcctttacagcggaatgggtgggactgcggtatgtttatgctcaagtacattgatttccacagcagaggactgcccctgtcttttagtcaggaacacatggagtattttaggaagaggacagcgaaggagatcttaagactaagagctgactgatggatagacattcatcactttttggaacagaggctgactttttttactgcattttggggattataataaataaaagctgctaagtcaagtctatggcattgttgagcatgctcagggtggggtcatctacctgagatggttggtaatgtggccctgataatgtaaatactatagatattctgtagagaaattttgtttagggatttatttgactcggagaagcagtgaggggggaaatagatgtagctacgctgatattcgttgttggtttaaagttgtttcagattaatttgttcttgtggaattattttgcagccatggttgtcatacttaagttacccttgaatctccttggagaatagttgtatccgaaatctaatttagcgctaaagggttggctgccctggtctggcctagacggtggactgatgtcaggacttttacattaaggaagggc

SEQ ID NO: 7545 - DNA, 667 bp, Zea Mays
gggagatccgccgtcggcacctagagccgtggatgccgccagagctttaggaaggggtccaagggtatcgttagacgttgtagaagcttgactgtgaccgaacaaagcattgaatcgactgagccatcggcaattgctcatcggtggtggaggaccaccgcggggaacgtgcgacatggtgggcaacatcacctccgccgctaccgttgatgagcaagtgattgacgacccaggtgttcaacgggtagaagttgctgagcaggagctcattgaaggaagttatgcccttgaccacttttatttacccaataatgttctctataatcattttggcatgaaccaaggtgtttgtattgttgatcagccttacgattcacatgaactcacacctttggtgagttatgcacattattccccacaacttgttgagctatgatcttttgtgagctcactcttgcgatatataaaccccccacaagagaagaacatgtggtccaggaggagccttacaacgaggagtacgagcttatctaggtggcgtctcccagacagctttatggcgcaacgaataatatttagttcgctttattgttatcatttatttctgtaagacttccgctatgtaataatgatacttgtgacatttatctctatacactttgtcatt

SEQ ID NO: 7546 - DNA, 2101 bp, Zea Mays
ctggctcctagttcattttgaaagatcctcactacagtatacgaagaagctggagccgcagccatctgaagctctagcaaacgttgacattgatgcgataaatggtaataataaagaaacttcaaaggcagcgaagcatttaatcaaacttttcccaaataaagtgatactcgaggcaccacaagatgaaatggagctttcacggtggaaccagatgttaaaccgagatattgaagtccttaaaggaaatgcaaacatttcaaaaatgcgttcttttctaacaagggttggtttggaatgcactgatcttgaggcgatattggtcaaggatcgcgttcttacaaatgagtgtattgataaaataattggttttgctttgagccatcaacttaagaactgtacaaatccagacccccctttgagtaatgtgcagtttgttctatccagcgaaagccttaagcatggtattgacatgttggaaagtatccagtctggctcgaagagcagcactaaaaggaaatcactgaaggatattgctacggaaaatgagtttgaaaagaggcttcttgcagatgttatccctccacatgaaatcggtgttacctttgaggacattggagctttagaaagtgtcaaagatactctgaaggagttagtgatgcttcctttgcaaagacctgaactttttaaccgaggacaacttatgaagccgtgtaaaggaattttactttttggcccacctggtactggaaagacaatgcttgctaaggctgtggcaactgaggctggtgctaatttcataaacatatcgatgtcaagcatctcttcaaagtggcttggtgaaggagaaaaattcgtgaaagctgttttttcactggcaagtaaaattgctccaagtgtaatttttgtggacgaggttgatggcatgctgggaaggcgggagaaccctggagaacatgaagccatgcgtaagatgaaaaatgagtttatggtgaactgggatggtctgagaacaaaggagaaagaacgtgtattagtacttgctgcaactaacaggccatttgatcttgatgaggctgttattaggcggcttccaaggaggttgatggtgaatttgccagatgcatcaaataggagaaagattcttagtgtaatactagccaaggaagatttggcagacgatgttgatctagaagctatagctaacttgacagaagggtactcgggtagtgatctcaagaatctttgtgttactgctgctcatcgtcctattagggagattcttgaaaaggagaagaaggagagagcttcagcagaaacagaaaataggccattgcctctgtcgcacactagcaatgatgtccgtgcattaagaataagtgatttcatacatgcgcatgaacaggtgtgtgcaagtgtttcctcagattccagtaacatgaacgagcttgtgcaatggaatgatctctatggagaaggcgggtcaaggaaaaagacaacgctaagctacttcatgtagctgatgttgcaagtatatcgggagaagtgccctggcacaaagcagaaatggttggaggcagttgggggtgtgtatcgggtgcagttggaaaagagctaggttcacctgccatccatccattgagagaattgatggctcaggtggagcggaatggagtagtatacacattggttgctgcctccactctgggccatgtatcatgcatctggacatgacggatggtctggcttgcagttgtcctaacaacagttttgagtgcaacatatcactgtctgggaaagaaaagaaaagaaaatataccatttgtgttgttcccactccacaggaagcacggcgacgacatcgcccaacaacccttttccatcgtttcttaaaaaataattcattatttaggttgtaaacatttagagcctgtgcaagtgtacagtatgagcatcaggagtattaacctagtgttgatgtctatacctaatctaatttattgattagaatcatttaacatgaaatacatgattattttgtatcttcgtgccttcgttaggttgataatggtcgaattaaaactaaccttgtggttatgat

SEQ ID NO: 7547 - DNA, 3214 bp, Zea Mays
ggctgccaaggttaccttaaatggaggagatgaaattatcttccgttcaccagtgaggcatgcttatatatttgagcaacttcatcaggagaaatcaagcactccagcattatcctccacttgcagtagtatccagcaggggcagtgctcacatttcaaagatattcagggtcatttatcatctaaagggcacaaagtcccaaccatttactttggaagaggtcggtcttcattgttgcctagtggttcatcagcagatccactcctgcttaatttatgtaaaacgatggagggccagagccagcatagctccgaagataatatatcatctggtcggtttcagctaataaaggaggatttgataaatgcaacggttgacgcgagtgacatttttgagtcatttgatagttgcccatattatctaagtgatcataccaaatgtgccctcatgtcatcagcatatgtacatttacactgcaaagactacttgaagtttacaaaagatatatcttctcttagtcaacgagtgctgctatctggcccaacaggaactgacatctatcaagaatatctggtgaaggcacttgcaaagaattttggtgctagattgctcactgtagattcttccatgctgtttggtgggcaaacttccaaggagccggagacatacaaaaagggtgatagagtgaggtatattggttcggtacagtcgacaggcgttattcttgatggacagagccccccagattttggttcacagggtgaaatatttcttcctttcgaagaaaatagatcatcgaaggttggtgtaaggtttgataaaaaaattctgggaggaaacgatcttggaggcaattgcgaagttgaccatggtttgttttgtccagttgattctttatgcctcgacattccaggatgggaggttacatccaaacatccattagatgtgatatttgagtttatctctgaagaaattcggcatggcccttttatcctttttctgaaggacacggagaaaatttgtggcaataatgattactatcatggtctgaaaagcaagctaaaacatttcccagctggtgcttttataattggatctcaaatccagcctgccaatcgcaaagagaaggcaaagggtagttctccttttctttcgaagttcccatacagccaaactatacttgacctcgcattacaggacattgatgcgataaatggtaataataaagaaacttcaaaggcagcgaagcatttaatcaaacttttcccaaataaagtgatactcgaggcaccacaagatgaaatggagctttcacggtggaaccagatgttaaaccgagatattgaagtccttaaaggaaatgcaaacatttcaaaaatgcgttcttttctaacaagggttggtttggaatgcactgatcttgaggcgatattggtcaaggatcgcgttcttacaaatgagtgtattgataaaataattggttttgctttgagccatcaacttaagaactgtacaaatccagacccccctttgagtaatgtgcagtttgttctatccagcgaaagccttaagcatggtattgacatgttggaaagtatccagtctggctcgaagagcagcactaaaaggaaatcactgaaggatattgctacggaaaatgagtttgaaaagaggcttcttgcagatgttatccctccacatgaaatcggtgttacctttgaggacattggagctttagaaagtgtcaaagatactctgaaggagttagtgatgcttcctttgcaaagacctgaactttttaaccgaggacaacttatgaagccgtgtaaaggaattttactttttggcccacctggtactggaaagacaatgcttgctaaggctgtggcaactgaggctggtgctaatttcataaacatatcgatgtcaagcatctcttcaaagtggcttggtgaaggagaaaaattcgtgaaagctgttttttcactggcaagtaaaattgctccaagtgtaatttttgtggacgaggttgatggcatgctgggaaggcgggagaaccctggagaacatgaagccatgcgtaagatgaaaaatgagtttatggtgaactgggatggtctgagaacaaaggagaaagaacgtgtattagtacttgctgcaactaacaggccatttgatcttgatgaggctgttattaggcggcttccaaggaggttgatggtgaatttgccagatgcatcaaataggagaaagattcttagtgtaatactagccaaggaagatttggcagacgatgttgatctagaagctatagctaacttgacagaagggtactcgggtagtgatctcaagaatctttgtgttactgctgctcatcgtcctattagggagattcttgaaaaggagaagaaggagagagcttcagcagaaacagaaaataggccattgcctctgtcgcacactagcaatgatgtccgtgcattaagaataagtgatttcatacatgcgcatgaacaggtgtgtgcaagtgtttcctcagattccagtaacatgaacgagcttgtgcaatggaatgatctctatggagaaggcgggtcaaggaaaaagacaacgctaagctacttcatgtagctgatgttgcaagtatatcgggagaagtgccctggcacaaagcagaaatggttggaggcagttgggggtgtgtatcgggtgcagttggaaaagagctaggttcacctgccatccatccattgagagaattgatggctcaggtggagcggaatggagtagtatacacattggttgctgcctccactctgggccatgtatcatgcatctggacatgacggatggtctggcttgcagttgtcctaacaacagttttgagtgcaacatatcactgtctgggaaagaaaagaaaagaaaatataccatttgtgttgttcccactccacaggaagcacggcgacgacatcgcccaacaacccttttccatcgtttcttaaaaaataattcattatttaggttgtaaacatttagagcctgtgcaagtgtacagtatgagcatcaggagtattaacctagtgttgatgtctatacctaatctaatttattgattagaatcatttaacatgaaatacatgattattttgtatcttcgtgccttcgttaggttgataatggtcgaattaaaactaaccttgtggttatgat

SEQ ID NO: 7548 - DNA, 4725 bp, Zea Mays
cccttcgcccctttctctctctctctctctcgcgtgttctcgcgtcgccgtcgccgctggtgcgagatggtcgagacgaggcggagcgccgccgcgaagcgcccggcggcgggggaagaggataagggggcgccggcatcgcctgcatcggctcccgcggagaacgcgggggcgggtccgagggcgggtgacgatgtcgcgtcgtcgcagcccccgaagcgagccaaggttgggtgcacggaggcggacaccgagaagccgttggtggcgccggcagaagtcggcaccgttgcgggcccactgcccaacacggctggtctgcaggcgctgaccggcgccatggacaagctggaggccctcttgaggcccaaggagggtcagtccaatccggccgggcataagcggggcactaacgataaagatataacggcgaagataaagagagccatggatttatcggaggatttatcagcaaagataaagaaaaccaaggataatgtggctgggatattgaataagccacaggcggcagccaccagcaggcgtcaggagccctggtgcagactaatttcacaatataccatgcaccctaccctttctatttatggtgcgcttttcactatcggtcatggagcacatcatgatttcagactgggcgaatcatccactgcctcacctgtttgtagactgaagcaggctaagcgaggtgcactccttgaagtctttgaatccaaagttgtccgtgtcaatgggaaatctttggacaaggctgccaaggttaccttaaatggaggagatgaaattatcttccgttcaccagtgaggcatgcttatatatttgagcaacttcatcaggagaaatcaagcactccagcattatcctccacttgcagtagtatccagcaggggcagtgctcacatttcaaagatattcagggtcatttatcatctaaagggcacaaagtcccaaccatttactttggaagaggtcggtcttcattgttgcctagtggttcatcagcagatccactcctgcttaatttatgtaaaacgatggagggccagagccagcatagctccgaagataatatatcatctggtcggtttcagctaataaaggaggatttgataaatgcaacggttgacgcgagtgacatttttgagtcatttgatagttgcccatattatctaagtgatcataccaaatgtgccctcatgtcatcagcatatgtacatttacactgcaaagactacttgaagtttacaaaagatatatcttctcttagtcaacgagtgctgctatctggcccaacaggaactgacatctatcaagaatatctggtgaaggcacttgcaaagaattttggtgctagattgctcactgtagattcttccatgctgtttggtgggcaaacttccaaggagccggagacatacaaaaagggtgatagagtgaggtatattggttcggtacagtcgacaggcgttattcttgatggacagagccccccagattttggttcacagggtgaaatatttcttcctttcgaagaaaatagatcatcgaaggttggtgtaaggtttgataaaaaaattctgggaggaaacgatcttggaggcaattgcgaagttgaccatggtttgttttgtccagttgattctttatgcctcgacattccaggatgggaggttacatccaaacatccattagatgtgatatttgagtttatctctgaagaaattcggcatggcccttttatcctttttctgaaggacacggagaaaatttgtggcaataatgattactatcatggtctgaaaagcaagctaaaacatttcccagctggtgcttttataattggatctcaaatccagcctgccaatcgcaaagagaaggcaaagggtagttctccttttctttcgaagttcccatacagccaaactatacttgacctcgcattacaggcctgtctggtactgctctggctctagctctggctccggcgtctccttgctatagtgcgtggaggagccggggccgctgaagcaaaaaaatagtggctttgtgtgttcgctggctcctagttcattttgaaagatcctcactacagtatacgaagaagctggagccgcagccatctgaagctctagcaaacgttgtaaggtttctgatggaccatctactaccaatttatttatgatcttatgagcatttatagcttgtatatatattgtatggtcaaactgactagtctggattttgaattatgaccagaatgacatgaccatttgttggcatgctgtcataatagttttacaaatacgaggcctggtttttgttcccaggcaagggccgcaaggctgctttgccaggcatgattccctggcattctatttcggtcgcttggggttgagatcacattgcctggctggcaagctgcctgaccgggcacgatccaaaaagccccaaattgcggtgttacatgcacagaactacataaagtttcatttatgtcatacccagatatccatttttgtactcccagcttacggtttatcttcttatgtctcaatttgtcttccactatgacttccattattatactacgggagggcgtctgcagtcttgttatttgtactaatcatatgttgtctagtttctactttgttggcgaattccatattataacctaatctatggaaatgcaggacattgatgcgataaatggtaataataaagaaacttcaaaggcagcgaagcatttaatcaaacttttcccaaataaagtgatactcgaggcaccacaagatgaaatggagctttcacggtggaaccagatgttaaaccgagatattgaagtccttaaaggaaatgcaaacatttcaaaaatgcgttcttttctaacaagggttggtttggaatgcactgatcttgaggcgatattggtcaaggatcgcgttcttacaaatgagtgtattgataaaataattggttttgctttgagccatcaacttaagaactgtacaaatccagacccccctttgagtaatgtgcagtttgttctatccagcgaaagccttaagcatggtattgacatgttggaaagtatccagtctggctcgaagagcagcactaaaaggaaatcactgaaggatattgctacggaaaatgagtttgaaaagaggcttcttgcagatgttatccctccacatgaaatcggtgttacctttgaggacattggagctttagaaagtgtcaaagatactctgaaggagttagtgatgcttcctttgcaaagacctgaactttttaaccgaggacaacttatgaagccgtgtaaaggaattttactttttggcccacctggtactggaaagacaatgcttgctaaggctgtggcaactgaggctggtgctaatttcataaacatatcgatgtcaagcatctcttcaaagtggcttggtgaaggagaaaaattcgtgaaagctgttttttcactggcaagtaaaattgctccaagtgtaatttttgtggacgaggttgatggcatgctgggaaggcgggagaaccctggagaacatgaagccatgcgtaagatgaaaaatgagtttatggtgaactgggatggtctgagaacaaaggagaaagaacgtgtattagtacttgctgcaactaacaggccatttgatcttgatgaggctgttattaggcggcttccaaggaggttgatggtgaatttgccagatgcatcaaataggagaaagattcttagtgtaatactagccaaggaagatttggcagacgatgttgatctagaagctatagctaacttgacagaagggtactcgggtagtgatctcaagaatctttgtgttactgctgctcatcgtcctattagggagattcttgaaaaggagaagaaggagagagcttcagcagaaacagaaaataggccattgcctctgtcgcacactagcaatgatgtccgtgcattaagaataagtgatttcatacatgcgcatgaacaggtgtgtgcaagtgtttcctcagattccagtaacatgaacgagcttgtgcaatggaatgatctctatggagaaggcgggtcaaggaaaaagacaacgctaagctacttcatgtagctgatgttgcaagtatatcgggagaagtgccctggcacaaagcagaaatggttggaggcagttgggggtgtgtatcgggtgcagttggaaaagagctaggttcacctgccatccatccattgagagaattgatggctcaggtggagcggaatggagtagtatacacattggttgctgcctccactctgggccatgtatcatgcatctggacatgacggatggtctggcttgcagttgtcctaacaacagttttgagtgcaacatatcactgtctgggaaagaaaagaaaagaaaatataccatttgtgttgttcccactccacaggaagcacggcgacgacatcgcccaacaacccttttccatcgtttcttaaaaaataattcattatttaggttgtaaacatttagagcctgtgcaagtgtacagtatgagcatcaggagtattaacctagtgttgatgtctatacctaatctaatttattgattagaatcatttaacatgaaatacatgattattttgtatcttcgtgccttcgttaggttgataatggtcgaattaaaactaaccttgtggttatgat

SEQ ID NO: 7549 - DNA, 3953 bp, Zea Mays
cttccccttcgcccctttctctctctctctctctcgcgtgttctcgcgtcgccgtcgccgctggtgcgagatggtcgagacgaggcggagcgccgccgcgaagcgcccggcggcgggggaagaggataagggggcgccggcatcgcctgcatcggctcccgcggagaacgcgggggcgggtccgagggcgggtgacgatgtcgcgtcgtcgcagcccccgaagcgagccaaggttgggtgcacggaggcggacaccgagaagccgttggtggcgccggcagaagtcggcaccgttgcgggcccactgcccaacacggctggtctgcaggcgctgaccggcgccatggacaagctggaggccctcttgaggcccaaggagggtcagtccaatccggccgggcataagcggggcactaacgataaagatataacggcgaagataaagagagccatggatttatcggaggatttatcagcaaagataaagaaaaccaaggataatgtggctgggatattgaataagccacaggcggcagccaccagcaggcgtcaggagccctggtgcagactaatttcacaatataccatgcaccctaccctttctatttatggtgcgcttttcactatcggtcatggagcacatcatgatttcagactgggcgaatcatccactgcctcacctgtttgtagactgaagcaggctaagcgaggtgcactccttgaagtctttgaatccaaagttgtccgtgtcaatgggaaatctttggacaaggctgccaaggttaccttaaatggaggagatgaaattatcttccgttcaccagtgaggcatgcttatatatttgagcaacttcatcaggagaaatcaagcactccagcattatcctccacttgcagtagtatccagcaggggcagtgctcacatttcaaagatattcagggtcatttatcatctaaagggcacaaagtcccaaccatttactttggaagaggtcggtcttcattgttgcctagtggttcatcagcagatccactcctgcttaatttatgtaaaacgatggagggccagagccagcatagctccgaagataatatatcatctggtcggtttcagctaataaaggaggatttgataaatgcaacggttgacgcgagtgacatttttgagtcatttgatagttgcccatattatctaagcatatgtacatttacactgcaaagactacttgaagtttacaaaagatatatcttctcttagtcaacgagtgctgctatctggcccaacaggaactgacatctatcaagaatatctggtgaaggcacttgcaaagaattttggtgctagattgctcactgtagattcttccatgctgtttggtgggcaaacttccaaggagccggagacatacaaaaagggtgatagagtgaggtatattggttcggtacagtcgacaggcgttattcttgatggacagagccccccagattttggttcacagggtgaaatatttcttcctttcgaagaaaatagatcatcgaaggttggtgtaaggtttgataaaaaaattctgggaggaaacgatcttggaggcaattgcgaagttgaccatggtttgttttgtccagttgattctttatgcctcgacattccaggatgggaggttacatccaaacatccattagatgtgatatttgagtttatctctgaagaaattcggcatggcccttttatcctttttctgaaggacacggagaaaatttgtggcaataatgattactatcatggtctgaaaagcaagctaaaacatttcccagctggtgcttttataattggatctcaaatccagcctgccaatcgcaaagagaaggcaaagggtagttctccttttctttcgaagttcccatacagccaaactatacttgacctcgcattacaggacattgatgcgataaatggtaataataaagaaacttcaaaggcagcgaagcatttaatcaaacttttcccaaataaagtgatactcgaggcaccacaagatgaaatggagctttcacggtggaaccagatgttaaaccgagatattgaagtccttaaaggaaatgcaaacatttcaaaaatgcgttcttttctaacaagggttggtttggaatgcactgatcttgaggcgatattggtcaaggatcgcgttcttacaaatgagtgtattgataaaataattggttttgctttgagccatcaacttaagaactgtacaaatccagacccccctttgagtaatgtgcagtttgttctatccagcgaaagccttaagcatggtattgacatgttggaaagtatccagtctggctcgaagagcagcactaaaaggaaatcactgaaggatattgctacggaaaatgagtttgaaaagaggcttcttgcagatgttatccctccacatgaaatcggtgttacctttgaggacattggagctttagaaagtgtcaaagatactctgaaggagttagtgatgcttcctttgcaaagacctgaactttttaaccgaggacaacttatgaagccgtgtaaaggaattttactttttggcccacctggtactggaaagacaatgcttgctaaggctgtggcaactgaggctggtgctaatttcataaacatatcgatgtcaagcatctcttcaaagtggcttggtgaaggagaaaaattcgtgaaagctgttttttcactggcaagtaaaattgctccaagtgtaatttttgtggacgaggttgatggcatgctgggaaggcgggagaaccctggagaacatgaagccatgcgtaagatgaaaaatgagtttatggtgaactgggatggtctgagaacaaaggagaaagaacgtgtattagtacttgctgcaactaacaggccatttgatcttgatgaggctgttattaggcggcttccaaggaggttgatggtgaatttgccagatgcatcaaataggagaaagattcttagtgtaatactagccaaggaagatttggcagacgatgttgatctagaagctatagctaacttgacagaagggtactcgggtagtgatctcaagaatctttgtgttactgctgctcatcgtcctattagggagattcttgaaaaggagaagaaggagagagcttcagcagaaacagaaaataggccattgcctctgtcgcacactagcaatgatgtccgtgcattaagaataagtgatttcatacatgcgcatgaacaggtgtgtgcaagtgtttcctcagattccagtaacatgaacgagcttgtgcaatggaatgatctctatggagaaggcgggtcaaggaaaaagacaacgctaagctacttcatgtagctgatgttgcaagtatatcgggagaagtgccctggcacaaagcagaaatggttggaggcagttgggggtgtgtatcgggtgcagttggaaaagagctaggttcacctgccatccatccattgagagaattgatggctcaggtggagcggaatggagtagtatacacattggttgctgcctccactctgggccatgtatcatgcatctggacatgacggatggtctggcttgcagttgtcctaacaacagttttgagtgcaacatatcactgtctgggaaagaaaagaaaagaaaatataccatttgtgttgttcccactccacaggaagcacggcgacgacatcgcccaacaacccttttccatcgtttcttaaaaaataattcattatttaggttgtaaacatttagagcctgtgcaagtgtacagtatgagcatcaggagtattaacctagtgttgatgtctatacctaatctaatttattgattagaatcatttaacatgaaatacatgattattttgtatcttcgtgccttcgttaggttgataatggtcgaattaaaactaaccttgtggttatgat

SEQ ID NO: 7550 - DNA, 3971 bp, Zea Mays
gttttgtattctactccgcttcctttcgtcttccccttcgcccctttctctctctctctctctcgcgtgttctcgcgtcgccgtcgccgctggtgcgagatggtcgagacgaggcggagcgccgccgcgaagcgcccggcggcgggggaagaggataagggggcgccggcatcgcctgcatcggctcccgcggagaacgcgggggcgggtccgagggcgggtgacgatgtcgcgtcgtcgcagcccccgaagcgagccaaggttgggtgcacggaggcggacaccgagaagccgttggtggcgccggcagaagtcggcaccgttgcgggcccactgcccaacacggctggtctgcaggcgctgaccggcgccatggacaagctggaggccctcttgaggcccaaggagggtcagtccaatccggccgggcataagcggggcactaacgataaagatataacggcgaagataaagagagccatggatttatcggaggatttatcagcaaagataaagaaaaccaaggataatgtggctgggatattgaataagccacaggcggcagccaccagcaggcgtcaggagccctggtgcagactaatttcacaatataccatgcaccctaccctttctatttatggtgcgcttttcactatcggtcatggagcacatcatgatttcagactgggcgaatcatccactgcctcacctgtttgtagactgaagcaggctaagcgaggtgcactccttgaagtctttgaatccaaagttgtccgtgtcaatgggaaatctttggacaaggctgccaaggttaccttaaatggaggagatgaaattatcttccgttcaccagtgaggcatgcttatatatttgagcaacttcatcaggagaaatcaagcactccagcattatcctccacttgcagtagtatccagcaggggcagtgctcacatttcaaagatattcagggtcatttatcatctaaagggcacaaagtcccaaccatttactttggaagaggtcggtcttcattgttgcctagtggttcatcagcagatccactcctgcttaatttatgtaaaacgatggagggccagagccagcatagctccgaagataatatatcatctggtcggtttcagctaataaaggaggatttgataaatgcaacggttgacgcgagtgacatttttgagtcatttgatagttgcccatattatctaagtgatcataccaaatgtgccctcatgtcatcagcatatgtacatttacactgcaaagactacttgaagtttacaaaagatatatcttctcttagtcaacgagtgctgctatctggcccaacaggaactgacatctatcaagaatatctggtgaaggcacttgcaaagaattttggtgctagattgctcactgtagattcttccatgctgtttggtgggcaaacttccaaggagccggagacatacaaaaagggtgatagagtgaggtatattggttcggtacagtcgacaggcgttattcttgatggacagagccccccagattttggttcacagggtgaaatatttcttcctttcgaagaaaatagatcatcgaaggttggtgtaaggtttgataaaaaaattctgggaggaaacgatcttggaggcaattgcgaagttgaccatggtttgttttgtccagttgattctttatgcctcgacattccaggatgggaggttacatccaaacatccattagatgtgatatttgagtttatctctgaagaaattcggcatggcccttttatcctttttctgaaggacacggagaaaatttgtggcaataatgattactatcatggtctgaaaagcaagctaaaacatttcccagctggtgcttttataattggatctcaaatccagcctgccaatcgcaaagagaaggcaaagggtagttctccttttctttcgaagttcccatacagccaaactatacttgacctcgcattacaggacattgatgcgataaatggtaataataaagaaacttcaaaggcagcgaagcatttaatcaaacttttcccaaataaagtgatactcgaggcaccacaagatgaaatggagctttcacggtggaaccagatgttaaaccgagatattgaagtccttaaaggaaatgcaaacatttcaaaaatgcgttcttttctaacaagggttggtttggaatgcactgatcttgaggcgatattggtcaaggatcgcgttcttacaaatgagtgtattgataaaataattggttttgctttgagccatcaacttaagaactgtacaaatccagacccccctttgagtaatgtgcagtttgttctatccagcgaaagccttaagcatggtattgacatgttggaaagtatccagtctggctcgaagagcagcactaaaaggaaatcactgaagatgttatccctccacatgaaatcggtgttacctttgaggacattggagctttagaaagtgtcaaagatactctgaaggagttagtgatgcttcctttgcaaagacctgaactttttaaccgaggacaacttatgaagccgtgtaaaggaattttactttttggcccacctggtactggaaagacaatgcttgctaaggctgtggcaactgaggctggtgctaatttcataaacatatcgatgtcaagcatctcttcaaagtggcttggtgaaggagaaaaattcgtgaaagctgttttttcactggcaagtaaaattgctccaagtgtaatttttgtggacgaggttgatggcatgctgggaaggcgggagaaccctggagaacatgaagccatgcgtaagatgaaaaatgagtttatggtgaactgggatggtctgagaacaaaggagaaagaacgtgtattagtacttgctgcaactaacaggccatttgatcttgatgaggctgttattaggcggcttccaaggaggttgatggtgaatttgccagatgcatcaaataggagaaagattcttagtgtaatactagccaaggaagatttggcagacgatgttgatctagaagctatagctaacttgacagaagggtactcgggtagtgatctcaagaatctttgtgttactgctgctcatcgtcctattagggagattcttgaaaaggagaagaaggagagagcttcagcagaaacagaaaataggccattgcctctgtcgcacactagcaatgatgtccgtgcattaagaataagtgatttcatacatgcgcatgaacaggtgtgtgcaagtgtttcctcagattccagtaacatgaacgagcttgtgcaatggaatgatctctatggagaaggcgggtcaaggaaaaagacaacgctaagctacttcatgtagctgatgttgcaagtatatcgggagaagtgccctggcacaaagcagaaatggttggaggcagttgggggtgtgtatcgggtgcagttggaaaagagctaggttcacctgccatccatccattgagagaattgatggctcaggtggagcggaatggagtagtatacacattggttgctgcctccactctgggccatgtatcatgcatctggacatgacggatggtctggcttgcagttgtcctaacaacagttttgagtgcaacatatcactgtctgggaaagaaaagaaaagaaaatataccatttgtgttgttcccactccacaggaagcacggcgacgacatcgcccaacaacccttttccatcgtttcttaaaaaataattcattatttaggttgtaaacatttagagcctgtgcaagtgtacagtatgagcatcaggagtattaacctagtgttgatgtctatacctaatctaatttattgattagaatcatttaacatgaaatacatgattattttgtatcttcgtgccttcgttaggttgataatggtcgaattaaaactaaccttgtggttatgat

SEQ ID NO: 7551 - DNA, 4012 bp, Zea Mays
tactaatccaaagaatccttcggttttgtattctactccgcttcctttcgtcttccccttcgcccctttctctctctctctctctcgcgtgttctcgcgtcgccgtcgccgctggtgcgagatggtcgagacgaggcggagcgccgccgcgaagcgcccggcggcgggggaagaggataagggggcgccggcatcgcctgcatcggctcccgcggagaacgcgggggcgggtccgagggcgggtgacgatgtcgcgtcgtcgcagcccccgaagcgagccaaggttgggtgcacggaggcggacaccgagaagccgttggtggcgccggcagaagtcggcaccgttgcgggcccactgcccaacacggctggtctgcaggcgctgaccggcgccatggacaagctggaggccctcttgaggcccaaggagggtcagtccaatccggccgggcataagcggggcactaacgataaagatataacggcgaagataaagagagccatggatttatcggaggatttatcagcaaagataaagaaaaccaaggataatgtggctgggatattgaataagccacaggcggcagccaccagcaggcgtcaggagccctggtgcagactaatttcacaatataccatgcaccctaccctttctatttatggtgcgcttttcactatcggtcatggagcacatcatgatttcagactgggcgaatcatccactgcctcacctgtttgtagactgaagcaggctaagcgaggtgcactccttgaagtctttgaatccaaagttgtccgtgtcaatgggaaatctttggacaaggctgccaaggttaccttaaatggaggagatgaaattatcttccgttcaccagtgaggcatgcttatatatttgagcaacttcatcaggagaaatcaagcactccagcattatcctccacttgcagtagtatccagcaggggcagtgctcacatttcaaagatattcagggtcatttatcatctaaagggcacaaagtcccaaccatttactttggaagaggttcatcagcagatccactcctgcttaatttatgtaaaacgatggagggccagagccagcatagctccgaagataatatatcatctggtcggtttcagctaataaaggaggatttgataaatgcaacggttgacgcgagtgacatttttgagtcatttgatagttgcccatattatctaagtgatcataccaaatgtgccctcatgtcatcagcatatgtacatttacactgcaaagactacttgaagtttacaaaagatatatcttctcttagtcaacgagtgctgctatctggcccaacaggaactgacatctatcaagaatatctggtgaaggcacttgcaaagaattttggtgctagattgctcactgtagattcttccatgctgtttggtgggcaaacttccaaggagccggagacatacaaaaagggtgatagagtgaggtatattggttcggtacagtcgacaggcgttattcttgatggacagagccccccagattttggttcacagggtgaaatatttcttcctttcgaagaaaatagatcatcgaaggttggtgtaaggtttgataaaaaaattctgggaggaaacgatcttggaggcaattgcgaagttgaccatggtttgttttgtccagttgattctttatgcctcgacattccaggatgggaggttacatccaaacatccattagatgtgatatttgagtttatctctgaagaaattcggcatggcccttttatcctttttctgaaggacacggagaaaatttgtggcaataatgattactatcatggtctgaaaagcaagctaaaacatttcccagctggtgcttttataattggatctcaaatccagcctgccaatcgcaaagagaaggcaaagggtagttctccttttctttcgaagttcccatacagccaaactatacttgacctcgcattacaggacattgatgcgataaatggtaataataaagaaacttcaaaggcagcgaagcatttaatcaaacttttcccaaataaagtgatactcgaggcaccacaagatgaaatggagctttcacggtggaaccagatgttaaaccgagatattgaagtccttaaaggaaatgcaaacatttcaaaaatgcgttcttttctaacaagggttggtttggaatgcactgatcttgaggcgatattggtcaaggatcgcgttcttacaaatgagtgtattgataaaataattggttttgctttgagccatcaacttaagaactgtacaaatccagacccccctttgagtaatgtgcagtttgttctatccagcgaaagccttaagcatggtattgacatgttggaaagtatccagtctggctcgaagagcagcactaaaaggaaatcactgaaggatattgctacggaaaatgagtttgaaaagaggcttcttgcagatgttatccctccacatgaaatcggtgttacctttgaggacattggagctttagaaagtgtcaaagatactctgaaggagttagtgatgcttcctttgcaaagacctgaactttttaaccgaggacaacttatgaagccgtgtaaaggaattttactttttggcccacctggtactggaaagacaatgcttgctaaggctgtggcaactgaggctggtgctaatttcataaacatatcgatgtcaagcatctcttcaaagtggcttggtgaaggagaaaaattcgtgaaagctgttttttcactggcaagtaaaattgctccaagtgtaatttttgtggacgaggttgatggcatgctgggaaggcgggagaaccctggagaacatgaagccatgcgtaagatgaaaaatgagtttatggtgaactgggatggtctgagaacaaaggagaaagaacgtgtattagtacttgctgcaactaacaggccatttgatcttgatgaggctgttattaggcggcttccaaggaggttgatggtgaatttgccagatgcatcaaataggagaaagattcttagtgtaatactagccaaggaagatttggcagacgatgttgatctagaagctatagctaacttgacagaagggtactcgggtagtgatctcaagaatctttgtgttactgctgctcatcgtcctattagggagattcttgaaaaggagaagaaggagagagcttcagcagaaacagaaaataggccattgcctctgtcgcacactagcaatgatgtccgtgcattaagaataagtgatttcatacatgcgcatgaacaggtgtgtgcaagtgtttcctcagattccagtaacatgaacgagcttgtgcaatggaatgatctctatggagaaggcgggtcaaggaaaaagacaacgctaagctacttcatgtagctgatgttgcaagtatatcgggagaagtgccctggcacaaagcagaaatggttggaggcagttgggggtgtgtatcgggtgcagttggaaaagagctaggttcacctgccatccatccattgagagaattgatggctcaggtggagcggaatggagtagtatacacattggttgctgcctccactctgggccatgtatcatgcatctggacatgacggatggtctggcttgcagttgtcctaacaacagttttgagtgcaacatatcactgtctgggaaagaaaagaaaagaaaatataccatttgtgttgttcccactccacaggaagcacggcgacgacatcgcccaacaacccttttccatcgtttcttaaaaaataattcattatttaggttgtaaacatttagagcctgtgcaagtgtacagtatgagcatcaggagtattaacctagtgttgatgtctatacctaatctaatttattgattagaatcatttaacatgaaatacatgattattttgtatcttcgtgccttcgttaggttgataatggtcgaattaaaactaaccttgtggttatgat

SEQ ID NO: 7552 - DNA, 4064 bp, Zea Mays
tggtggtcgcggcggccgccttatttttattccgcttcccctactaatgcattactactaatccaaagaatccttcggttttgtattctactccgcttcctttcgtcttccccttcgcccctttctctctctctctctctcgcgtgttctcgcgtcgccgtcgccgctggtgcgagatggtcgagacgaggcggagcgccgccgcgaagcgcccggcggcgggggaagaggataagggggcgccggcatcgcctgcatcggctcccgcggagaacgcgggggcgggtccgagggcgggtgacgatgtcgcgtcgtcgcagcccccgaagcgagccaaggttgggtgcacggaggcggacaccgagaagccgttggtggcgccggcagaagtcggcaccgttgcgggcccactgcccaacacggctggtctgcaggcgctgaccggcgccatggacaagctggaggccctcttgaggcccaaggagggtcagtccaatccggccgggcataagcggggcactaacgataaagatataacggcgaagataaagagagccatggatttatcggaggatttatcagcaaagataaagaaaaccaaggataatgtggctgggatattgaataagccacaggcggcagccaccagcaggcgtcaggagccctggtgcagactaatttcacaatataccatgcaccctaccctttctatttatggtgcgcttttcactatcggtcatggagcacatcatgatttcagactgggcgaatcatccactgcctcacctgtttgtagactgaagcaggctaagcgaggtgcactccttgaagtctttgaatccaaagttgtccgtgtcaatgggaaatctttggacaaggctgccaaggttaccttaaatggaggagatgaaattatcttccgttcaccagtgaggcatgcttatatatttgagcaacttcatcaggagaaatcaagcactccagcattatcctccacttgcagtagtatccagcaggggcagtgctcacatttcaaagatattcagggtcatttatcatctaaagggcacaaagtcccaaccatttactttggaagaggtcggtcttcattgttgcctagtggttcatcagcagatccactcctgcttaatttatgtaaaacgatggagggccagagccagcatagctccgaagataatatatcatctggtcggtttcagctaataaaggaggatttgataaatgcaacggttgacgcgagtgacatttttgagtcatttgatagttgcccatattatctaagtgatcataccaaatgtgccctcatgtcatcagcatatgtacatttacactgcaaagactacttgaagtttacaaaagatatatcttctcttagtcaacgagtgctgctatctggcccaacaggaactgacatctatcaagaatatctggtgaaggcacttgcaaagaattttggtgctagattgctcactgtagattcttccatgctgtttggtgggcaaacttccaaggagccggagacatacaaaaagggtgatagagtgaggtatattggttcggtacagtcgacaggcgttattcttgatggacagagccccccagattttggttcacagggtgaaatatttcttcctttcgaagaaaatagatcatcgaaggttggtgtaaggtttgataaaaaaattctgggaggaaacgatcttggaggcaattgcgaagttgaccatggtttgttttgtccaggatgggaggttacatccaaacatccattagatgtgatatttgagtttatctctgaagaaattcggcatggcccttttatcctttttctgaaggacacggagaaaatttgtggcaataatgattactatcatggtctgaaaagcaagctaaaacatttcccagctggtgcttttataattggatctcaaatccagcctgccaatcgcaaagagaaggcaaagggtagttctccttttctttcgaagttcccatacagccaaactatacttgacctcgcattacaggacattgatgcgataaatggtaataataaagaaacttcaaaggcagcgaagcatttaatcaaacttttcccaaataaagtgatactcgaggcaccacaagatgaaatggagctttcacggtggaaccagatgttaaaccgagatattgaagtccttaaaggaaatgcaaacatttcaaaaatgcgttcttttctaacaagggttggtttggaatgcactgatcttgaggcgatattggtcaaggatcgcgttcttacaaatgagtgtattgataaaataattggttttgctttgagccatcaacttaagaactgtacaaatccagacccccctttgagtaatgtgcagtttgttctatccagcgaaagccttaagcatggtattgacatgttggaaagtatccagtctggctcgaagagcagcactaaaaggaaatcactgaaggatattgctacggaaaatgagtttgaaaagaggcttcttgcagatgttatccctccacatgaaatcggtgttacctttgaggacattggagctttagaaagtgtcaaagatactctgaaggagttagtgatgcttcctttgcaaagacctgaactttttaaccgaggacaacttatgaagccgtgtaaaggaattttactttttggcccacctggtactggaaagacaatgcttgctaaggctgtggcaactgaggctggtgctaatttcataaacatatcgatgtcaagcatctcttcaaagtggcttggtgaaggagaaaaattcgtgaaagctgttttttcactggcaagtaaaattgctccaagtgtaatttttgtggacgaggttgatggcatgctgggaaggcgggagaaccctggagaacatgaagccatgcgtaagatgaaaaatgagtttatggtgaactgggatggtctgagaacaaaggagaaagaacgtgtattagtacttgctgcaactaacaggccatttgatcttgatgaggctgttattaggcggcttccaaggaggttgatggtgaatttgccagatgcatcaaataggagaaagattcttagtgtaatactagccaaggaagatttggcagacgatgttgatctagaagctatagctaacttgacagaagggtactcgggtagtgatctcaagaatctttgtgttactgctgctcatcgtcctattagggagattcttgaaaaggagaagaaggagagagcttcagcagaaacagaaaataggccattgcctctgtcgcacactagcaatgatgtccgtgcattaagaataagtgatttcatacatgcgcatgaacaggtgtgtgcaagtgtttcctcagattccagtaacatgaacgagcttgtgcaatggaatgatctctatggagaaggcgggtcaaggaaaaagacaacgctaagctacttcatgtagctgatgttgcaagtatatcgggagaagtgccctggcacaaagcagaaatggttggaggcagttgggggtgtgtatcgggtgcagttggaaaagagctaggttcacctgccatccatccattgagagaattgatggctcaggtggagcggaatggagtagtatacacattggttgctgcctccactctgggccatgtatcatgcatctggacatgacggatggtctggcttgcagttgtcctaacaacagttttgagtgcaacatatcactgtctgggaaagaaaagaaaagaaaatataccatttgtgttgttcccactccacaggaagcacggcgacgacatcgcccaacaacccttttccatcgtttcttaaaaaataattcattatttaggttgtaaacatttagagcctgtgcaagtgtacagtatgagcatcaggagtattaacctagtgttgatgtctatacctaatctaatttattgattagaatcatttaacatgaaatacatgattattttgtatcttcgtgccttcgttaggttgataatggtcgaattaaaactaaccttgtggttatgat

SEQ ID NO: 7553 - DNA, 1671 bp, Zea Mays
atcactccattcatcgccggagtcccgaccaaattatccacacacgcgcctcgcctcccactcccccgaactcacacgccgcggcggagcaccaccgcggccgcccaccatgacctccgcctccaccttcctctctctgcgcctgcccactccctcccacgccacttcgtccctttccttccccccgtctctgctccggcaggcgcgtggcggtgtggcgtcctcgacgctggtggcgcgggcggcagggccaacgggagcggcgggagctccatcgccgctattcaacccccggggagacccgttcctgtctaccctcgcagccgcctcaccggaggaccttgcggccgccgctggtggcgagcgccgtggagaggaccacctgccgttcctcgagatcttccagaacaccaaactcatggcctcgcccgcgcaggtggaacggtctagcagctcgtatagtcagcacagacctagaaggcctcctccagatttgccttcattgcttcttcacggccgaatcgtttatattggcatgccgttggtaccagcagtgactgagctcattgttgcccagttgatgtaccttgaatggatgaacagtaaagaacctgtttatatatacatcaactcaactggaacggctcgcgatgatggtgaaccggtcgggatggagagcgaaggttttgcaatctatgatgcaatgatgcgtatgaaaactgagatccacacactttgtataggagctgcagcaggccatgcatgtcttgtgcttgcagctggaaaaaaaggcaaacgttatatgttccctcatgccaaagctatgattcagcaaccacgtattccttcttatgggatgatgcaagcatcagatgttgttattcgtgcaaaggaggttgtgcacaacaggaacacattggtcaaacttttagcaaggcatactggaaatccaccagagaaaatagacaaggtaatgagaggaccattttacatggactccttgaaggcaaaggagtttggagtcattgacaagatcctttggcgcggtcaggagaagtacatggctgacatgctctccccagatgagtgggacaaagttgccggagtcagacatcctgatctaatgtaatgttattcattgaaagttcaacatttggttaggttaatagcttccagggggcagaaacaggtgacgctgaacaataatgcttgattatcaatgataatggttggtaagagccaaggagtacttgtttaactaggtaaacttagagctcagggctgggggctgcgccaccaagatgttgttaatggtctctggatgagagcaggcacgtgtttctcatgaattatcgttgttccccacatcagttctagtccagattttggtatttattagtatatagtccacacattttgatagacccagtggttgaactagccaagttcatattgttatcagcacgaagcgcgatgataatatgatatgttgtccttgaaatttccatggctactgcgcccttgtccttgtgttctggacgttggaaatcctatgtatggatcatatggttttcaaccatcaaatcaaaggactcagcttgttgcattttgcattattggcggtcctgctgagccggctggcctttgggcttccgaaagggcctcctcaag

SEQ ID NO: 7554 - DNA, 2036 bp, Zea Mays
aagtcccaaccgaacctaaaccaaaagcaggcgagagtctagaccgcagcggaaggggagcaggcggcggccccgattgcggtaatggagctgtcgatgagtggcagctccctgcgaacgttcggccggtgcgtgaccttcctcgcgcgcgttgcctccgagctcgtgctccaggcgcaccccgccaagctggagatgcacacgcttaacagctcgcggtcggcgtacgcttcgatctccctagcgcgcgacttcttcgaccagtatcacctcgacgccgcggcttcggcaccgtcttccacgccgctgcagtgcagcgtcctcctcaagtccctgctcgccgtcctccgcacgccgcacgccgcgctcgaccgactcgccgtatccctcccagaacccgacgcacccaagctccagatcaccctccactgcctcaatggtgtgaggaagacgtactggatcgtgtgcagcgcagagcccgaggtgcagtcgctgtcgctagaccggggacggttcccgagccgcctagccattcggccgcgggagctggcgcggctgttgtccaacttccagtcctcgctgcaggagctcacaatcatcgctacagatcctgcttcagggttacctgatgctagcggtgacgtcgggggcaaggctgttgagctccggagctacaatgacccgacaaaagatgactgtgacactagactgcacacacaactgtggatcgaccctgccgaggagttcgtggagtttgttcatgctggtgatccggtggatgtcacctttggggtaaaagaactgaaggcttttttaacattttgtgaaggatgtgaggttgacatcctcctattctttgagaagactggcgaacctgttcttttggtcccgagattcggattggatgatggagcagcttctgattttgaagctactctagttctggctactatgactgtatcacaattatctgacagcgatgatgcccaacaaccagctacatcagcacaaaacgcgggagaaccaggggctgctgcaccaacactagttcctgaaaatgtctcgaaccatactaaaatatggtcggagctttcaggtagtactcccaaaagcattgaagctaacagagaaaatcatgcccagaagaagagaaacgcaagcactaatatgctgaacgacatgtcaatgctgcccaatgttacaaatgctccaagcaagccaccagttgcagataatgcaaacaatataatgcagcctttgcaaatggatcacatggaagaacgtcctggttaattatcaaacaaaatcatccattacattattgtcattagttactgatacgtctctacattgactaatgtttagctaacttgcttttttatgacgttgcagaaggtatcagtggtattcctcgatcacaacaccacccgagcaactgggtcggtgctgatgataacgacgatgacaatgaagacgacgaggagcttttagtccagacaacaccctactatatggactgaggataaatgctgattctaaaatatcggctgccgccagccaagcagccggtgttcctgcagcagcgtgactgaacaatgtggttctttcactttatctggccttggaagacggtgaaaagaaaccgagatctggcatggaaactgcttcctttaataatagaggttttgcgtcttccgagcaccctgcaccggcggtcatgctggttcaggcgtgcagctcgcctggctatcattggaatctgttgtcccgctgctagtccgatgtgaattactgtatgttagtctttcatttgcgttcatgaactcatctagccatgtcatgacttacaactgatcagggtgttttaaattttccgctgcttgccctggatgttctaaagcaaatgttttttcaagagcttttggagagctgtttcttctgtgtggcactgatttgtgcataaaaaggatgcagctatttcgtcatacgattgaactgttagtggtgatagcttgatttgttgaagctgggtgctg

SEQ ID NO: 7555 - DNA, 2791 bp, Zea Mays
aagtcccaaccgaacctaaaccaaaagcaggcgagagtctagaccgcagcggaaggggagcaggcggcggccccgattgcggtaatggagctgtcgatgagtggcagctccctgcgaacgttcggccggtgcgtgaccttcctcgcgcgcgttgcctccgagctcgtgctccaggcgcaccccgccaagctggagatgcacacgcttaacagctcgcggtcggcgtacgcttcgatctccctagcgcgcgacttcttcgaccagtatcacctcgacgccgcggcttcggcaccgtcttccacgccgctgcagtgcagcgtcctcctcaagtccctgctcgccgtcctccgcacgccgcacgccgcgctcgaccgactcgccgtatccctcccagaacccgacgcacccaagctccagatcaccctccactgcctcaatggtgtgaggaagacgtactggatcgtgtgcagcgcagagcccgaggtgcagtcgctgtcgctagaccggggacggttcccgagccgcctagccattcggccgcgggagctggcgcggctgttgtccaacttccagtcctcgctgcaggagctcacaatcatcgctacagatcctgcttcagggttacctgatgctagcggtgacgtcgggggcaaggctgttgagctccggagctacaatgacccgacaaaagatgactgtgacactagactgcacacacaactgtggatcgaccctgccgaggagttcgtggagtttgttcatgctggtgatccggtggatgtcacctttggggtaaaagaactgaaggagcagcaaggaattggataataacatttgcagctccctactatcgtgaatacaagaaacatgtttgcaagttaaaacaccttttcagagtatttccacaactattatctctcttggatagaagtttgttagttattattatctcacagttgctacaaggatcttacttcatgagttcatgataactggcttttttaacattttgtgaaggatgtgaggttgacatcctcctattctttgagaagactggcgaacctgttcttttggtcccgagattcggattggatgatggagcagcttctgattttgaagctactctagttctggctactatgactgtatcacaattatctgacagcgatgatgcccaacaaccagctacatcagcacaaaacgcgggagaaccaggggctgctgcaccaacactagttcctgaaaatgtctcgaaccatactaaaatatggtcggagctttcaggtagtactcccaaaagcattgaagctaacagagaaaatcatgcccagaagaagagaaacgcaagcactaatatgctgaacgacatgtcaatgctgcccaatgttacaaatgctccaagcaagccaccagttgcagataatgcaaacaatataatgcagcctttgcaaatggatcacatggaagaacgtcctgaaggtatcagtggtattcctcgatcacaacaccacccgagcaactgggtcggtgctgatgataacgacgatgacaatgaagacgacgaggagcttttagtccagacaacaccctactatatggactgaggataaatgctgattctaaaatatgtaggtgcatttcagcgtagtgtactatacgaacgaattaggaactagctgaaggctttacgtgtactcttgtagtcttatttctagtagggctggagttggtgactttgactgacgcagtaagaactctcttaacttaggtcatgtttgaatgcgttagagctaatagttaactgctaactagttgaagatgtctaaatagtctatctaatagttcaactattagctatttttaataaattacttaatagttagttagctaatttcgctatcatttttttagtcaactaactaactattagttctaatacattcaaatacctccttagtatctagtgtgactttcatttcttttcataatgtagagaaacattaaagttgatctgttccaattcgcatagatgttaaaagaaaaccgtgtgtttatatatgattcattcactttttttctacgttcccggtgtattttgggcgtgcaaaaagaacctccttgttcatgtgttgagttgcatctctcaatgcgtgcgtggctgcgtgcccatcatcgcactcccacgcatggggtgggggtagccggcagggtatggatctttttttattgcaggttgctacagttttaatctgactgtgtggctatgatttttatagtattttgtctctacgtaatatagcggctgccgccagccaagcagccggtgttcctgcagcagcgtgactgaacaatgtggttctttcactttatctggccttggaagacggtgaaaagaaaccgagatctggcatggaaactgcttcctttaataatagaggttttgcgtcttccgagcaccctgcaccggcggtcatgctggttcaggcgtgcagctcgcctggctatcattggaatctgttgtcccgctgctagtccgatgtgaattactgtatgttagtctttcatttgcgttcatgaactcatctagccatgtcatgacttacaactgatcagggtgttttaaattttccgctgcttgccctggatgttctaaagcaaatgttttttcaagagcttttggagagctgtttcttctgtgtggcactgatttgtgcataaaaaggatgcagctatttcgtcatacgattgaactgttagtggtgatagcttgatttgttgaagctgggtgctg

SEQ ID NO: 7556 - DNA, 2660 bp, Zea Mays
aagtcccaaccgaacctaaaccaaaagcaggcgagagtctagaccgcagcggaaggggagcaggcggcggccccgattgcggtaatggagctgtcgatgagtggcagctccctgcgaacgttcggccggtgcgtgaccttcctcgcgcgcgttgcctccgagctcgtgctccaggcgcaccccgccaagctggagatgcacacgcttaacagctcgcggtcggcgtacgcttcgatctccctagcgcgcgacttcttcgaccagtatcacctcgacgccgcggcttcggcaccgtcttccacgccgctgcagtgcagcgtcctcctcaagtccctgctcgccgtcctccgcacgccgcacgccgcgctcgaccgactcgccgtatccctcccagaacccgacgcacccaagctccagatcaccctccactgcctcaatggtgtgaggaagacgtactggatcgtgtgcagcgcagagcccgaggtgcagtcgctgtcgctagaccggggacggttcccgagccgcctagccattcggccgcgggagctggcgcggctgttgtccaacttccagtcctcgctgcaggagctcacaatcatcgctacagatcctgcttcagggttacctgatgctagcggtgacgtcgggggcaaggctgttgagctccggagctacaatgacccgacaaaagatgactgtgacactagactgcacacacaactgtggatcgaccctgccgaggagttcgtggagtttgttcatgctggtgatccggtggatgtcacctttggggtaaaagaactgaaggcttttttaacattttgtgaaggatgtgaggttgacatcctcctattctttgagaagactggcgaacctgttcttttggtcccgagattcggattggatgatggagcagcttctgattttgaagctactctagttctggctactatgactgtatcacaattatctgacagcgatgatgcccaacaaccagctacatcagcacaaaacgcgggagaaccaggggctgctgcaccaacactagttcctgaaaatgtctcgaaccatactaaaatatggtcggagctttcagaagaagagaaacgcaagcactaatatgctgaacgacatgtcaatgctgcccaatgttacaaatgctccaagcaagccaccagttgcagataatgcaaacaatataatgcagcctttgcaaatggatcacatggaagaacgtcctggttaattatcaaacaaaatcatccattacattattgtcattagttactgatacgtctctacattgactaatgtttagctaacttgcttttttatgacgttgcagaaggtatcagtggtattcctcgatcacaacaccacccgagcaactgggtcggtgctgatgataacgacgatgacaatgaagacgacgaggagcttttagtccagacaacaccctactatatggactgaggataaatgctgattctaaaatatgtaggtgcatttcagcgtagtgtactatacgaacgaattaggaactagctgaaggctttacgtgtactcttgtagtcttatttctagtagggctggagttggtgactttgactgacgcagtaagaactctcttaacttaggtcatgtttgaatgcgttagagctaatagttaactgctaactagttgaagatgtctaaatagtctatctaatagttcaactattagctatttttaataaattacttaatagttagttagctaatttcgctatcatttttttagtcaactaactaactattagttctaatacattcaaatacctccttagtatctagtgtgactttcatttcttttcataatgtagagaaacattaaagttgatctgttccaattcgcatagatgttaaaagaaaaccgtgtgtttatatatgattcattcactttttttctacgttcccggtgtattttgggcgtgcaaaaagaacctccttgttcatgtgttgagttgcatctctcaatgcgtgcgtggctgcgtgcccatcatcgcactcccacgcatggggtgggggtagccggcagggtatggatctttttttattgcaggttgctacagttttaatctgactgtgtggctatgatttttatagtattttgtctctacgtaatatagcggctgccgccagccaagcagccggtgttcctgcagcagcgtgactgaacaatgtggttctttcactttatctggccttggaagacggtgaaaagaaaccgagatctggcatggaaactgcttcctttaataatagaggttttgcgtcttccgagcaccctgcaccggcggtcatgctggttcaggcgtgcagctcgcctggctatcattggaatctgttgtcccgctgctagtccgatgtgaattactgtatgttagtctttcatttgcgttcatgaactcatctagccatgtcatgacttacaactgatcagggtgttttaaattttccgctgcttgccctggatgttctaaagcaaatgttttttcaagagcttttggagagctgtttcttctgtgtggcactgatttgtgcataaaaaggatgcagctatttcgtcatacgattgaactgttagtggtgatagcttgatttgttgaagctgggtgctg

SEQ ID NO: 7557 - DNA, 2580 bp, Zea Mays
ccgaagtcccaaccgaacctaaaccaaaagcaggcgagagtctagaccgcagcggaaggggagcaggcggcggccccgattgcggtaatggagctgtcgatgagtggcagctccctgcgaacgttcggccggtgcgtgaccttcctcgcgcgcgttgcctccgagctcgtgctccaggcgcaccccgccaagctggagatgcacacgcttaacagctcgcggtcggcgtacgcttcgatctccctagcgcgcgacttcttcgaccagtatcacctcgacgccgcggcttcggcaccgtcttccacgccgctgcagtgcagcgtcctcctcaagtccctgctcgccgtcctccgcacgccgcacgccgcgctcgaccgactcgccgtatccctcccagaacccgacgcacccaagctccagatcaccctccactgcctcaatggtgtgaggaagacgtactggatcgtgtgcagcgcagagcccgaggtgcagtcgctgtcgctagaccggggacggttcccgagccgcctagccattcggccgcgggagctggcgcggctgttgtccaacttccagtcctcgctgcaggagctcacaatcatcgctacagatcctgcttcagggttacctgatgctagcggtgacgtcgggggcaaggctgttgagctccggagctacaatgacccgacaaaagatgactgtgacactagactgcacacacaactgtggatcgaccctgccgaggagttcgtggagtttgttcatgctggtgatccggtggatgtcacctttggggtaaaagaactgaaggtgataaattctctatcccttactcttgtggtgggaaacagattgtaatatgatatgccttgaagtggataataactttgtaggagcagcaaggaattggataataacatttgcagctccctactatcgtgaatacaagaaacatgtttgcaagttaaaacaccttttcagagtatttccacaactattatctctcttggatagaagtttgttagttattattatctcacagttgctacaaggatcttacttcatgagttcatgataactggcttttttaacattttgtgaaggatgtgaggttgacatcctcctattctttgagaagactggcgacgatgatgcccaacaaccagctacatcagcacaaaacgcgggagaaccaggggctgctgcaccaacactagttcctgaaaatgtctcgaaccatactaaaatatggtcggagctttcagaaggtatcagtggtattcctcgatcacaacaccacccgagcaactgggtcggtgctgatgataacgacgatgacaatgaagacgacgaggagcttttagtccagacaacaccctactatatggactgaggataaatgctgattctaaaatatgtaggtgcatttcagcgtagtgtactatacgaacgaattaggaactagctgaaggctttacgtgtactcttgtagtcttatttctagtagggctggagttggtgactttgactgacgcagtaagaactctcttaacttaggtcatgtttgaatgcgttagagctaatagttaactgctaactagttgaagatgtctaaatagtctatctaatagttcaactattagctatttttaataaattacttaatagttagttagctaatttcgctatcatttttttagtcaactaactaactattagttctaatacattcaaatacctccttagtatctagtgtgactttcatttcttttcataatgtagagaaacattaaagttgatctgttccaattcgcatagatgttaaaagaaaaccgtgtgtttatatatgattcattcactttttttctacgttcccggtgtattttgggcgtgcaaaaagaacctccttgttcatgtgttgagttgcatctctcaatgcgtgcgtggctgcgtgcccatcatcgcactcccacgcatggggtgggggtagccggcagggtatggatctttttttattgcaggttgctacagttttaatctgactgtgtggctatgatttttatagtattttgtctctacgtaatatagcggctgccgccagccaagcagccggtgttcctgcagcagcgtgactgaacaatgtggttctttcactttatctggccttggaagacggtgaaaagaaaccgagatctggcatggaaactgcttcctttaataatagaggttttgcgtcttccgagcaccctgcaccggcggtcatgctggttcaggcgtgcagctcgcctggctatcattggaatctgttgtcccgctgctagtccgatgtgaattactgtatgttagtctttcatttgcgttcatgaactcatctagccatgtcatgacttacaactgatcagggtgttttaaattttccgctgcttgccctggatgttctaaagcaaatgttttttcaagagcttttggagagctgtttcttctgtgtggcactgatttgtgcataaaaaggatgcagctatttcgtcatacgattgaactgttagtggtgatagcttgatttgttgaagctgggtgctg

SEQ ID NO: 7558 - DNA, 2694 bp, Zea Mays
ctcctctctccgaagtcccaaccgaacctaaaccaaaagcaggcgagagtctagaccgcagcggaaggggagcaggcggcggccccgattgcggtaatggagctgtcgatgagtggcagctccctgcgaacgttcggccggtgcgtgaccttcctcgcgcgcgttgcctccgagctcgtgctccaggcgcaccccgccaagctggagatgcacacgcttaacagctcgcggtcggcgtacgcttcgatctccctagcgcgcgacttcttcgaccagtatcacctcgacgccgcggcttcggcaccgtcttccacgccgctgcagtgcagcgtcctcctcaagtccctgctcgccgtcctccgcacgccgcacgccgcgctcgaccgactcgccgtatccctcccagaacccgacgcacccaagctccagatcaccctccactgcctcaatggtgtgaggaagacgtactggatcgtgtgcagcgcagagcccgaggtgcagtcgctgtcgctagaccggggacggttcccgagccgcctagccattcggccgcgggagctggcgcggctgttgtccaacttccagtcctcgctgcaggagctcacaatcatcgctacagatcctgcttcagggttacctgatgctagcggtgacgtcgggggcaaggctgttgagctccggagctacaatgacccgacaaaagatgactgtgacactagactgcacacacaactgtggatcgaccctgccgaggagttcgtggagtttgttcatgctggtgatccggtggatgtcacctttggggtaaaagaactgaaggtgataaattctctatcccttactcttgtggtgggaaacagattgtaatatgatatgccttgaagtggataataactttgtaggagcagcaaggaattggataataacatttgcagctccctactatcgtgaatacaagaaacatgtttgcaagttaaaacaccttttcagagtatttccacaactattatctctcttggatagaagtttgttagttattattatctcacagttgctacaaggatcttacttcatgagttcatgataactggcttttttaacattttgtgaaggatgtgaggttgacatcctcctattctttgagaagactggcgaacctgttcttttggtcccgagattcggattggatgatggagcagcttctgattttgaagctactctagttctggctactatgactgtatcacaattatctgacagcgatgatgcccaacaaccagctacatcagcacaaaacgcgggagaaccaggggctgctgcaccaacactagttcctgaaaatgtctcgaaccatactaaaatatggtcggagctttcagaaggtatcagtggtattcctcgatcacaacaccacccgagcaactgggtcggtgctgatgataacgacgatgacaatgaagacgacgaggagcttttagtccagacaacaccctactatatggactgaggataaatgctgattctaaaatatgtaggtgcatttcagcgtagtgtactatacgaacgaattaggaactagctgaaggctttacgtgtactcttgtagtcttatttctagtagggctggagttggtgactttgactgacgcagtaagaactctcttaacttaggtcatgtttgaatgcgttagagctaatagttaactgctaactagttgaagatgtctaaatagtctatctaatagttcaactattagctatttttaataaattacttaatagttagttagctaatttcgctatcatttttttagtcaactaactaactattagttctaatacattcaaatacctccttagtatctagtgtgactttcatttcttttcataatgtagagaaacattaaagttgatctgttccaattcgcatagatgttaaaagaaaaccgtgtgtttatatatgattcattcactttttttctacgttcccggtgtattttgggcgtgcaaaaagaacctccttgttcatgtgttgagttgcatctctcaatgcgtgcgtggctgcgtgcccatcatcgcactcccacgcatggggtgggggtagccggcagggtatggatctttttttattgcaggttgctacagttttaatctgactgtgtggctatgatttttatagtattttgtctctacgtaatatagcggctgccgccagccaagcagccggtgttcctgcagcagcgtgactgaacaatgtggttctttcactttatctggccttggaagacggtgaaaagaaaccgagatctggcatggaaactgcttcctttaataatagaggttttgcgtcttccgagcaccctgcaccggcggtcatgctggttcaggcgtgcagctcgcctggctatcattggaatctgttgtcccgctgctagtccgatgtgaattactgtatgttagtctttcatttgcgttcatgaactcatctagccatgtcatgacttacaactgatcagggtgttttaaattttccgctgcttgccctggatgttctaaagcaaatgttttttcaagagcttttggagagctgtttcttctgtgtggcactgatttgtgcataaaaaggatgcagctatttcgtcatacgattgaactgttagtggtgatagcttgatttgttgaagctgggtgctg

SEQ ID NO: 7559 - DNA, 58 bp, Zea Mays
gcctgtccaacgaactgtcagcatcaccctaggcacaacaaaaaacacgaaatcagaa

SEQ ID NO: 7560 - DNA, 1355 bp, Zea Mays
cctatacatataagtccggagcctctgggtaggtccgaacctcagcggggtcccggaacgaggaggaccctggtatgagcaggggtccagtgctgacacgtgtccgggccttgccctccacttcccgctcaggcggagacccgctgcttgtggcccatgacataagctatcgggtcgaacctgacgtgaagtcgtgcagcccctgcatttattgaggagaggacacgccgcctgccactgcgctgacgggcgacgtgccctctcagcatttaatgcgtcccgtcccatccgctggcaggcggcgtcaaggtcatccagcaggcagcgcgcctgctgggtctgctggcaaacagtgcgctcgtaccaagtggcgcgctatactcatcctctcttctacaagaagcttcccctgcacgccgaagatacgcagatctcgggcgttagggcacaagaagatggtctcggcaacagacattagtaggttccaagcactatattctttatgtccctggacccacatgtcggggtccagtccctttgtgcatgccccccttcagctataaaaggggaggcatgcgacgttacacacacacgcaatcttagatcacacctcagactctcaagctcatacaagctcacaagcaatacatcccacagtggagtagggtattacgctccggcggcccgaactactctaaatccttgtgtgttcttgcgttctttcccgttcattccaacgatcaagcaaaacgcctaagcccctcctcatctcaggatttagggcgggtgcactccgccacccggccggagatttactctccgacagtatacaacacaaacggtggccgacatcgaagataaaagtcatgcaagtttatgtcgatggactaggattggtgaaggatgaatgtcgagcttaaacgaggtgattggagaaactgaaagacaaaccattggtgactgatacctggggtcattgccaagtgtaatagtaaatgtaggagtacagcgtgctgacaaaatcaaagcgagaggttgatcaagtcaagcgaaggcattagaagacttggcgattcagaattaagaggcgacatatgttatggagagagcatagagagtatactactccagagtagtttggtggtttagaaacttgaggtgtcatatgtgaagatccaacgagcctcttctctctagcacatcgttttattttgtcattgtaggttttcccttcctcttgtttctattgagattcacagatgatttagacactgcactaattatttatctttgtaattcgactctgtaactgataaacgttatgggaatggaagaccttacctcttcaaaaaaaa

SEQ ID NO: 7561 - DNA, 1057 bp, Zea Mays
agagatactaaacagggaagagggcgggcaaagagcaagatgaggcagccgagctcgagtaggttcacgacgatctgtgtcttctgcggcagcagcgaagggaagaggacgagctaccacgacgccgccattgcccttgcccaagagctggtgtcgagaggcatcgacctggtgtatggcggcggcggcataggtctgatggggctcgtctcgcaggccgtccaccgcggcggcaggcgcgtcgtcggtagctgtgtgcatcctgcttcctgtcttcctgcagagtgattcccaggactctgatgaccactcctgagacaatcggagagacggcgggggaggtggtcgcggtggcggacatgcaccaaaggaaggcagagatggcaaggcaagccgatgcgttcatagccctgccgggggggtatggaacgctggaggagctgctggagatgatcacgtgggcgcagttaggcatccaccgtaagccggttggattggtgaacgtcgatggctattacgaccccctgctggcgttcatcgaccaggccgtggaacacgggttcatcagccccagcgctcgccacatcatcgtccaggctcctacggcgcaggacctcatggccaaacttgaggaatacgtcccgtactacgacagagttgcttccgggctcaactgggagacaagggccgtcgtcgttacggatgcggccggtgctggtggttcagggccagcagggattagcgttccaggcatctgatcgaagttcatttggcatgaaggcgcgccgcgtcatgattaactagaaacttaattatatctcccacaatgctgtgcgcgcgcgcatgtatgcttaattgatgtaccgcagtcagtaacctcgtagtagtagcagtatagttaatacgttaacctagcttgcttttgtcccccgtcatttcatttgaatttattcggtgagtttaagaatcgaagctagtagtgcaagggtgtttgtagtggtataagctttgggttcaattcgtcaacgcttttttattaaagttatatcggttctct

SEQ ID NO: 7562 - DNA, 2194 bp, Zea Mays
acaaaggtctatagaagacccagatatatgaattatgattataacatcagactggaaagatgaatctgtggtaggttttcaaatctttcagtgatagccaaacatctttgaatgaatttgtcttcagtctgaaatccactgtcggagcagaaacttttgtggaggtggttggggttggtaaagggaagcacgatttgactggattcgttacggaccaatctaaacctaatcatgctctctctgttcatagtgacttgcctacaggtaaagactgttcttcacttgcttcagaagatataatcaagttcttaaatggcgatttcagaagaagtaagactagatcaaatgatattttctgggaagctgtatggccccgtttgcttgcaaaagggtggcactcagagcagcccaaggatgttagcacaactaagagttgccttgtatttcttgtgccgggtataaagaagttctcgagaagtaaactcaccaaaggtactcattattttgattctgtcagtgatgtccttaaaagagtggcagcagatcctgttcttcttgagttaaaggtagatgcgataaacaatggtttaactgctgaggaaaatggcagtatcacagatgtgaaactgaaccaggatagtccgttagatggatatcaggagcttcctaagttcacaataatcgatactagcttagtcgaaggggaagagccattcaatatacgggaactgagaaacttacctgcagatgcaaatattacttttctcctttcacaacattcatctaatatggtgagttacagctcctctgaagaggaagctgccaatgatagattatcagatgaccaggaagattgtggacgagttaaagctgaggccaaggaaattgaaatggtttcagctggttcattgcaaaacatggttactgctaatggccactcttctaatgtcaatgataaaattgatctgacaggcatctatggcatcaaaacaaaacctgaaaggcgcaagtatttgtccccagtgtcaaagcgcagaagattaaatagctgtagtaatgaacaggccagccggcgcagtttttctttctcaaaaggtggtggttttgagaaacagaaaagcaagccaccgttgatttcatccaaaccagctgctgttgaagttggcgacacttttcagagtaaaacaatttcaagctgttctacaaaggagaagccatctgagcacacagcagatgcattgaactcccttatcgatgatgagcaaaatgcgagaatggttatggaggttgaagcagtggctgaagttcactcaaaggtcattgccgttcagccaaaatttgtcaaagaaagagctgagtttattggtccagttgatttgaataagctggaaacgctacatgatgataaggcaagtcgaagcattgacaccacatcattgggaaatcttggtagcatgaaggttgatgaagctccctccagttcagacaagaacatggcctgtgatccttcaggggcagcaggaagacctgttagcgaggcacctgatcctgctttgcaggtgaatgctcggaggcacggaaccagaaacaggcctcccaccgcaaaagctttagaagctgtcgcttttggacttcttggaagcgggaagcggaagggtgacctgaaaaacagggcgacaagccggccttctcagcgagctcgcaaatctgccaaagacttggttcccgtggcttctagtggtgacgcaaaggcgtcctgcatagatgcagaagaacagcgatgagcagatttctgtggtgacatatgctgacaatcaacggcaccatgacaatgtgcggatgatgaatatcaagcaactacatgaggcctggagctaagctgtccaaagctggtggttaccttaccattgtctaatgcctaccattcaggaggtcctgaaggtgacaatggttttacagggtgcatggtcaccgttcgtgcggaggaacccatccttagtttttttagtcaacagtcttgtgtctgtcaaggcttgcaaaaccaacttgtaccggagagagggagggaaatcgccaaattggcgaattaagttatgcgataccgggattaatgtttttgtacattggtctatcgactttccatgggtgaattcatctatgagcttcttttgcagggaaagaaggcattcgtcag

SEQ ID NO: 7563 - DNA, 3068 bp, Zea Mays
cgtggcttggttggtgactctggaattacttggtttgcttgatctagtggctctggctgttgtcggctcacggtgacgatggagtctgaatcactcgattttgaagacaatggagaccaccaaccttcatcagaagcttctcttgcttcagatgtggtatatgatgactcgcttgtatgtccatgcattggaagtgagcaccaggcagaaatccccaatcttgctacagaggatgagtgccgtaagctcatggccagttcacataatgattccatattccatggctatggttaccctgttgtggttgggttagctttaccaattacgtgggcatcaccaagcgaagttgataagacggaagaggtactacaaacgcaaaaatgttcagaatttggaacaaaaggcagcactggagatgtgcacagtcaggtgacctcaacttgtgcaactagcaatgacactggcatatgtgctgcaacattccagtatccacatacagtagtgcctgtagttcaaattaaatctgacagtaatcaagcatacgatgaaaaaatggtcccttgccccactcaagaaggacagaatgttaccaataattcaataatgcagcagagagaaaccaaacaattaagtcctctaccttattcacccgttgctctttggagtgatcttgaggcagaggtatttctccttgggctctacatttttggcaagaatctcaacctgctgagcaggtttctgggtacaaagactgttggtgatgtgcttgcatactactatgggaagttctacagaagagatacatacaaaagatggtcggactgtagaaaggcaaaaactaggaaatgcattcttggggaacgcatttttcaaggatggcgacagcaggagctaatttcacgtctgaaatctaaaatccctaaagaagctcatgattcgttaattgaggttttcaaatctttcagtgatagccaaacatctttgaatgaatttgtcttcagtctgaaatccactgtcggagcagaaacttttgtggaggtggttggggttggtaaagggaagcacgatttgactggattcgttacggaccaatctaaacctaatcatgctctctctgttcatagtgacttgcctacaggtaaagactgttcttcacttgcttcagaagatataatcaagttcttaaatggcgatttcagaagaagtaagactagatcaaatgatattttctgggaagctgtatggccccgtttgcttgcaaaagggtggcactcagagcagcccaaggatgttagcacaactaagagttgccttgtatttcttgtgccgggtataaagaagttctcgagaagtaaactcaccaaaggtactcattattttgattctgtcagtgatgtccttaaaagagtggcagcagatcctgttcttcttgagttaaaggtagatgcgataaacaatggtttaactgctgaggaaaatggcagtatcacagatgtgaaactgaaccaggatagtccgttagatggatatcaggagcttcctaagttcacaataatcgatactagcttagtcgaaggggaagagccattcaatatacgggaactgagaaacttacctgcagatgcaaatattacttttctcctttcacaacattcatctaatatggtgagttacagctcctctgaagaggaagctgccaatgatagattatcagatgaccaggaagattgtggacgagttaaagctgaggccaaggaaattgaaatggtttcagctggttcattgcaaaacatggttactgctaatggccactcttctaatgtcaatgataaaattgatctgacaggcatctatggcatcaaaacaaaacctgaaaggcgcaagtatttgtccccagtgtcaaagcgcagaagattaaatagctgtagtaatgaacaggccagccggcgcagtttttctttctcaaaaggtggtggttttgagaaacagaaaagcaagccaccgttgatttcatccaaaccagctgctgttgaagttggcgacacttttcagagtaaaacaatttcaagctgttctacaaaggagaagccatctgagcacacagcagatgcattgaactcccttatcgatgatgagcaaaatgcgagaatggttatggaggttgaagcagtggctgaagttcactcaaaggtcattgccgttcagccaaaatttgtcaaagaaagagctgagtttattggtccagttgatttgaataagctggaaacgctacatgatgataaggcaagtcgaagcattgacaccacatcattgggaaatcttggtagcatgaaggttgatgaagctccctccagttcagacaagaacatggcctgtgatccttcaggggcagcaggaagacctgttagcgaggcacctgatcctgctttgcaggtgaatgctcggaggcacggaaccagaaacaggcctcccaccgcaaaagctttagaagctgtcgcttttggacttcttggaagcgggaagcggaagggtgacctgaaaaacagggcgacaagccggccttctcagcgagctcgcaaatctgccaaagacttggttcccgtggcttctagtggtgacgcaaaggcgtcctgcatagatgcagaagaacagcgatgagcagatttctgtggtgacatatgctgacaatcaacggcaccatgacaatgtgcggatgatgaatatcaagcaactacatgaggcctggagctaagctgtccaaagctggtggttaccttaccattgtctaatgcctaccattcaggaggtcctgaaggtgacaatggttttacagggtgcatggtcaccgttcgtgcggaggaacccatccttagtttttttagtcaacagtcttgtgtctgtcaaggcttgcaaaaccaacttgtaccggagagagggagggaaatcgccaaattggcgaattaagttatgcgataccgggattaatgtttttgtacattggtctatcgactttccatgggtgaattcatctatgagcttcttttgcagggaaagaaggcattcgtcag

SEQ ID NO: 7564 - DNA, 3057 bp, Zea Mays
ccttctcctttgtctttaaagcccgagcaccccctctccagccccgtctccgcctcctctctccctctctacactccaacccaccaccgccccgcgaccggtcctcggcctcgccgtactctccactcgctccaccctgcggcgcgctgctccgtgttcttccctcccgcaaaccgtcggtgaatctcgccgctcctaccgtccggttcagattctcgctaccggtcgggggcgtctgtttctcgtccgggaggccggagggctcctcgtggccggagcctgggggaggagccgccagcgcggcgtgcatggaggctaagatggagtctgaatcactcgattttgaagacaatggagaccaccaaccttcatcagaagcttctcttgcttcagatgtggtatatgatgactcgcttgtatgtccatgcattggaagtgagcaccaggcagaaatccccaatcttgctacagaggatgagtgccgtaagctcatggccagttcacataatgattccatattccatggctatggttaccctgttgtggttgggttagctttaccaattacgtgggcatcaccaagcgaagttgataagacggaagaggtactacaaacgcaaaaatgttcagaatttggaacaaaaggcagcactggagatgtgcacagtcaggtgacctcaacttgtgcaactagcaatgacactggcatatgtgctgcaacattccagtatccacatacagtagtgcctgtagttcaaattaaatctgacagtaatcaagcatacgatgaaaaaatggtcccttgccccactcaagaaggacagaatgttaccaataattcaataatgcagcagagagaaaccaaacaattaagtcctctaccttattcacccgttgctctttggagtgatcttgaggcagaggtatttctccttgggctctacatttttggcaagaatctcaacctgctgagcaggtttctgggtacaaagactgttggtgatgtgcttgcatactactatgggaagttctacagaagagatacatacaaaagatggtcggactgtagaaaggcaaaaactaggaaatgcattcttggggaacgcatttttcaaggatggcgacagcaggagctaatttcacgtctgaaatctaaaatccctaaagaagctcatgattcgttaattgaggttttcaaatctttcagtgatagccaaacatctttgaatgaatttgtcttcagtctgaaatccactgtcggagcagaaacttttgtggaggtggttggggttggtaaagggaagcacgatttgactggattcgttacggaccaatctaaacctaatcatgctctctctgttcatagtgacttgcctacagtgatgtccttaaaagagtggcagcagatcctgttcttcttgagttaaaggtagatgcgataaacaatggtttaactgctgaggaaaatggcagtatcacagatgtgaaactgaaccaggatagtccgttagatggatatcaggagcttcctaagttcacaataatcgatactagcttagtcgaaggggaagagccattcaatatacgggaactgagaaacttacctgcagatgcaaatattacttttctcctttcacaacattcatctaatatggtgagttacagctcctctgaagaggaagctgccaatgatagattatcagatgaccaggaagattgtggacgagttaaagctgaggccaaggaaattgaaatggtttcagctggttcattgcaaaacatggttactgctaatggccactcttctaatgtcaatgataaaattgatctgacaggcatctatggcatcaaaacaaaacctgaaaggcgcaagtatttgtccccagtgtcaaagcgcagaagattaaatagctgtagtaatgaacaggccagccggcgcagtttttctttctcaaaaggtggtggttttgagaaacagaaaagcaagccaccgttgatttcatccaaaccagctgctgttgaagttggcgacacttttcagagtaaaacaatttcaagctgttctacaaaggagaagccatctgagcacacagcagatgcattgaactcccttatcgatgatgagcaaaatgcgagaatggttatggaggttgaagcagtggctgaagttcactcaaaggtcattgccgttcagccaaaatttgtcaaagaaagagctgagtttattggtccagttgatttgaataagctggaaacgctacatgatgataaggcaagtcgaagcattgacaccacatcattgggaaatcttggtagcatgaaggttgatgaagctccctccagttcagacaagaacatggcctgtgatccttcaggggcagcaggaagacctgttagcgaggcacctgatcctgctttgcaggtgaatgctcggaggcacggaaccagaaacaggcctcccaccgcaaaagctttagaagctgtcgcttttggacttcttggaagcgggaagcggaagggtgacctgaaaaacagggcgacaagccggccttctcagcgagctcgcaaatctgccaaagacttggttcccgtggcttctagtggtgacgcaaaggcgtcctgcatagatgcagaagaacagcgatgagcagatttctgtggtgacatatgctgacaatcaacggcaccatgacaatgtgcggatgatgaatatcaagcaactacatgaggcctggagctaagctgtccaaagctggtggttaccttaccattgtctaatgcctaccattcaggaggtcctgaaggtgacaatggttttacagggtgcatggtcaccgttcgtgcggaggaacccatccttagtttttttagtcaacagtcttgtgtctgtcaaggcttgcaaaaccaacttgtaccggagagagggagggaaatcgccaaattggcgaattaagttatgcgataccgggattaatgtttttgtacattggtctatcgactttccatgggtgaattcatctatgagcttcttttgcagggaaagaaggcattcgtcag

SEQ ID NO: 7565 - DNA, 1400 bp, Zea Mays
ctaccgcctctgctcaatgatgcggtagtgcctgagcctgcaaaaatagcgggggctcgcttgtcgcgtggcgtgcggcaagtcctcgttcactggagcggcggaccagcttcatcagccacctgggaggagttcgatgacttccgcgcccgattcccagccttccagctcgaggacgagctggtcttcgacgaggggagagatgtcatgtaaggcgctcgtacgccaggcagcatcgcgcccgtgacaggcgccgcgcacaggagcgcgcagatcgccaggagcacgatctggggggggcgcagatctgggagatcagcaggaacctatggaaagtagtggctaggaaggaaattagaagaatggaaagttgagggaaggaaaggagagattgattagtgattgattagtgttaccatgtttaggcttgcctaaaataaaggctccaggacagcaggccgatggctatatatgcggcacagggagacaggaaagggcagcaaacaagttatctcctctccacctctctaccatctaagcctacggctgtgggggataaccacgccggagaagacgacgaaccgcggctacgaccttcgtagccgagggccccctgctctaaacgcccaggcccttgacactaccaaatatcagtttcccctcatgtagtattagtatgtagactggagttgaagcaggtatttttcagcaacattttttagatcgttattcatttgaggaaaatgtgcattgatactatttcaaatcccagtcgctgcttgaaatattttgttgtctccgtggcttaacatgaaccaaaaacaacaccatcttagctatgaagtcattgcagcaatttgacaactgggtttaaattttaaaccaggaagcaaaatcgttataggaagaattaaagtgatgaggtacaagaattaggtagaagaatccataggagccgtggatactgtgaaaagagtacaaccagtaagtgtaaatgttgaattaggtagtgtgttgaacttcgttatctgtgccagactaaacaatgcctttatgctttttatatgttgcatgtactcggttcactaacatgtgtttcattgcctaaaatacacaatttatgagctacagattctgtagtagtatagtgatctatgtgttctcgggtaagaggacacaaaaatgtttctaaatcctttctgcacccaattctggagagcctccagtactggttattgagaacactggtattgttagatgtgtttttttttatgaaacttatagcaaatgatgaattgacactcttgtagtcttttaaggttgctgcattgactaaatacacaacataagtgcatctgtagttgcactagaattctactgattatagatattgtattcat

SEQ ID NO: 7566 - DNA, 3812 bp, Zea Mays
atgaaaaacttcagcatgttctaggacattttcagaaggaattcgaaggagaagtttctgcagagaacctcgggtcgaaatttggtggatatggttcatttttacccacatatcagcgttctcccctgctgccccaatctgaaagcccacacattgcattgaacattagcatgtcaggatcaccttaccaaccatctgctgagagaatggatcaaaacccctctactgtagctgtggagcccatttcccgaaataacggttttggagcaccttcagctagtgattcaatcaagaagaaaaaattcctgagtacaaatgatgaggaatcgattgcaggttccgattctttggacacttcacttagtggtagtgactcaaagtcactcaaatttcagaccaaagtttgtctcagcaatgatctgccaagagaaaatgcagttatctatagtggcctgggccttgatatttctccacgttcgtccatggaggagagtcctaatgggcttgggggactatctcctgagtgcagcaatgtgccatttgaatcacctcggactatcctacaggtcatgacatgccttccagttcctggaggtttcttgttgtcacctctgcatgggaatttgctgcaattaagaaataaagttgctccggtgctaaagaatttggaaacacatttagacatggaaaatgtatctagagcattggaaggacgttcacagtcttttcatccccttggacttatcagaggcaatgtgactaagcagatgaggccttgcagtaagaaaaaagtggcagtggatacaaagactagcaagtacaaaggtgatgctagtgcaaccatgaacaatgaagttaacatccaagtgcctgccagccaaaaagagaagatgaacacgaataacaagaatgagtttgaagttggttctgcaaggaaggagatcccagccagtgtaaagcatggagagttgtatatgcagccggccagcagtgtatcaactatgaatgcatatcatgttcctgcaccagttgtgatcgaggaccactgggtacgctgtgacatatgccataaattgcgtcttctaccctatggaatgaacccttctatgcttccaaaaaaatggaaatgtaccatgcttcactggctgcctgggatgaataggtgtgatatcagtgaggatgaaacaacaggggctctgaatgcattgtttgccattccagcgactgccacaaccctttcttcaggtagtcctcatactgcagttacaggaggtattatggaaaggaacaaggcttatccaaagttaaagactaaaataaggattgatcaagatgaacagaaatcatataagaaaactaaaattgaggcttggcatcaaattgacagaggccaggaccacaggtgtgattcagatggtgtggaagttcctgatgaacacaaagctttacttgcaaaagcaaaagcaatgaagggttcacatgaaactgatgacatgtctttatgcaagaaaaatatcgcttcagggtatgattcatcggaaaacgtcaataatgttaatgctttggatgtaccctttcacagtgagaagaaagaacatccttctgatgtagacatattagatttgtcttgcaagaagaatgcagtgaagaaattggagattcagcttaactctttacattgtataagcaatgggccccagaagaacttgaaggaaaagaagtctaataaattgaagtctaaagagatggcatccaaggaagatagtagacatggaaaagtgcagcatgcagatgccgtgttgtcttctctggggcacctaaattatgaactaggtgctgacaacaagtttgttactgggaaagaaagtctttcagaacaattagaaactttacctgccaagcaagttttggacttggctgaagcccctggaagggatgtagcctatctgcagtcttctacaactgtgagctcaagctcttcgaagatttcaagctccagaagaaacacaaactcgcaagaagcaaatgactctccaattaaatcagcctcttcattgccactgagagatttcagcattaaaatgatttccggtaacagaaaagatggaacagtggatgcttccttgggcaacacacacaatttagcaaggtaccaaaacagtgaagtcattgcattaaattatggtcagcaagctggaaactttgagggggatcaggttgcaggtgaacccaattttcatggttctttgcaaggaatctcggatagcaatatcaaggaaatacctcagtcagctggtgctcaagtctccaatatcactggttttgggaggagtttggataatagtctgccggaggcatcatgtagagaggaccttactgtaaatgatactgttgtaggtagaggagaccatcaactgtgttctggtgaacaaaaggactttaatatggaggttcgtttaccactacctgatcagcattgttttggcaggattaacactgagtctggttctgttcgacatgaaagtaagaacattgaagttcgccaaggtagtggaactgctcagcggctgggcatgttatttaaaaaagaaaaatctcaccttagaatccttaatcgagatattcagaaccatgttaatcaagttgtcaattttcctttgaaaggaggtaaacaaaaggtctgccctacttcagtaaaatctgaatcgttgaaaatgaaagcaaagttagtgaggttcaatgttgaaactggagtgcaacatggcagtgttaagcaagtgacatcaagcactttggacacaagtccaatgaggaaggatggtagtatgattacatttgctctcaaggaagctagagatctaaagcataaagcaaatgatttgaagaataaaggacaagaacttgaaagtacaggtctgtacttcgaggcggctttgaagtttctgcatgttgcgtttcttctagaaactcctagttttgacatttcaagacaaggtggtggaggtcggtcaatgaagatgtactctgaaactgcaaaattatgcaatttttgtgcttatgaatatgaacggtgcaaaaaaatggcttctgctgctttagcgtacaagtgtgtagaagttgcttacctcaaggctgcatactacaaacaccgtactgctacaaaagatcaacaggaacttcaggcagctgtacagataacccgaggtgaaccaccatcgccttctgccctagatattgataatttaaatagccatggatcatcaaatgcctcctcattaaagggtgacaattcacctcatgtgccaggcaatcatttgcctctagctattcacaaccaagcccagctgttgagattacttgcctatgaagcaaaatcgttataggaagaattaaagtgatgaggtacaagaattaggtagaagaatccataggagccgtggatactgtgaaaagagtacaaccagtaagtgtaaatgttgaattaggtagtgtgttgaacttcgttatctgtgccagactaaacaatgcctttatgctttttatatgttgcatgtactcggttcactaacatgtgtttcattgcctaaaatacacaatttatgagctacagattctgtagtagtatagtgatctatgtgttctcgggtaagaggacacaaaaatgtttctaaatcctttctgcacccaattctggagagcctccagtactggttattgagaacactggtattgttagatgtgtttttttttatgaaacttatagcaaatgatgaattgacactcttgtagtcttttaaggttgctgcattgac

SEQ ID NO: 7567 - DNA, 4695 bp, Zea Mays
atgaaaaacttcagcatgttctaggacattttcagaaggaattcgaaggagaagtttctgcagagaacctcgggtcgaaatttggtggatatggttcatttttacccacatatcagcgttctcccctgctgccccaatctgaaagcccacacattgcattgaacattagcatgtcaggatcaccttaccaaccatctgctgagagaatggatcaaaacccctctactgtagctgtggagcccatttcccgaaataacggttttggagcaccttcagctagtgattcaatcaagaagaaaaaattcctgagtacaaatgatgaggaatcgattgcaggttccgattctttggacacttcacttagtggtagtgactcaaagtcactcaaatttcagaccaaagtttgtctcagcaatgatctgccaagagaaaatgcagttatctatagtggcctgggccttgatatttctccacgttcgtccatggaggagagtcctaatgggcttgggggactatctcctgagtgcagcaatgtgccatttgaatcacctcggactatcctacaggtcatgacatgccttccagttcctggaggtttcttgttgtcacctctgcatgggaatttgctgcaattaagaaataaagttgctccggtgctaaagaatttggaaacacatttagacatggaaaatgtatctagagcattggaaggacgttcacagtcttttcatccccttggacttatcagaggcaatgtgactaagcagatgaggccttgcagtaagaaaaaagtggcagtggatacaaagactagcaagtacaaaggtgatgctagtgcaaccatgaacaatgaagttaacatccaagtgcctgccagccaaaaagagaagatgaacacgaataacaagaatgagtttgaagttggttctgcaaggaaggagatcccagccagtgtaaagcatggagagttgtatatgcagccggccagcagtgtatcaactatgaatgcatatcatgttcctgcaccagttgtgatcgaggaccactgggtacgctgtgacatatgccataaattgcgtcttctaccctatggaatgaacccttctatgcttccaaaaaaatggaaatgtaccatgcttcactggctgcctgggatgaataggtgtgatatcagtgaggatgaaacaacaggggctctgaatgcattgtttgccattccagcgactgccacaaccctttcttcaggaggtattatggaaaggaacaaggcttatccaaagttaaagactaaaataaggattgatcaagatgaacagaaatcatataagaaaactaaaattgaggcttggcatcaaattgacagaggccaggaccacaggtgtgattcagatggtgtggaagttcctgatgaacacaaagctttacttgcaaaagcaaaagcaatgaagggttcacatgaaactgatgacatgtctttatgcaagaaaaatatcgcttcagggtatgattcatcggaaaacgtcaataatgttaatgctttggatgtaccctttcacagtgagaagaaagaacatccttctgatgtagacatattagatttgtcttgcaagaagaatgcagtgaagaaattggagattcagcttaactctttacattgtataagcaatgggccccagaagaacttgaaggaaaagaagtctaataaattgaagtctaaagagatggcatccaaggaagatagtagacatggaaaagtgcagcatgcagatgccgtgttgtcttctctggggcacctaaattatgaactaggtgctgacaacaagtttgttactgggaaagaaagtctttcagaacaattagaaactttacctgccaagcaagttttggacttggctgaagcccctggaagggatgtagcctatctgcagtcttctacaactgtgagctcaagctcttcgaagatttcaagctccagaagaaacacaaactcgcaagaagcaaatgactctccaattaaatcagcctcttcattgccactgagagatttcagcattaaaatgatttccggtaacagaaaagatggaacagtggatgcttccttgggcaacacacacaatttagcaaggtaccaaaacagtgaagtcattgcattaaattatggtcagcaagctggaaactttgagggggatcaggttgcaggtgaacccaattttcatggttctttgcaaggaatctcggatagcaatatcaaggaaatacctcagtcagctggtgctcaagtctccaatatcactggttttgggaggagtttggataatagtctgccggaggcatcatgtagagaggaccttactgtaaatgatactgttgtaggtagaggagaccatcaactgtgttctggtgaacaaaaggactttaatatggaggttcgtttaccactacctgatcagcattgttttggcaggattaacactgagtctggttctgttcgacatgaaagtaagaacattgaagttcgccaaggtagtggaactgctcagcggctgggcatgttatttaaaaaagaaaaatctcaccttagaatccttaatcgagatattcagaaccatgttaatcaagttgtcaattttcctttgaaaggaggtaaacaaaaggtctgccctacttcagtaaaatctgaatcgttgaaaatgaaagcaaagttagtgaggttcaatgttgaaactggagtgcaacatggcagtgttaagcaagtgacatcaagcactttggacacaagtccaatgaggaaggatggtagtatgattacatttgctctcaaggaagctagagatctaaagcataaagcaaatgatttgaagaataaaggacaagaacttgaaagtacaggtctgtacttcgaggcggctttgaagtttctgcatgttgcgtttcttctagaaactcctagttttgacatttcaagacaaggtggtggaggtcggtcaatgaagatgtactctgaaactgcaaaattatgcaatttttgtgcttatgaatatgaacggtgcaaaaaaatggcttctgctgctttagcgtacaagtgtgtagaagttgcttacctcaaggctgcatactacaaacaccgtactgctacaaaagatcaacaggaacttcaggcagctgtacagataacccgaggtgaaccaccatcgccttctgccctagatattgataatttaaatagccatggatcatcaaatgcctcctcattaaagggtgacaattcacctcatgtgccaggcaatcatttgcctctagctattcacaaccaagcccagctgttgagattacttgcctatttctcctgcactcttttcgggaaaaaaaattggagtagctgcacataatttaagtttgactgaagaagaataagctcccccccgccccatgttctcatgctatcatatgcccatacggtttgagacaaatgatatgaacttggcattcgatgcaactcgaaaagcagaatctgtgattgcatctgctactgggtgtccggaaagaggtgttgttggtgatggccttgcttcggtaaaagcagtcttggatcttaacttcaacaatgtgaatgaactactaaggcttgttcgggtttcaatggaatcaataagcagctgatgatgtgttcaaaaatcggaattgcacagaatgtcacacagtgaactgctgatattggattaacatgcaatctgtgctccgtgatgctggttgcagctatgtcagtatatttttacagtgcaaaacaaattaacttgaaatcaagcattccctttcctaaattggaaattatgtgaaccaaggttctggaattcgggagcggtactgctgcatcttgtggtagtgtaaccatgcattgatgtgtgtttgtttcaatgggtcagaggagatcgattgcgattacctgcactacctgtcatgtacgggcgctcgtacgccaggcagcgtcgcgcccgtgacaggcgccgcgcacaggagcgcgatctgggagatcagcaggaacctatggaaagcagtggccaggaaggaaattagaagaatggaaagttgagggaaggaaaggagagattgattagtgattgattaagtgattgattagtgattgattagtgttaccatgtttaggcttgcctaaaataaaggctctaggacagcaggccgatggctatatatgcggcacaaggagacaggaataaagggcagcaaacaagttatctcctctccacctctctctaccatctaagcctacggctgtgggggataaccacgccggagaagacgaaccgcggctacaaccccatgctctaaacgcccaggcccttgacaacctggtatcacaagtcaggcgatcttcgtcctctcgatcccacacctccgatcagtccctcgacgtcacccaaccaccacccagccctccaccgtctccgccgtcggcctcctccattatgaccaccaaaaccaacgacgatctggctgcgatgatcgagaagctcacgggcacggtcgctgccctccaaaatgacgtcgagtcgttgaagaaggacaaggggccttcctcctcgccatccgacagcggcggccacgacggctagcaccacatcgatcggccaccaaggttccaaaagatcgacttcccacgttttgacggcaagtcgg

SEQ ID NO: 7568 - DNA, 4722 bp, Zea Mays
aggatgaaaaacttcagcatgttctaggacattttcagaaggaattcgaaggagaagtttctgcagagaacctcgggtcgaaatttggtggatatggttcatttttacccacatatcagcgttctcccctgctgccccaatctgaaagcccacacattgcattgaacattagcatgtcaggatcaccttaccaaccatctgctgagagaatggatcaaaacccctctactgtagctgtggagcccatttcccgaaataacggttttggagcaccttcagctagtgattcaatcaagaagaaaaaattcctgagtacaaatgatgaggaatcgattgcaggttccgattctttggacacttcacttagtggtagtgactcaaagtcactcaaatttcagaccaaagtttgtctcagcaatgatctgccaagagaaaatgcagttatctatagtggcctgggccttgatatttctccacgttcgtccatggaggagagtcctaatgggcttgggggactatctcctgagtgcagcaatgtgccatttgaatcacctcggactatcctacaggtcatgacatgccttccagttcctggaggtttcttgttgtcacctctgcatgggaatttgctgcaattaagaaataaagttgctccggtgctaaagaatttggaaacacatttagacatggaaaatgtatctagagcattggaaggacgttcacagtcttttcatccccttggacttatcagaggcaatgtgactaagcagatgaggccttgcagtaagaaaaaagtggcagtggatacaaagactagcaagtacaaaggtgatgctagtgcaaccatgaacaatgaagttaacatccaagtgcctgccagccaaaaagagaagatgaacacgaataacaagaatgagtttgaagttggttctgcaaggaaggagatcccagccagtgtaaagcatggagagttgtatatgcagccggccagcagtgtatcaactatgaatgcatatcatgttcctgcaccagttgtgatcgaggaccactgggtacgctgtgacatatgccataaattgcgtcttctaccctatggaatgaacccttctatgcttccaaaaaaatggaaatgtaccatgcttcactggctgcctgggatgaataggtgtgatatcagtgaggatgaaacaacaggggctctgaatgcattgtttgccattccagcgactgccacaaccctttcttcaggtagtcctcatactgcagttacaggaggtattatggaaaggaacaaggcttatccaaagttaaagactaaaataaggattgatcaagatgaacagaaatcatataagaaaactaaaattgaggcttggcatcaaattgacagaggccaggaccacaggtgtgattcagatggtgtggaagttcctgatgaacacaaagctttacttgcaaaagcaaaagcaatgaagggttcacatgaaactgatgacatgtctttatgcaagaaaaatatcgcttcagggtatgattcatcggaaaacgtcaataatgttaatgctttggatgtaccctttcacagtgagaagaaagaacatccttctgatgtagacatattagatttgtcttgcaagaagaatgcagtgaagaaattggagattcagcttaactctttacattgtataagcaatgggccccagaagaacttgaaggaaaagaagtctaataaattgaagtctaaagagatggcatccaaggaagatagtagacatggaaaagtgcagcatgcagatgccgtgttgtcttctctggggcacctaaattatgaactaggtgctgacaacaagtttgttactgggaaagaaagtctttcagaacaattagaaactttacctgccaagcaagttttggacttggctgaagcccctggaagggatgtagcctatctgcagtcttctacaactgtgagctcaagctcttcgaagatttcaagctccagaagaaacacaaactcgcaagaagcaaatgactctccaattaaatcagcctcttcattgccactgagagatttcagcattaaaatgatttccggtaacagaaaagatggaacagtggatgcttccttgggcaacacacacaatttagcaaggtaccaaaacagtgaagtcattgcattaaattatggtcagcaagctggaaactttgagggggatcaggttgcaggtgaacccaattttcatggttctttgcaaggaatctcggatagcaatatcaaggaaatacctcagtcagctggtgctcaagtctccaatatcactggttttgggaggagtttggataatagtctgccggaggcatcatgtagagaggaccttactgtaaatgatactgttgtaggtagaggagaccatcaactgtgttctggtgaacaaaaggactttaatatggaggttcgtttaccactacctgatcagcattgttttggcaggattaacactgagtctggttctgttcgacatgaaagtaagaacattgaagttcgccaaggtagtggaactgctcagcggctgggcatgttatttaaaaaagaaaaatctcaccttagaatccttaatcgagatattcagaaccatgttaatcaagttgtcaattttcctttgaaaggaggtaaacaaaaggtctgccctacttcagtaaaatctgaatcgttgaaaatgaaagcaaagttagtgaggttcaatgttgaaactggagtgcaacatggcagtgttaagcaagtgacatcaagcactttggacacaagtccaatgaggaaggatggtagtatgattacatttgctctcaaggaagctagagatctaaagcataaagcaaatgatttgaagaataaaggacaagaacttgaaagtacaggtctgtacttcgaggcggctttgaagtttctgcatgttgcgtttcttctagaaactcctagttttgacatttcaagacaaggtggtggaggtcggtcaatgaagatgtactctgaaactgcaaaattatgcaatttttgtgcttatgaatatgaacggtgcaaaaaaatggcttctgctgctttagcgtacaagtgtgtagaagttgcttacctcaaggctgcatactacaaacaccgtactgctacaaaagatcaacaggaacttcaggcagctgtacagataacccgaggtgaaccaccatcgccttctgccctagatattgataatttaaatagccatggatcatcaaatgcctcctcattaaagggtgacaattcacctcatgtgccaggcaatcatttgcctctagctattcacaaccaagcccagctgttgagattacttgcctatttctcctgcactcttttcgggaaaaaaaattggagtagctgcacataatttaagtttgactgaagaagaataagctcccccccgccccatgttctcatgctatcatatgcccatacggtttgagacaaatgatatgaacttggcattcgatgcaactcgaaaagcagaatctgtgattgcatctgctactgggtgtccggaaagaggtgttgttggtgatggccttgcttcggtaaaagcagtcttggatcttaacttcaacaatgtgaatgaactactaaggcttgttcgggtttcaatggaatcaataagcagctgatgatgtgttcaaaaatcggaattgcacagaatgtcacacagtgaactgctgatattggattaacatgcaatctgtgctccgtgatgctggttgcagctatgtcagtatatttttacagtgcaaaacaaattaacttgaaatcaagcattccctttcctaaattggaaattatgtgaaccaaggttctggaattcgggagcggtactgctgcatcttgtggtagtgtaaccatgcattgatgtgtgtttgtttcaatgggtcagaggagatcgattgcgattacctgcactacctgtcatgtacgggcgctcgtacgccaggcagcgtcgcgcccgtgacaggcgccgcgcacaggagcgcgatctgggagatcagcaggaacctatggaaagcagtggccaggaaggaaattagaagaatggaaagttgagggaaggaaaggagagattgattagtgattgattaagtgattgattagtgattgattagtgttaccatgtttaggcttgcctaaaataaaggctctaggacagcaggccgatggctatatatgcggcacaaggagacaggaataaagggcagcaaacaagttatctcctctccacctctctctaccatctaagcctacggctgtgggggataaccacgccggagaagacgaaccgcggctacaaccccatgctctaaacgcccaggcccttgacaacctggtatcacaagtcaggcgatcttcgtcctctcgatcccacacctccgatcagtccctcgacgtcacccaaccaccacccagccctccaccgtctccgccgtcggcctcctccattatgaccaccaaaaccaacgacgatctggctgcgatgatcgagaagctcacgggcacggtcgctgccctccaaaatgacgtcgagtcgttgaagaaggacaaggggccttcctcctcgccatccgacagcggcggccacgacggctagcaccacatcgatcggccaccaaggttccaaaagatcgacttcccacgttttgacggcaagtcgg

SEQ ID NO: 7569 - DNA, 4556 bp, Zea Mays
ctaaattcttttgttttcaactattttgctgcattcttgtctaagaaatgctgcatttggttccaggatgaaaaacttcagcatgttctaggacattttcagaaggaattcgaaggagaagtttctgcagagaacctcgggtcgaaatttggtggatatggttcatttttacccacatatcagcgttctcccctgctgccccaatctgaaagcccacacattgcattgaacattagcatgtcaggatcaccttaccaaccatctgctgagagaatggatcaaaacccctctactgtagctgtggagcccatttcccgaaataacggttttggagcaccttcagctagtgattcaatcaagaagaaaaaattcctgagtacaaatgatgaggaatcgattgcaggttccgattctttggacacttcacttagtggtagtgactcaaagtcactcaaatttcagaccaaagtttgtctcagcaatgatctgccaagagaaaatgcagttatctatagtggcctgggccttgatatttctccacgttcgtccatggaggagagtcctaatgggcttgggggactatctcctgagtgcagcaatgtgccatttgaatcacctcggactatcctacaggtcatgacatgccttccagttcctggaggtttcttgttgtcacctctgcatgggaatttgctgcaattaagaaataaagttgctccggtgctaaagaatttggaaacacatttagacatggaaaatgtatctagagcattggaaggacgttcacagtcttttcatccccttggacttatcagaggcaatgtgactaagcagatgaggccttgcagtaagaaaaaagtggcagtggatacaaagactagcaagtacaaaggtgatgctagtgcaaccatgaacaatgaagttaacatccaagtgcctgccagccaaaaagagaagatgaacacgaataacaagaatgagtttgaagttggttctgcaaggaaggagatcccagccagtgtaaagcatggagagttgtatatgcagccggccagcagtgtatcaactatgaatgcatatcatgttcctgcaccagttgtgatcgaggaccactgggtacgctgtgacatatgccataaattgcgtcttctaccctatggaatgaacccttctatgcttccaaaaaaatggaaatgtaccatgcttcactggctgcctgggatgaataggtgtgatatcagtgaggatgaaacaacaggggctctgaatgcattgtttgccattccagcgactgccacaaccctttcttcaggaggtattatggaaaggaacaaggcttatccaaagttaaagactaaaataaggattgatcaagatgaacagaaatcatataagaaaactaaaattgaggcttggcatcaaattgacagaggccaggaccacaggtgtgattcagatggtgtggaagttcctgatgaacacaaagctttacttgcaaaagcaaaagcaatgaagggttcacatgaaactgatgacatgtctttatgcaagaaaaatatcgcttcagggtatgattcatcggaaaacgtcaataatgttaatgctttggatgtaccctttcacagtgagaagaaagaacatccttctgatgtagacatattagatttgtcttgcaagaagaatgcagtgaagaaattggagattcagcttaactctttacattgtataagcaatgggccccagaagaacttgaaggaaaagaagtctaataaattgaagtctaaagagatggcatccaaggaagatagtagacatggaaaagtgcagcatgcagatgccgtgttgtcttctctggggcacctaaattatgaactaggtgctgacaacaagtttgttactgggaaagaaagtctttcagaacaattagaaactttacctgccaagcaagttttggacttggctgaagcccctggaagggatgtagcctatctgcagtcttctacaactgtgagctcaagctcttcgaagatttcaagctccagaagaaacacaaactcgcaagaagcaaatgactctccaattaaatcagcctcttcattgccactgagagatttcagcattaaaatgatttccggtaacagaaaagatggaacagtggatgcttccttgggcaacacacacaatttagcaaggtaccaaaacagtgaagtcattgcattaaattatggtcagcaagctggaaactttgagggggatcaggttgcaggtgaacccaattttcatggttctttgcaaggaatctcggatagcaatatcaaggaaatacctcagtcagctggtgctcaagtctccaatatcactggttttgggaggagtttggataatagtctgccggaggcatcatgtagagaggaccttactgtaaatgatactgttgtaggtagaggagaccatcaactgtgttctggtgaacaaaaggactttaatatggaggttcgtttaccactacctgatcagcattgttttggcaggattaacactgagtctggttctgttcgacatgaaagtaagaacattgaagttcgccaaggtagtggaactgctcagcggctgggcatgttatttaaaaaagaaaaatctcaccttagaatccttaatcgagatattcagaaccatgttaatcaagttgtcaattttcctttgaaaggaggtaaacaaaaggtctgccctacttcagtaaaatctgaatcgttgaaaatgaaagcaaagttagtgaggttcaatgttgaaactggagtgcaacatggcagtgttaagcaagtgacatcaagcactttggacacaagtccaatgaggaaggatggtagtatgattacatttgctctcaaggaagctagagatctaaagcataaagcaaatgatttgaagaataaaggacaagaacttgaaagtacaggtctgtacttcgaggcggctttgaagtttctgcatgttgcgtttcttctagaaactcctagttttgacatttcaagacaaggtggtggaggtcggtcaatgaagatgtactctgaaactgcaaaattatgcaatttttgtgcttatgaatatgaacggtgcaaaaaaatggcttctgctgctttagcgtacaagtgtgtagaagttgcttacctcaaggctgcatactacaaacaccgtactgctacaaaagatcaacaggaacttcaggcagctgtacagataacccgaggtgaaccaccatcgccttctgccctagatattgataatttaaatagccatggatcatcaaatgcctcctcattaaagggtgacaattcacctcatgtgccaggcaatcatttgcctctagctattcacaaccaagcccagctgttgagattacttgcctatacaaatgatatgaacttggcattcgatgcaactcgaaaagcagaatctgtgattgcatctgctactgggtgtccggaaagaggtgttgttggtgatggccttgcttcggtaaaagcagtcttggatcttaacttcaacaatgtgaatgaactactaaggcttgttcgggtttcaatggaatcaataagcagctgatgatgtgttcaaaaatcggaattgcacagaatgtcacacagtgaactgctgatattggattaacatgcaatctgtgctccgtgatgctggttgcagctatgttctggaattcgggagcggtactgctgcatcttgtggtagtgtaaccatgcattgatgtgtgtttgtttcaatgggtcagaggagatcgattgcgattacctgcactacctgtcatgtacgggcgctcgtacgccaggcagcgtcgcgcccgtgacaggcgccgcgcacaggagcgcgatctgggagatcagcaggaacctatggaaagcagtggccaggaaggaaattagaagaatggaaagttgagggaaggaaaggagagattgattagtgattgattaagtgattgattagtgattgattagtgttaccatgtttaggcttgcctaaaataaaggctctaggacagcaggccgatggctatatatgcggcacaaggagacaggaataaagggcagcaaacaagttatctcctctccacctctctctaccatctaagcctacggctgtgggggataaccacgccggagaagacgaaccgcggctacaaccccatgctctaaacgcccaggcccttgacaacctggtatcacaagtcaggcgatcttcgtcctctcgatcccacacctccgatcagtccctcgacgtcacccaaccaccacccagccctccaccgtctccgccgtcggcctcctccattatgaccaccaaaaccaacgacgatctggctgcgatgatcgagaagctcacgggcacggtcgctgccctccaaaatgacgtcgagtcgttgaagaaggacaaggggccttcctcctcgccatccgacagcggcggccacgacggctagcaccacatcgatcggccaccaaggttccaaaagatcgacttcccacgttttgacggcaagtcgg

SEQ ID NO: 7570 - DNA, 4593 bp, Zea Mays
aacagagtgctgcatatctacaccattgactaaattcttttgttttcaactattttgctgcattcttgtctaagaaatgctgcatttggttccaggatgaaaaacttcagcatgttctaggacattttcagaaggaattcgaaggagaagtttctgcagagaacctcgggtcgaaatttggtggatatggttcatttttacccacatatcagcgttctcccctgctgccccaatctgaaagcccacacattgcattgaacattagcatgtcaggatcaccttaccaaccatctgctgagagaatggatcaaaacccctctactgtagctgtggagcccatttcccgaaataacggttttggagcaccttcagctagtgattcaatcaagaagaaaaaattcctgagtacaaatgatgaggaatcgattgcaggttccgattctttggacacttcacttagtggtagtgactcaaagtcactcaaatttcagaccaaagtttgtctcagcaatgatctgccaagagaaaatgcagttatctatagtggcctgggccttgatatttctccacgttcgtccatggaggagagtcctaatgggcttgggggactatctcctgagtgcagcaatgtgccatttgaatcacctcggactatcctacaggtcatgacatgccttccagttcctggaggtttcttgttgtcacctctgcatgggaatttgctgcaattaagaaataaagttgctccggtgctaaagaatttggaaacacatttagacatggaaaatgtatctagagcattggaaggacgttcacagtcttttcatccccttggacttatcagaggcaatgtgactaagcagatgaggccttgcagtaagaaaaaagtggcagtggatacaaagactagcaagtacaaaggtgatgctagtgcaaccatgaacaatgaagttaacatccaagtgcctgccagccaaaaagagaagatgaacacgaataacaagaatgagtttgaagttggttctgcaaggaaggagatcccagccagtgtaaagcatggagagttgtatatgcagccggccagcagtgtatcaactatgaatgcatatcatgttcctgcaccagttgtgatcgaggaccactgggcctgggatgaataggtgtgatatcagtgaggatgaaacaacaggggctctgaatgcattgtttgccattccagcgactgccacaaccctttcttcaggtagtcctcatactgcagttacaggaggtattatggaaaggaacaaggcttatccaaagttaaagactaaaataaggattgatcaagatgaacagaaatcatataagaaaactaaaattgaggcttggcatcaaattgacagaggccaggaccacaggtgtgattcagatggtgtggaagttcctgatgaacacaaagctttacttgcaaaagcaaaagcaatgaagggttcacatgaaactgatgacatgtctttatgcaagaaaaatatcgcttcagggtatgattcatcggaaaacgtcaataatgttaatgctttggatgtaccctttcacagtgagaagaaagaacatccttctgatgtagacatattagatttgtcttgcaagaagaatgcagtgaagaaattggagattcagcttaactctttacattgtataagcaatgggccccagaagaacttgaaggaaaagaagtctaataaattgaagtctaaagagatggcatccaaggaagatagtagacatggaaaagtgcagcatgcagatgccgtgttgtcttctctggggcacctaaattatgaactaggtgctgacaacaagtttgttactgggaaagaaagtctttcagaacaattagaaactttacctgccaagcaagttttggacttggctgaagcccctggaagggatgtagcctatctgcagtcttctacaactgtgagctcaagctcttcgaagatttcaagctccagaagaaacacaaactcgcaagaagcaaatgactctccaattaaatcagcctcttcattgccactgagagatttcagcattaaaatgatttccggtaacagaaaagatggaacagtggatgcttccttgggcaacacacacaatttagcaaggtaccaaaacagtgaagtcattgcattaaattatggtcagcaagctggaaactttgagggggatcaggttgcaggtgaacccaattttcatggttctttgcaaggaatctcggatagcaatatcaaggaaatacctcagtcagctggtgctcaagtctccaatatcactggttttgggaggagtttggataatagtctgccggaggcatcatgtagagaggaccttactgtaaatgatactgttgtaggtagaggagaccatcaactgtgttctggtgaacaaaaggactttaatatggaggttcgtttaccactacctgatcagcattgttttggcaggattaacactgagtctggttctgttcgacatgaaagtaagaacattgaagttcgccaaggtagtggaactgctcagcggctgggcatgttatttaaaaaagaaaaatctcaccttagaatccttaatcgagatattcagaaccatgttaatcaagttgtcaattttcctttgaaaggaggtaaacaaaaggtctgccctacttcagtaaaatctgaatcgttgaaaatgaaagcaaagttagtgaggttcaatgttgaaactggagtgcaacatggcagtgttaagcaagtgacatcaagcactttggacacaagtccaatgaggaaggatggtagtatgattacatttgctctcaaggaagctagagatctaaagcataaagcaaatgatttgaagaataaaggacaagaacttgaaagtacaggtctgtacttcgaggcggctttgaagtttctgcatgttgcgtttcttctagaaactcctagttttgacatttcaagacaaggtggtggaggtcggtcaatgaagatgtactctgaaactgcaaaattatgcaatttttgtgcttatgaatatgaacggtgcaaaaaaatggcttctgctgctttagcgtacaagtgtgtagaagttgcttacctcaaggctgcatactacaaacaccgtactgctacaaaagatcaacaggaacttcaggcagctgtacagataacccgaggtgaaccaccatcgccttctgccctagatattgataatttaaatagccatggatcatcaaatgcctcctcattaaagggtgacaattcacctcatgtgccaggcaatcatttgcctctagctattcacaaccaagcccagctgttgagattacttgcctatacaaatgatatgaacttggcattcgatgcaactcgaaaagcagaatctgtgattgcatctgctactgggtgtccggaaagaggtgttgttggtgatggccttgcttcggtaaaagcagtcttggatcttaacttcaacaatgtgaatgaactactaaggcttgttcgggtttcaatggaatcaataagcagctgatgatgtgttcaaaaatcggaattgcacagaatgtcacacagtgaactgctgatattggattaacatgcaatctgtgctccgtgatgctggttgcagctatgtcagtatatttttacagtgcaaaacaaattaacttgaaatcaagcattccctttcctaaattggaaattatgtgaaccaaggttctggaattcgggagcggtactgctgcatcttgtggtagtgtaaccatgcattgatgtgtgtttgtttcaatgggtcagaggagatcgattgcgattacctgcactacctgtcatgtacgggcgctcgtacgccaggcagcgtcgcgcccgtgacaggcgccgcgcacaggagcgcgatctgggagatcagcaggaacctatggaaagcagtggccaggaaggaaattagaagaatggaaagttgagggaaggaaaggagagattgattagtgattgattaagtgattgattagtgattgattagtgttaccatgtttaggcttgcctaaaataaaggctctaggacagcaggccgatggctatatatgcggcacaaggagacaggaataaagggcagcaaacaagttatctcctctccacctctctctaccatctaagcctacggctgtgggggataaccacgccggagaagacgaaccgcggctacaaccccatgctctaaacgcccaggcccttgacaacctggtatcacaagtcaggcgatcttcgtcctctcgatcccacacctccgatcagtccctcgacgtcacccaaccaccacccagccctccaccgtctccgccgtcggcctcctccattatgaccaccaaaaccaacgacgatctggctgcgatgatcgagaagctcacgggcacggtcgctgccctccaaaatgacgtcgagtcgttgaagaaggacaaggggccttcctcctcgccatccgacagcggcggccacgacggctagcaccacatcgatcggccaccaaggttccaaaagatcgacttcccacgttttgacggcaagtcgg

SEQ ID NO: 7571 - DNA, 4635 bp, Zea Mays
aacagagtgctgcatatctacaccattgactaaattcttttgttttcaactattttgctgcattcttgtctaagaaatgctgcatttggttccaggatgaaaaacttcagcatgttctaggacattttcagaaggaattcgaaggagaagtttctgcagagaacctcgggtcgaaatttggtggatatggttcatttttacccacatatcagcgttctcccctgctgccccaatctgaaagcccacacattgcattgaacattagcatgtcaggatcaccttaccaaccatctgctgagagaatggatcaaaacccctctactgtagctgtggagcccatttcccgaaataacggttttggagcaccttcagctagtgattcaatcaagaagaaaaaattcctgagtacaaatgatgaggaatcgattgcaggttccgattctttggacacttcacttagtggtagtgactcaaagtcactcaaatttcagaccaaagtttgtctcagcaatgatctgccaagagaaaatgcagttatctatagtggcctgggccttgatatttctccacgttcgtccatggaggagagtcctaatgggcttgggggactatctcctgagtgcagcaatgtgccatttgaatcacctcggactatcctacaggtcatgacatgccttccagttcctggaggtttcttgttgtcacctctgcatgggaatttgctgcaattaagaaataaagttgctccggtgctaaagaatttggaaacacatttagacatggaaaatgtatctagagcattggaaggacgttcacagtcttttcatccccttggacttatcagaggcaatgtgactaagcagatgaggccttgcagtaagaaaaaagtggcagtggatacaaagactagcaagtacaaaggtgatgctagtgcaaccatgaacaatgaagttaacatccaagtgcctgccagccaaaaagagaagatgaacacgaataacaagaatgagtttgaagttggttctgcaaggaaggagatcccagccagtgtaaagcatggagagttgtatatgcagccggccagcagtgtatcaactatgaatgcatatcatgttcctgcaccagttgtgatcgaggaccactgggcctgggatgaataggtgtgatatcagtgaggatgaaacaacaggggctctgaatgcattgtttgccattccagcgactgccacaaccctttcttcaggtagtcctcatactgcagttacaggaggtattatggaaaggaacaaggcttatccaaagttaaagactaaaataaggattgatcaagatgaacagaaatcatataagaaaactaaaattgaggcttggcatcaaattgacagaggccaggaccacaggtgtgattcagatggtgtggaagttcctgatgaacacaaagctttacttgcaaaagcaaaagcaatgaagggttcacatgaaactgatgacatgtctttatgcaagaaaaatatcgcttcagggtatgattcatcggaaaacgtcaataatgttaatgctttggatgtaccctttcacagtgagaagaaagaacatccttctgatgtagacatattagatttgtcttgcaagaagaatgcagtgaagaaattggagattcagcttaactctttacattgtataagcaatgggccccagaagaacttgaaggaaaagaagtctaataaattgaagtctaaagagatggcatccaaggaagatagtagacatggaaaagtgcagcatgcagatgccgtgttgtcttctctggggcacctaaattatgaactaggtgctgacaacaagtttgttactgggaaagaaagtctttcagaacaattagaaactttacctgccaagcaagttttggacttggctgaagcccctggaagggatgtagcctatctgcagtcttctacaactgtgagctcaagctcttcgaagatttcaagctccagaagaaacacaaactcgcaagaagcaaatgactctccaattaaatcagcctcttcattgccactgagagatttcagcattaaaatgatttccggtaacagaaaagatggaacagtggatgcttccttgggcaacacacacaatttagcaaggtaccaaaacagtgaagtcattgcattaaattatggtcagcaagctggaaactttgagggggatcaggttgcaggtgaacccaattttcatggttctttgcaaggaatctcggatagcaatatcaaggaaatacctcagtcagctggtgctcaagtctccaatatcactggttttgggaggagtttggataatagtctgccggaggcatcatgtagagaggaccttactgtaaatgatactgttgtaggtagaggagaccatcaactgtgttctggtgaacaaaaggactttaatatggaggttcgtttaccactacctgatcagcattgttttggcaggattaacactgagtctggttctgttcgacatgaaagtaagaacattgaagttcgccaaggtagtggaactgctcagcggctgggcatgttatttaaaaaagaaaaatctcaccttagaatccttaatcgagatattcagaaccatgttaatcaagttgtcaattttcctttgaaaggaggtaaacaaaaggtctgccctacttcagtaaaatctgaatcgttgaaaatgaaagcaaagttagtgaggttcaatgttgaaactggagtgcaacatggcagtgttaagcaagtgacatcaagcactttggacacaagtccaatgaggaaggatggtagtatgattacatttgctctcaaggaagctagagatctaaagcataaagcaaatgatttgaagaataaaggacaagaacttgaaagtacaggtctgtacttcgaggcggctttgaagtttctgcatgttgcgtttcttctagaaactcctagttttgacatttcaagacaaggtggtggaggtcggtcaatgaagatgtactctgaaactgcaaaattatgcaatttttgtgcttatgaatatgaacggtgcaaaaaaatggcttctgctgctttagcgtacaagtgtgtagaagttgcttacctcaaggctgcatactacaaacaccgtactgctacaaaagatcaacaggaacttcaggcagctgtacagataacccgaggtgaaccaccatcgccttctgccctagatattgataatttaaatagccatggatcatcaaatgcctcctcattaaagggtgacaattcacctcatgtgccaggcaatcatttgcctctagctattcacaaccaagcccagctgttgagattacttgcctatttctcctgcactcttttcgggaaaaaaaattggagtagctgcacataatttaagtttgactgaagaagaataagctcccccccgccccatgttctcatgctatcatatgcccatacggtttgagacaaatgatatgaacttggcattcgatgcaactcgaaaagcagaatctgtgattgcatctgctactgggtgtccggaaagaggtgttgttggtgatggccttgcttcggtaaaagcagtcttggatcttaacttcaacaatgtgaatgaactactaaggcttgttcgggtttcaatggaatcaataagcagctgatgatgtgttcaaaaatcggaattgcacagaatgtcacacagtgaactgctgatattggattaacatgcaatctgtgctccgtgatgctggttgcagctatgttctggaattcgggagcggtactgctgcatcttgtggtagtgtaaccatgcattgatgtgtgtttgtttcaatgggtcagaggagatcgattgcgattacctgcactacctgtcatgtacgggcgctcgtacgccaggcagcgtcgcgcccgtgacaggcgccgcgcacaggagcgcgatctgggagatcagcaggaacctatggaaagcagtggccaggaaggaaattagaagaatggaaagttgagggaaggaaaggagagattgattagtgattgattaagtgattgattagtgattgattagtgttaccatgtttaggcttgcctaaaataaaggctctaggacagcaggccgatggctatatatgcggcacaaggagacaggaataaagggcagcaaacaagttatctcctctccacctctctctaccatctaagcctacggctgtgggggataaccacgccggagaagacgaaccgcggctacaaccccatgctctaaacgcccaggcccttgacaacctggtatcacaagtcaggcgatcttcgtcctctcgatcccacacctccgatcagtccctcgacgtcacccaaccaccacccagccctccaccgtctccgccgtcggcctcctccattatgaccaccaaaaccaacgacgatctggctgcgatgatcgagaagctcacgggcacggtcgctgccctccaaaatgacgtcgagtcgttgaagaaggacaaggggccttcctcctcgccatccgacagcggcggccacgacggctagcaccacatcgatcggccaccaaggttccaaaagatcgacttcccacgttttgacggcaagtcgg

SEQ ID NO: 7572 - DNA, 4719 bp, Zea Mays
gtgacttgtgcgctcagaaggtgttagtttgcatggactctttaatttggttagaattacactgtcttgtttagcaagtggttatgttcctcaccaacccaggaccacataacagagtgctgcatatctacaccattgactaaattcttttgttttcaactattttgctgcattcttgtctaagaaatgctgcatttggttccaggatgaaaaacttcagcatgttctaggacattttcagaaggaattcgaaggagaagtttctgcagagaacctcgggtcgaaatttggtggatatggttcatttttacccacatatcagcgttctcccctgctgccccaatctgaaagcccacacattgcattgaacattagcatgtcaggatcaccttaccaaccatctgctgagagaatggatcaaaacccctctactgtagctgtggagcccatttcccgaaataacggttttggagcaccttcagctagtgattcaatcaagaagaaaaaattcctgagtacaaatgatgaggaatcgattgcaggttccgattctttggacacttcacttagtggtagtgactcaaagtcactcaaatttcagaccaaagtttgtctcagcaatgatctgccaagagaaaatgcagttatctatagtggcctgggccttgatatttctccacgttcgtccatggaggagagtcctaatgggcttgggggactatctcctgagtgcagcaatgtgccatttgaatcacctcggactatcctacaggtcatgacatgccttccagttcctggaggtttcttgttgtcacctctgcatgggaatttgctgcaattaagaaataaagttgctccggtgctaaagaatttggaaacacatttagacatggaaaatgtatctagagcattggaaggacgttcacagtcttttcatccccttggacttatcagaggcaatgtgactaagcagatgaggccttgcagtaagaaaaaagtggcagtggatacaaagactagcaagtacaaaggtgatgctagtgcaaccatgaacaatgaagttaacatccaagtgcctgccagccaaaaagagaagatgaacacgaataacaagaatgagtttgaagttggttctgcaaggaaggagatcccagccagtgtaaagcatggagagttgtatatgcagccggccagcagtgtatcaactatgaatgcatatcatgttcctgcaccagttgtgatcgaggaccactgggtacgctgtgacatatgccataaattgcgtcttctaccctatggaatgaacccttctatgcttccaaaaaaatggaaatgtaccatgcttcactggctgcctgggatgaataggtgtgatatcagtgaggatgaaacaacaggggctctgaatgcattgtttgccattccagcgactgccacaaccctttcttcaggtagtcctcatactgcagttacaggaggtattatggaaaggaacaaggcttatccaaagttaaagactaaaataaggattgatcaagatgaacagaaatcatataagaaaactaaaattgaggcttggcatcaaattgacagaggccaggaccacaggtgtgattcagatggtgtggaagttcctgatgaacacaaagctttacttgcaaaagcaaaagcaatgaagggttcacatgaaactgatgacatgtctttatgcaagaaaaatatcgcttcagggtatgattcatcggaaaacgtcaataatgttaatgctttggatgtaccctttcacagtgagaagaaagaacatccttctgatgtagacatattagatttgtcttgcaagaagaatgcagtgaagaaattggagattcagcttaactctttacattgtataagcaatgggccccagaagaacttgaaggaaaagaagtctaataaattgaagtctaaagagatggcatccaaggaagatagtagacatggaaaagtgcagcatgcagatgccgtgttgtcttctctggggcacctaaattatgaactaggtgctgacaacaagtttgttactgggaaagaaagtctttcagaacaattagaaactttacctgccaagcaagttttggacttggctgaagcccctggaagggatgtagcctatctgcagtcttctacaactgtgagctcaagctcttcgaagatttcaagctccagaagaaacacaaactcgcaagaagcaaatgactctccaattaaatcagcctcttcattgccactgagagatttcagcattaaaatgatttccggtaacagaaaagatggaacagtggatgcttccttgggcaacacacacaatttagcaaggtaccaaaacagtgaagtcattgcattaaattatggtcagcaagctggaaactttgagggggatcaggttgcaggtgaacccaattttcatggttctttgcaaggaatctcggatagcaatatcaaggaaatacctcagtcagctggtgctcaagtctccaatatcactggttttgggaggagtttggataatagtctgccggaggcatcatgtagagaggaccttactgtaaatgatactgttgtaggtagaggagaccatcaactgtgttctggtgaacaaaaggactttaatatggaggttcgtttaccactacctgatcagcattgttttggcaggattaacactgagtctggttctgttcgacatgaaagtaagaacattgaagttcgccaaggtagtggaactgctcagcggctgggcatgttatttaaaaaagaaaaatctcaccttagaatccttaatcgagatattcagaaccatgttaatcaagttgtcaattttcctttgaaaggaggtaaacaaaaggtctgccctacttcagtaaaatctgaatcgttgaaaatgaaagcaaagttagtgaggttcaatgttgaaactggagtgcaacatggcagtgttaagcaagtgacatcaagcactttggacacaagtccaatgaggaaggatggtagtatgattacatttgctctcaaggaagctagagatctaaagcataaagcaaatgatttgaagaataaaggacaagaacttgaaagtacaggtctgtacttcgaggcggctttgaagtttctgcatgttgcgtttcttctagaaactcctagttttgacatttcaagacaaggtggtggaggtcggtcaatgaagatgtactctgaaactgcaaaattatgcaatttttgtgcttatgaatatgaacggtgcaaaaaaatggcttctgctgctttagcgtacaagtgtgtagaagttgcttacctcaaggctgcatactacaaacaccgtactgctacaaaagatcaacaggaacttcaggcagctgtacagataacccgaggtgaaccaccatcgccttctgccctagatattgataatttaaatagccatggatcatcaaatgcctcctcattaaagggtgacaattcacctcatgtgccaggcaatcatttgcctctagctattcacaaccaagcccagctgttgagattacttgcctatacaaatgatatgaacttggcattcgatgcaactcgaaaagcagaatctgtgattgcatctgctactgggtgtccggaaagaggtgttgttggtgatggccttgcttcggtaaaagcagtcttggatcttaacttcaacaatgtgaatgaactactaaggcttgttcgggtttcaatggaatcaataagcagctgatgatgtgttcaaaaatcggaattgcacagaatgtcacacagtgaactgctgatattggattaacatgcaatctgtgctccgtgatgctggttgcagctatgttctggaattcgggagcggtactgctgcatcttgtggtagtgtaaccatgcattgatgtgtgtttgtttcaatgggtcagaggagatcgattgcgattacctgcactacctgtcatgtacgggcgctcgtacgccaggcagcgtcgcgcccgtgacaggcgccgcgcacaggagcgcgatctgggagatcagcaggaacctatggaaagcagtggccaggaaggaaattagaagaatggaaagttgagggaaggaaaggagagattgattagtgattgattaagtgattgattagtgattgattagtgttaccatgtttaggcttgcctaaaataaaggctctaggacagcaggccgatggctatatatgcggcacaaggagacaggaataaagggcagcaaacaagttatctcctctccacctctctctaccatctaagcctacggctgtgggggataaccacgccggagaagacgaaccgcggctacaaccccatgctctaaacgcccaggcccttgacaacctggtatcacaagtcaggcgatcttcgtcctctcgatcccacacctccgatcagtccctcgacgtcacccaaccaccacccagccctccaccgtctccgccgtcggcctcctccattatgaccaccaaaaccaacgacgatctggctgcgatgatcgagaagctcacgggcacggtcgctgccctccaaaatgacgtcgagtcgttgaagaaggacaaggggccttcctcctcgccatccgacagcggcggccacgacggctagcaccacatcgatcggccaccaaggttccaaaagatcgacttcccacgttttgacggcaagtcgg

SEQ ID NO: 7573 - DNA, 4704 bp, Zea Mays
atggcatggctagccgcgacggtggcggctgtggcagggccgccggcgcccatggtcactggggagtgggggggagggctccatgggaaggggaggggtgaggccggcggcaccagctggggggaagacgatggtggcgggtggacgccggggatgttaagcagggcacaatctttgacagggtcgaaatttggtggatatggttcatttttacccacatatcagcgttctcccctgctgccccaatctgaaagcccacacattgcattgaacattagcatgtcaggatcaccttaccaaccatctgctgagagaatggatcaaaacccctctactgtagctgtggagcccatttcccgaaataacggttttggagcaccttcagctagtgattcaatcaagaagaaaaaattcctgagtacaaatgatgaggaatcgattgcaggttccgattctttggacacttcacttagtggtagtgactcaaagtcactcaaatttcagaccaaagtttgtctcagcaatgatctgccaagagaaaatgcagttatctatagtggcctgggccttgatatttctccacgttcgtccatggaggagagtcctaatgggcttgggggactatctcctgagtgcagcaatgtgccatttgaatcacctcggactatcctacaggtcatgacatgccttccagttcctggaggtttcttgttgtcacctctgcatgggaatttgctgcaattaagaaataaagttgctccggtgctaaagaatttggaaacacatttagacatggaaaatgtatctagagcattggaaggacgttcacagtcttttcatccccttggacttatcagaggcaatgtgactaagcagatgaggccttgcagtaagaaaaaagtggcagtggatacaaagactagcaagtacaaaggtgatgctagtgcaaccatgaacaatgaagttaacatccaagtgcctgccagccaaaaagagaagatgaacacgaataacaagaatgagtttgaagttggttctgcaaggaaggagatcccagccagtgtaaagcatggagagttgtatatgcagccggccagcagtgtatcaactatgaatgcatatcatgttcctgcaccagttgtgatcgaggaccactgggtacgctgtgacatatgccataaattgcgtcttctaccctatggaatgaacccttctatgcttccaaaaaaatggaaatgtaccatgcttcactggctgcctgggatgaataggtgtgatatcagtgaggatgaaacaacaggggctctgaatgcattgtttgccattccagcgactgccacaaccctttcttcaggtagtcctcatactgcagttacaggaggtattatggaaaggaacaaggcttatccaaagttaaagactaaaataaggattgatcaagatgaacagaaatcatataagaaaactaaaattgaggcttggcatcaaattgacagaggccaggaccacaggtgtgattcagatggtgtggaagttcctgatgaacacaaagctttacttgcaaaagcaaaagcaatgaagggttcacatgaaactgatgacatgtctttatgcaagaaaaatatcgcttcagggtatgattcatcggaaaacgtcaataatgttaatgctttggatgtaccctttcacagtgagaagaaagaacatccttctgatgtagacatattagatttgtcttgcaagaagaatgcagtgaagaaattggagattcagcttaactctttacattgtataagcaatgggccccagaagaacttgaaggaaaagaagtctaataaattgaagtctaaagagatggcatccaaggaagatagtagacatggaaaagtgcagcatgcagatgccgtgttgtcttctctggggcacctaaattatgaactaggtgctgacaacaagtttgttactgggaaagaaagtctttcagaacaattagaaactttacctgccaagcaagttttggacttggctgaagcccctggaagggatgtagcctatctgcagtcttctacaactgtgagctcaagctcttcgaagatttcaagctccagaagaaacacaaactcgcaagaagcaaatgactctccaattaaatcagcctcttcattgccactgagagatttcagcattaaaatgatttccggtaacagaaaagatggaacagtggatgcttccttgggcaacacacacaatttagcaaggtaccaaaacagtgaagtcattgcattaaattatggtcagcaagctggaaactttgagggggatcaggttgcaggtgaacccaattttcatggttctttgcaaggaatctcggatagcaatatcaaggaaatacctcagtcagctggtgctcaagtctccaatatcactggttttgggaggagtttggataatagtctgccggaggcatcatgtagagaggaccttactgtaaatgatactgttgtaggtagaggagaccatcaactgtgttctggtgaacaaaaggactttaatatggaggttcgtttaccactacctgatcagcattgttttggcaggattaacactgagtctggttctgttcgacatgaaagtaagaacattgaagttcgccaaggtagtggaactgctcagcggctgggcatgttatttaaaaaagaaaaatctcaccttagaatccttaatcgagatattcagaaccatgttaatcaagttgtcaattttcctttgaaaggaggtaaacaaaaggtctgccctacttcagtaaaatctgaatcgttgaaaatgaaagcaaagttagtgaggttcaatgttgaaactggagtgcaacatggcagtgttaagcaagtgacatcaagcactttggacacaagtccaatgaggaaggatggtagtatgattacatttgctctcaaggaagctagagatctaaagcataaagcaaatgatttgaagaataaaggacaagaacttgaaagtacaggtctgtacttcgaggcggctttgaagtttctgcatgttgcgtttcttctagaaactcctagttttgacatttcaagacaaggtggtggaggtcggtcaatgaagatgtactctgaaactgcaaaattatgcaatttttgtgcttatgaatatgaacggtgcaaaaaaatggcttctgctgctttagcgtacaagtgtgtagaagttgcttacctcaaggctgcatactacaaacaccgtactgctacaaaagatcaacaggaacttcaggcagctgtacagataacccgaggtgaaccaccatcgccttctgccctagatattgataatttaaatagccatggatcatcaaatgcctcctcattaaagggtgacaattcacctcatgtgccaggcaatcatttgcctctagctattcacaaccaagcccagctgttgagattacttgcctatacaaatgatatgaacttggcattcgatgcaactcgaaaagcagaatctgtgattgcatctgctactgggtgtccggaaagaggtgttgttggtgatggccttgcttcggtaaaagcagtcttggatcttaacttcaacaatgtgaatgaactactaaggcttgttcgggtttcaatggaatcaataagcagctgatgatgtgttcaaaaatcggaattgcacagaatgtcacacagtgaactgctgatattggattaacatgcaatctgtgctccgtgatgctggttgcagctatgtcagtatatttttacagtgcaaaacaaattaacttgaaatcaagcattccctttcctaaattggaaattatgtgaaccaaggttctggaattcgggagcggtactgctgcatcttgtggtagtgtaaccatgcattgatgtgtgtttgtttcaatgggtcagaggagatcgattgcgattacctgcactacctgtcatgtacgggcgctcgtacgccaggcagcgtcgcgcccgtgacaggcgccgcgcacaggagcgcgatctgggagatcagcaggaacctatggaaagcagtggccaggaaggaaattagaagaatggaaagttgagggaaggaaaggagagattgattagtgattgattaagtgattgattagtgattgattagtgttaccatgtttaggcttgcctaaaataaaggctctaggacagcaggccgatggctatatatgcggcacaaggagacaggaataaagggcagcaaacaagttatctcctctccacctctctctaccatctaagcctacggctgtgggggataaccacgccggagaagacgaaccgcggctacaaccccatgctctaaacgcccaggcccttgacaacctggtatcacaagtcaggcgatcttcgtcctctcgatcccacacctccgatcagtccctcgacgtcacccaaccaccacccagccctccaccgtctccgccgtcggcctcctccattatgaccaccaaaaccaacgacgatctggctgcgatgatcgagaagctcacgggcacggtcgctgccctccaaaatgacgtcgagtcgttgaagaaggacaaggggccttcctcctcgccatccgacagcggcggccacgacggctagcaccacatcgatcggccaccaaggttccaaaagatcgacttcccacgttttgacggcaagtcgg

SEQ ID NO: 7574 - DNA, 1437 bp, Zea Mays
atgttcctcaccaacccaggaccacataacagagtgctgcatatctacaccattgactaaattcttttgttttcaactattttgctgcattcttgtctaagaaatgctgcatttggttccaggatgaaaaacttcagcatgttctaggacattttcagaaggaattcgaaggagaagtttctgcagagaacctcgggtcgaaatttggtggatatggttcatttttacccacatatcagcgttctcccctgctgccccaatctgaaagcccacacattgcattgaacattagcatgtcaggatcaccttaccaaccatctgctgagagaatggatcaaaacccctctactgtagctgtggagcccatttcccgaaataacggttttggagcaccttcagctagtgattcaatcaagaagaaaaaattcctgagtacaaatgatgaggaatcgattgcaggttccgattctttggacacttcacttagtggtagtgactcaaagtcactcaaatttcagaccaaagtttgtctcagcaatgatctgccaagagaaaatgcagttatctatagtggcctgggccttgatatttctccacgttcgtccatggaggagagtcctaatgggcttgggggactatctcctgagtgcagcaatgtgccatttgaatcacctcggactatcctacaggtcatgacatgccttccagttcctggaggtttcttgttgtcacctctgcatgggaatttgctgcaattaagaaataaagttgctccggtgctaaagaatttggaaacacatttagacatggaaaatgtatctagagcattggaaggacgttcacagtcttttcatccccttggacttatcagaggcaatgtgactaagcagatgaggccttgcagtaagaaaaaagtggcagtggatacaaagactagcaagtacaaaggtgatgctagtgcaaccatgaacaatgaagttaacatccaagtgcctgccagccaaaaagagaagatgaacacgaataacaagaatgagtttgaagttggttctgcaaggaaggagatcccagccagtgtaaagcatggagagttgtatatgcagccggccagcagtgtatcaactatgaatgcatatcatgttcctgcaccagttgtgatcgaggaccactgggtacgctgtgacatatgccataaattgcgtcttctaccctatggaatgaacccttctatgcttccaaaaaaatggaaatgtaccatgcttcactggctgcctgggatgaataggtgtgatatcagtgaggatgaaacaacaggggctctgaatgcattgtttgccattccagcgactgccacaaccctttcttcagaaatcaacaagttgtgcttccgaaggcacatttgaagatcaatggtcttctgatgacaatgagactgag

SEQ ID NO: 7575 - DNA, 3769 bp, Zea Mays
atttgttctaggctcttctctatcctctccacacctttcttcttcgtgcacgcctaggagcaagctgctgccctctccctggccagccctctcccatggccgccccctccctcagcttcgtcttcagccgccgtcgaaccagggcgagcaccccacgcccgtcgccactcccatcccctccccctctctgctgatggtcacgcgccctagcatccgctcgcccctgcgcgcactcctcccccatggcgagctcgccctcaactccctaccatggtgctcgcccaggctcgccggcatccatggccgcagttccctagatgctgccagctctggctccctagacgccgccagctctggctcgccggtctccgggctcgttggagatggcatattacctccaagacctacaacctagtgctcctcgacgtcgacagtcacgaccgcttcctcaagtccgtttgctgcaagcacgacgaggtgctgctcatcatcaaggtctacttcaagcgcaccggagcagagtggaggctggagaggattaggaacactttcaaggggatcgagggatcccacatgtggccctttcagatgaggattctatgcttagggcttaccgtcctgattctgattctagggtgtaggttgtagcttcagaaaaaggattggcgacatttttccaatgcacaattgcatgttctaaggcaaatttaagtggggtttagcaaatttttaacccatgtactgtatatttgtttggttcagataagtttacactaaggttttgcgcttttggcattaacttggtttaactgccttttccagcggtgtagtattttttgcctctatatgttgtgagttatccattttgattaagtcctgatgatgttagtgtagccactttattaggatgtttttgcacaagatagcatgtgtctaacatagccattttatagcatgaatcgatgaatgtacattgcttgtcggttcatatgctgatttggcttccaatgttgttcttggctgcaaatagattaggtagcatatctcctgagatagtacttcttcatcaacttgcactatcgattgagtacatgccctttctatagtcagattgcaaagaaatggcttgactctcaggtgagttctcttttctttggtgtgtgtgtgttgaatgactatcagtatttaggcgtagaagttgatcctgctggtgtccatagcgcgtaaggacatacattctcactgctacatgtagatataaatattacagtagaatgaactgaaagttttttgttgaaattttaagaaccaatagttaatcttttggacataatcaaagtctaactaaagccaaaaagtatattcgctttaaatagtctgtttataaagggaatctatggatcccacgactatttccatttactcctatgtgccgggagaacaccatgcactaatctctgtttagtgcctacaatgaaatttttggtccattgttgaaccatgctaaatattatatcctaaaattatactatttattaccaaatgctgggtttgtttcatggaattaccaagtgcacgcagtacgcctctgagcaatcgattctcacgccactcctccacgatctccattaaagacacttcagacagatcgagagcttctccatataacacactagactgtgtttcatgtatcctcgtccttgataacacacatataaaatcctattaaaaatttataatagtgaaaagcttttggcaaatgcatgttttgattgatgttacgcagacaataattttttgactaagtactgcaacaattgagttgttgaagcattcatgtacatttttgttccatgaaacgaaactcattgtgatctttctctcaaagttgtaggaccatggctgaagacaagagtcatccatggttgaatgagcggatcatgtcattcctctcaaaacggtcggtcgttgtgcattcctgacaagacttggagataggtgagtacatctacttttgcattgtagtatgattctagtggtttatacaagctgatgctttatattatacttttgttatattaaaaccgatctagggctttattaaattttgatccaccagtgtcatcacttactattataacagtttcctacgagcgcggggcacgcccaagttactagtatatttatagtatgtctcctttatatgacacaaatggatgtgtgctctagcggtataagttgcttgctttgagccgaacatcttgggtttgaatcctgtccacgcataatttttttggtattattccgcacgagccacacgaagactgggtatttgattgaatatgtacacagaaagctctgaatgcattatgcaattctaatattttgctaaatgtggtcacctattatgtttgttaatctctgaagtagtagtccagtctagtgagttgtggttgaagtaatttaactcataataaactattcttaatcatagtcacattttctagaaagggacaactgaccctagtcagacatatgagagggatacttatgtgttgcacttctatcgaagagcatgctataagttcaaagtaaaatagtatagaatcaatttttaattttcaccctataaatttaagataagcttatatctaaaattcaaaatgttttgaaatacaaattagcctagcccattaagtagattacaattccaacaaaaataaagggatccaagtgggccctttgaaaagttgaatgattctaatgtgctatatcatacaacgatgccaattaatatcttttgttttttctactaaccatattgctatgctattggcaaagctttcattcattcttaatttaccaacaaaaggctccttgagataaaaaagatactggaagtcattggaggcgaacagatggtaacatatcatgtacatataagattgttgtatcattagaagtacctaactaataattgtagcattagagccttacaaatcaattaaagtactactacattaatacattatggaggccattatcaccaatacagagcatgctaagccagagcacaaaggccttttgagagtccatgaagtgggaggtggctctacgatgggttgactccactcaattggatctgatcttactcgtattcaagagctactagagctgcggtagaatgtgtccatgcagagcgagcaagaggcctctgcagtgggtatggattcaagcaagactcacaacaagtgtgcatgaggtatatatgcaatctgatgtcctagcagtcaagaaatggtatagtctagggtcttggtgatctcaaatattatgttaaatgtatttgttagaataattagtgtgatcttaatttagttggtgtgctatacataatagtctagattagtagttctaaaagttagttgaagtatttctattcattattgaggattgtcactctttattgaggattatgtataacttctttattgaggattgtcactctttatgtatttctatctatagtttctttattgaggattgtcccttaagctaataagctaacatgtactttaaaacttataaatgttttatacattcaatttgtaatatttttgaatcaatttcttttgtaataaactctgatgatatatattgtaatcttgttataacttgtaaatgttgtaacttgtaactgaaagtcgcctagaggggggtgaatagggtgaatctgaaatttataaacttaagcacaactacaacccgg

SEQ ID NO: 7576 - DNA, 3763 bp, Zea Mays
atttgttctaggctcttctctatcctctccacacctttcttcttcgtgcacgcctaggagcaagctgctgccctctccctggccagccctctcccatggccgccccctccctcagcttcgtcttcagccgccgtcgaaccagggcgagcaccccacgcccgtcgccactcccatcccctccccctctctgctgatggtcacgcgccctagcatccgctcgcccctgcgcgcactcctcccccatggcgagctcgccctcaactccctaccatggtgctcgcccaggctcgccggcatccatggccgcagttccctagatgctgccagctctggctccctagacgccgccagctctggctcgccggtctccgggctcgttggagatggcatattacctccaagacctacaacctagtgctcctcgacgtcgacagtcacgaccgcttcctcaagtccgtttgctgcaagcacgacgaggtgctgctcatcatcaaggtctacttcaagcgcaccgagtggaggctggagaggattaggaacactttcaaggggatcgagggatcccacatgtggccctttcagatgaggattctatgcttagggcttaccgtcctgattctgattctagggtgtaggttgtagcttcagaaaaaggattggcgacatttttccaatgcacaattgcatgttctaaggcaaatttaagtggggtttagcaaatttttaacccatgtactgtatatttgtttggttcagataagtttacactaaggttttgcgcttttggcattaacttggtttaactgccttttccagcggtgtagtattttttgcctctatatgttgtgagttatccattttgattaagtcctgatgatgttagtgtagccactttattaggatgtttttgcacaagatagcatgtgtctaacatagccattttatagcatgaatcgatgaatgtacattgcttgtcggttcatatgctgatttggcttccaatgttgttcttggctgcaaatagattaggtagcatatctcctgagatagtacttcttcatcaacttgcactatcgattgagtacatgccctttctatagtcagattgcaaagaaatggcttgactctcaggtgagttctcttttctttggtgtgtgtgtgttgaatgactatcagtatttaggcgtagaagttgatcctgctggtgtccatagcgcgtaaggacatacattctcactgctacatgtagatataaatattacagtagaatgaactgaaagttttttgttgaaattttaagaaccaatagttaatcttttggacataatcaaagtctaactaaagccaaaaagtatattcgctttaaatagtctgtttataaagggaatctatggatcccacgactatttccatttactcctatgtgccgggagaacaccatgcactaatctctgtttagtgcctacaatgaaatttttggtccattgttgaaccatgctaaatattatatcctaaaattatactatttattaccaaatgctgggtttgtttcatggaattaccaagtgcacgcagtacgcctctgagcaatcgattctcacgccactcctccacgatctccattaaagacacttcagacagatcgagagcttctccatataacacactagactgtgtttcatgtatcctcgtccttgataacacacatataaaatcctattaaaaatttataatagtgaaaagcttttggcaaatgcatgttttgattgatgttacgcagacaataattttttgactaagtactgcaacaattgagttgttgaagcattcatgtacatttttgttccatgaaacgaaactcattgtgatctttctctcaaagttgtaggaccatggctgaagacaagagtcatccatggttgaatgagcggatcatgtcattcctctcaaaacggtcggtcgttgtgcattcctgacaagacttggagataggtgagtacatctacttttgcattgtagtatgattctagtggtttatacaagctgatgctttatattatacttttgttatattaaaaccgatctagggctttattaaattttgatccaccagtgtcatcacttactattataacagtttcctacgagcgcggggcacgcccaagttactagtatatttatagtatgtctcctttatatgacacaaatggatgtgtgctctagcggtataagttgcttgctttgagccgaacatcttgggtttgaatcctgtccacgcataatttttttggtattattccgcacgagccacacgaagactgggtatttgattgaatatgtacacagaaagctctgaatgcattatgcaattctaatattttgctaaatgtggtcacctattatgtttgttaatctctgaagtagtagtccagtctagtgagttgtggttgaagtaatttaactcataataaactattcttaatcatagtcacattttctagaaagggacaactgaccctagtcagacatatgagagggatacttatgtgttgcacttctatcgaagagcatgctataagttcaaagtaaaatagtatagaatcaatttttaattttcaccctataaatttaagataagcttatatctaaaattcaaaatgttttgaaatacaaattagcctagcccattaagtagattacaattccaacaaaaataaagggatccaagtgggccctttgaaaagttgaatgattctaatgtgctatatcatacaacgatgccaattaatatcttttgttttttctactaaccatattgctatgctattggcaaagctttcattcattcttaatttaccaacaaaaggctccttgagataaaaaagatactggaagtcattggaggcgaacagatggtaacatatcatgtacatataagattgttgtatcattagaagtacctaactaataattgtagcattagagccttacaaatcaattaaagtactactacattaatacattatggaggccattatcaccaatacagagcatgctaagccagagcacaaaggccttttgagagtccatgaagtgggaggtggctctacgatgggttgactccactcaattggatctgatcttactcgtattcaagagctactagagctgcggtagaatgtgtccatgcagagcgagcaagaggcctctgcagtgggtatggattcaagcaagactcacaacaagtgtgcatgaggtatatatgcaatctgatgtcctagcagtcaagaaatggtatagtctagggtcttggtgatctcaaatattatgttaaatgtatttgttagaataattagtgtgatcttaatttagttggtgtgctatacataatagtctagattagtagttctaaaagttagttgaagtatttctattcattattgaggattgtcactctttattgaggattatgtataacttctttattgaggattgtcactctttatgtatttctatctatagtttctttattgaggattgtcccttaagctaataagctaacatgtactttaaaacttataaatgttttatacattcaatttgtaatatttttgaatcaatttcttttgtaataaactctgatgatatatattgtaatcttgttataacttgtaaatgttgtaacttgtaactgaaagtcgcctagaggggggtgaatagggtgaatctgaaatttataaacttaagcacaactacaacccgg

SEQ ID NO: 7577 - DNA, 3018 bp, Zea Mays
atttgttctaggctcttctctatcctctccacacctttcttcttcgtgcacgcctaggagcaagctgctgccctctccctggccagccctctcccatggccgccccctccctcagcttcgtcttcagccgccgtcgaaccagggcgagcaccccacgcccgtcgccactcccatcccctccccctctctgctgatggtcacgcgccctagcatccgctcgcccctgcgcgcactcctcccccatggcgagctcgccctcaactccctaccatggtgctcgcccaggctcgccggcatccatggccgcagttccctagatgctgccagctctggctccctagacgccgccagctctggctcgccggtctccgggctcgttggagatggcatattacctccaagacctacaacctagtgctcctcgacgtcgacagtcacgaccgcttcctcaagtccgtttgctgcaagcacgacgaggtgctgctcatcatcaaggtctacttcaagcgcaccggagcagagtggaggctggagaggattaggaacactttcaaggggatcgagggatcccacatgtggccctttcagatgaggattctatgcttagggcttaccgtcctgattctgattctagggtgtaggttgtagcttcagaaaaaggattggcgacatttttccaatgcacaattgcatgttctaaggcaaatttaagtggggtttagcaaatttttaacccatgtactgtatatttgtttggttcagataagtttacactaaggttttgcgcttttggcattaacttggtttaactgccttttccagcggtgtagtattttttgcctctatatgttgtgagttatccattttgattaagtcctgatgatgttagtgtagccactttattaggatgtttttgcacaagatagcatgtgtctaacatagccattttatagcatgaatcgatgaatgtacattgcttgtcggttcatatgctgatttggcttccaatgttgttcttggctgcaaatagattaggtagcatatctcctgagatagtacttcttcatcaacttgcactatcgattgagtacatgccctttctatagtcagattgcaaagaaatggcttgactctcagttgtaggaccatggctgaagacaagagtcatccatggttgaatgagcggatcatgtcattcctctcaaaacggtcggtcgttgtgcattcctgacaagacttggagataggtgagtacatctacttttgcattgtagtatgattctagtggtttatacaagctgatgctttatattatacttttgttatattaaaaccgatctagggctttattaaattttgatccaccagtgtcatcacttactattataacagtttcctacgagcgcggggcacgcccaagttactagtatatttatagtatgtctcctttatatgacacaaatggatgtgtgctctagcggtataagttgcttgctttgagccgaacatcttgggtttgaatcctgtccacgcataatttttttggtattattccgcacgagccacacgaagactgggtatttgattgaatatgtacacagaaagctctgaatgcattatgcaattctaatattttgctaaatgtggtcacctattatgtttgttaatctctgaagtagtagtccagtctagtgagttgtggttgaagtaatttaactcataataaactattcttaatcatagtcacattttctagaaagggacaactgaccctagtcagacatatgagagggatacttatgtgttgcacttctatcgaagagcatgctataagttcaaagtaaaatagtatagaatcaatttttaattttcaccctataaatttaagataagcttatatctaaaattcaaaatgttttgaaatacaaattagcctagcccattaagtagattacaattccaacaaaaataaagggatccaagtgggccctttgaaaagttgaatgattctaatgtgctatatcatacaacgatgccaattaatatcttttgttttttctactaaccatattgctatgctattggcaaagctttcattcattcttaatttaccaacaaaaggctccttgagataaaaaagatactggaagtcattggaggcgaacagatggtaacatatcatgtacatataagattgttgtatcattagaagtacctaactaataattgtagcattagagccttacaaatcaattaaagtactactacattaatacattatggaggccattatcaccaatacagagcatgctaagccagagcacaaaggccttttgagagtccatgaagtgggaggtggctctacgatgggttgactccactcaattggatctgatcttactcgtattcaagagctactagagctgcggtagaatgtgtccatgcagagcgagcaagaggcctctgcagtgggtatggattcaagcaagactcacaacaagtgtgcatgaggtatatatgcaatctgatgtcctagcagtcaagaaatggtatagtctagggtcttggtgatctcaaatattatgttaaatgtatttgttagaataattagtgtgatcttaatttagttggtgtgctatacataatagtctagattagtagttctaaaagttagttgaagtatttctattcattattgaggattgtcactctttattgaggattatgtataacttctttattgaggattgtcactctttatgtatttctatctatagtttctttattgaggattgtcccttaagctaataagctaacatgtactttaaaacttataaatgttttatacattcaatttgtaatatttttgaatcaatttcttttgtaataaactctgatgatatatattgtaatcttgttataacttgtaaatgttgtaacttgtaactgaaagtcgcctagaggggggtgaatagggtgaatctgaaatttataaacttaagcacaactacaacccgg

SEQ ID NO: 7578 - DNA, 3012 bp, Zea Mays
atttgttctaggctcttctctatcctctccacacctttcttcttcgtgcacgcctaggagcaagctgctgccctctccctggccagccctctcccatggccgccccctccctcagcttcgtcttcagccgccgtcgaaccagggcgagcaccccacgcccgtcgccactcccatcccctccccctctctgctgatggtcacgcgccctagcatccgctcgcccctgcgcgcactcctcccccatggcgagctcgccctcaactccctaccatggtgctcgcccaggctcgccggcatccatggccgcagttccctagatgctgccagctctggctccctagacgccgccagctctggctcgccggtctccgggctcgttggagatggcatattacctccaagacctacaacctagtgctcctcgacgtcgacagtcacgaccgcttcctcaagtccgtttgctgcaagcacgacgaggtgctgctcatcatcaaggtctacttcaagcgcaccggagcagagtggaggctggagaggattaggaacactttcaaggggatcgagggatcccacatgtggccctttcagatgaggattctatgcttagggcttaccgtcctgattctgattctagggtgtaggttgtagcttcagaaaaaggattggcgacatttttccaatgcacaattgcatgttctaaggcaaatttaagtggggtttagcaaatttttaacccatgtactgtatatttgtttggttcagataagtttacactaaggttttgcgcttttggcattaacttggtttaactgccttttccagcggtgtagtattttttgcctctatatgttgtgagttatccattttgattaagtcctgatgatgttagtgtagccactttattaggatgtttttgcacaagatagcatgtgtctaacatagccattttatagcatgaatcgatgaatgtacattgcttgtcggttcatatgctgatttggcttccaatgttgttcttggctgcaaatagattaggtagcatatctcctgagatagtacttcttcatcaacttgcactatcgattgagtacatgccctttctatagtcagattgcaaagaaatggcttgactctcaggaccatggctgaagacaagagtcatccatggttgaatgagcggatcatgtcattcctctcaaaacggtcggtcgttgtgcattcctgacaagacttggagataggtgagtacatctacttttgcattgtagtatgattctagtggtttatacaagctgatgctttatattatacttttgttatattaaaaccgatctagggctttattaaattttgatccaccagtgtcatcacttactattataacagtttcctacgagcgcggggcacgcccaagttactagtatatttatagtatgtctcctttatatgacacaaatggatgtgtgctctagcggtataagttgcttgctttgagccgaacatcttgggtttgaatcctgtccacgcataatttttttggtattattccgcacgagccacacgaagactgggtatttgattgaatatgtacacagaaagctctgaatgcattatgcaattctaatattttgctaaatgtggtcacctattatgtttgttaatctctgaagtagtagtccagtctagtgagttgtggttgaagtaatttaactcataataaactattcttaatcatagtcacattttctagaaagggacaactgaccctagtcagacatatgagagggatacttatgtgttgcacttctatcgaagagcatgctataagttcaaagtaaaatagtatagaatcaatttttaattttcaccctataaatttaagataagcttatatctaaaattcaaaatgttttgaaatacaaattagcctagcccattaagtagattacaattccaacaaaaataaagggatccaagtgggccctttgaaaagttgaatgattctaatgtgctatatcatacaacgatgccaattaatatcttttgttttttctactaaccatattgctatgctattggcaaagctttcattcattcttaatttaccaacaaaaggctccttgagataaaaaagatactggaagtcattggaggcgaacagatggtaacatatcatgtacatataagattgttgtatcattagaagtacctaactaataattgtagcattagagccttacaaatcaattaaagtactactacattaatacattatggaggccattatcaccaatacagagcatgctaagccagagcacaaaggccttttgagagtccatgaagtgggaggtggctctacgatgggttgactccactcaattggatctgatcttactcgtattcaagagctactagagctgcggtagaatgtgtccatgcagagcgagcaagaggcctctgcagtgggtatggattcaagcaagactcacaacaagtgtgcatgaggtatatatgcaatctgatgtcctagcagtcaagaaatggtatagtctagggtcttggtgatctcaaatattatgttaaatgtatttgttagaataattagtgtgatcttaatttagttggtgtgctatacataatagtctagattagtagttctaaaagttagttgaagtatttctattcattattgaggattgtcactctttattgaggattatgtataacttctttattgaggattgtcactctttatgtatttctatctatagtttctttattgaggattgtcccttaagctaataagctaacatgtactttaaaacttataaatgttttatacattcaatttgtaatatttttgaatcaatttcttttgtaataaactctgatgatatatattgtaatcttgttataacttgtaaatgttgtaacttgtaactgaaagtcgcctagaggggggtgaatagggtgaatctgaaatttataaacttaagcacaactacaacccgg

SEQ ID NO: 7579 - DNA, 2920 bp, Zea Mays
atttgttctaggctcttctctatcctctccacacctttcttcttcgtgcacgcctaggagcaagctgctgccctctccctggccagccctctcccatggccgccccctccctcagcttcgtcttcagccgccgtcgaaccagggcgagcaccccacgcccgtcgccactcccatcccctccccctctctgctgatggtcacgcgccctagcatccgctcgcccctgcgcgcactcctcccccatggcgagctcgccctcaactccctaccatggtgctcgcccaggctcgccggcatccatggccgcagttccctagatgctgccagctctggctccctagacgccgccagctctggctcgccggtctccgggctcgttggagatggcatattacctccaagacctacaacctagtgctcctcgacgtcgacagtcacgaccgcttcctcaagtccgtttgctgcaagcacgacgaggtgctgctcatcatcaaggtctacttcaagcgcaccgagtggaggctggagaggattaggaacactttcaaggggatcgagggatcccacatgtggccctttcagatgaggattctatgcttagggcttaccgtcctgattctgattctagggtgtaggttgtagcttcagaaaaaggattggcgacatttttccaatgcacaattgcatgttctaaggcaaatttaagtggggtttagcaaatttttaacccatgtactgtatatttgtttggttcagataagtttacactaaggttttgcgcttttggcattaacttggtttaactgccttttccagcggtgtagtattttttgcctctatatgttgtgagttatccattttgattaagtcctgatgatgttagtgtagccactttattaggatgtttttgcacaagatagcatgtgtctaacatagccattttatagcatgaatcgatgaatgtacattgcttgtcggttcatatgctgatttggcttccaatgttgttcttggctgcaaatagattaggtagcatatctcctgagatagtacttcttcatcaacttgcactatcgattgagtacatgccctttctatagtcagattgcaaagaaatggcttgactctcaggtgagttctcttttctttggtgtgtgtgtgttgaatgactatcagtatttaggcgtagaagttgatcctgctggtgtccatagcgcgtaaggacatacattctcactgctacatgtagatataaatattacagtagaatgaactgaaagttttttgttgaaattttaagaaccaatagttaatcttttggacataatcaaagtctaactaaagccaaaaagtatattcgctttaaatagtctgtttataaagggaatctatggatcccacgactatttccatttactcctatgtgccgggagaacaccatgcactaatctctgtttagtgcctacaatgaaatttttggtccattgttgaaccatgctaaatattatatcctaaaattatactatttattaccaaatgctgggtttgtttcatggaattaccaagtgcacgcagtacgcctctgagcaatcgattctcacgccactcctccacgatctccattaaagacacttcagacagatcgagagcttctccatataacacactagactgtgtttcatgtatcctcgtccttgataacacacatataaaatcctattaaaaatttataatagtgaaaagcttttggcaaatgcatgttttgattgatgttacgcagacaataattttttgactaagtactgcaacaattgagttgttgaagcattcatgtacatttttgttccatgaaacgaaactcattgtgatctttctctcaaagttgtaggaccatggctgaagacaagagtcatccatggttgaatgagcggatcatgtcattcctctcaaaacggtcggtcgttgtgcattcctgacaagacttggagatagctttcattcattcttaatttaccaacaaaaggctccttgagataaaaaagatactggaagtcattggaggcgaacagatggtaacatatcatgtacatataagattgttgtatcattagaagtacctaactaataattgtagcattagagccttacaaatcaattaaagtactactacattaatacattatggaggccattatcaccaatacagagcatgctaagccagagcacaaaggccttttgagagtccatgaagtgggaggtggctctacgatgggttgactccactcaattggatctgatcttactcgtattcaagagctactagagctgcggtagaatgtgtccatgcagagcgagcaagaggcctctgcagtgggtatggattcaagcaagactcacaacaagtgtgcatgaggtatatatgcaatctgatgtcctagcagtcaagaaatggtatagtctagggtcttggtgatctcaaatattatgttaaatgtatttgttagaataattagtgtgatcttaatttagttggtgtgctatacataatagtctagattagtagttctaaaagttagttgaagtatttctattcattattgaggattgtcactctttattgaggattatgtataacttctttattgaggattgtcactctttatgtatttctatctatagtttctttattgaggattgtcccttaagctaataagctaacatgtactttaaaacttataaatgttttatacattcaatttgtaatatttttgaatcaatttcttttgtaataaactctgatgatatatattgtaatcttgttataacttgtaaatgttgtaacttgtaactgaaagtcgcctagaggggggtgaatagggtgaatctgaaatttataaacttaagcacaactacaacccgg

SEQ ID NO: 7580 - DNA, 2670 bp, Zea Mays
atttgttctaggctcttctctatcctctccacacctttcttcttcgtgcacgcctaggagcaagctgctgccctctccctggccagccctctcccatggccgccccctccctcagcttcgtcttcagccgccgtcgaaccagggcgagcaccccacgcccgtcgccactcccatcccctccccctctctgctgatggtcacgcgccctagcatccgctcgcccctgcgcgcactcctcccccatggcgagctcgccctcaactccctaccatggtgctcgcccaggctcgccggcatccatggccgcagttccctagatgctgccagctctggctccctagacgccgccagctctggctcgccggtctccgggctcgttggagatggcatattacctccaagacctacaacctagtgctcctcgacgtcgacagtcacgaccgcttcctcaagtccgtttgctgcaagcacgacgaggtgctgctcatcatcaaggtctacttcaagcgcaccgagtggaggctggagaggattaggaacactttcaaggggatcgagggatcccacatgtggccctttcagatgaggattctatgcttagggcttaccgtcctgattctgattctagggtgtaggttgtagcttcagaaaaaggattggcgacatttttccaatgcacaattgcatgttctaaggcaaatttaagtggggtttagcaaatttttaacccatgtactgtatatttgtttggttcagataagtttacactaaggttttgcgcttttggcattaacttggtttaactgccttttccagcggtgtagtattttttgcctctatatgttgtgagttatccattttgattaagtcctgatgatgttagtgtagccactttattaggatgtttttgcacaagatagcatgtgtctaacatagccattttatagcatgaatcgatgaatgtacattgcttgtcggttcatatgctgatttggcttccaatgttgttcttggctgcaaatagattaggtagcatatctcctgagatagtacttcttcatcaacttgcactatcgattgagtacatgccctttctatagtcagattgcaaagaaatggcttgactctcaggtgagttctcttttctttggtgtgtgtgtgttgaatgactatcagtatttaggcgtagaagttgatcctgctggtgtccatagcgcgtaaggacatacattctcactgctacatgtagatataaatattacagtagaatgaactgaaagttttttgttgaaattttaagaaccaatagttaatcttttggacataatcaaagtctaactaaagccaaaaagtatattcgctttaaatagtctgtttataaagggaatctatggatcccacgactatttccatttactcctatgtgccgggagaacaccatgcactaatctctgtttagtgcctacaatgaaatttttggtccattgttgaaccatgctaaatattatatcctaaaattatactatttattaccaaatgctgggtttgtttcatggaattaccaagtgcacgcagtacgcctctgagcaatcgattctcacgccactcctccacgatctccattaaagacacttcagacagatcgagagcttctccatataacacactagactgtgtttcatgtatcctcgtccttgataacacacatataaaatcctattaaaaatttataatagtgaaaagcttttggcaaatgcatgttttgattgatgttacgcagacaataattttttgactaagtactgcaacaattgagttgttgaagcattcatgtacatttttgttccatgaaacgaaactcattgtgatctttctctcaaagttgtaggaccatggctgaagacaagagtcatccatggttgaatgagcggatcatgtcattcctctcaaaacggtcggtcgttgtgcattcctgacaagacttggagatagtccatgaagtgggaggtggctctacgatgggttgactccactcaattggatctgatcttactcgtattcaagagctactagagctgcggtagaatgtgtccatgcagagcgagcaagaggcctctgcagtgggtatggattcaagcaagactcacaacaagtgtgcatgaggtatatatgcaatctgatgtcctagcagtcaagaaatggtatagtctagggtcttggtgatctcaaatattatgttaaatgtatttgttagaataattagtgtgatcttaatttagttggtgtgctatacataatagtctagattagtagttctaaaagttagttgaagtatttctattcattattgaggattgtcactctttattgaggattatgtataacttctttattgaggattgtcactctttatgtatttctatctatagtttctttattgaggattgtcccttaagctaataagctaacatgtactttaaaacttataaatgttttatacattcaatttgtaatatttttgaatcaatttcttttgtaataaactctgatgatatatattgtaatcttgttataacttgtaaatgttgtaacttgtaactgaaagtcgcctagaggggggtgaatagggtgaatctgaaatttataaacttaagcacaactacaacccgg

SEQ ID NO: 7581 - DNA, 1580 bp, Zea Mays
tcgactacagtccacagccatcgcagaagtcggaggagtggacagcagagaggatgagccagctaaaggagaaaatagctgggctattcggagcctgcacgacgacagccgagcaactcaacctagtggacacgctccagcatctaagcatagaccaccatttcagcacccagatcctctccgtcctcactagcgcccacgccgcggaagaactcaacagcggcggcgcctgtctccacgacgtcgcccttcggttccgcctgctgcggcagcaagggttctgggtgtctccagaggtattcgaccggttcagagacgaaaacgggagctttgacgtcggcgtggcagacgacgacgcgagggggctgctgagcctatacaacgcggcttaccttctcacccatggagaggcagagctcgaggaggctgcattgttcgccaggcagcgtcttgagtccatgtccatgagaggtagccttgagtacccgctggcccagcaggtgagccgagcgctccacctgccactgccgcggacggtcagaagagtcgagactctgcattatgtctcggagtacggaggagacccgacgcatgagcatgagcatgacccctccgttctggagttcgcccggctggatttcgagctcttgcaacgtctccacgtgaaggagctcaaggctctttctaggtggtggaaagatctctacaacgaagctggagtgacctactcgcgggaccgcgtggtggagtgctacctgtggtcttacacggcgtactacgaggaagaacacgcgagggcgaggatgatcctcgctaagatgatcgcgctgataatcttgacggacgacacctacgacgtccgcgctactctggaggagtgtcgaaggttcgatgaagctatacagagatgggacgagagcgctgtttctctcctgccggactacctgaagaagttctacctcaagctgatgaacatctttgaggagtttgaggacgagctggaaccacatgagaagtgcagggtcgcttttagcagaaaagcgtttcaaacattatcgagtaattatctccaagaagcggaatggtttcatggccgttacaagccaagattcgaagatcaggtaaaggtatccactgtgtgctcaggcgctccattcgcagctgttgggttactagttggcatgggaggtgatgtagcaacccaggaggcacttgagtgggcaatgggttgcacggatgctgtcaaggctttcgcagaggtcacacgcttcatgaatgaccttgcttcgtataagcgtggaaagaacaaaaacgacgtggacagctcggtcgaatgctacatcagtgagcatggcgtcacagctgaggttgcctttgcacagataagctccctgattgaagatgcatggaaaactataaacggagcacgctttgagaacagcaaactacttccagcagtgcagcgagttgccgacataaccgccagcatgccgttgatgtacggtgacaacaaggacgcgttcacgttcagcgacggtctaaaggggctcatcgaacgcctgtttctcaacaggccataa

SEQ ID NO: 7582 - DNA, 583 bp, Zea Mays
cgaaatgatacgagcatcctcatagtgtgggaacatgaagtcgatggcaacacaacctatcaagtctgtgatggcagcggtgaagacccaaactgttgcaggagtgtgtttgcgctgttctggagcgcttctgaccatttgacctacatgggagttgagatagcggccgacgactggagcacctgcaggatcgtccttgggcgaggcgtcgagcagctcaaagggagtcttcccaacaacattgttacgtccggacgctccgtcgacgttgtcatcgcagacgatgatacacttcagattgattgacgcagttcagggtagtcgttggtagtcatgcatatagctagaagataagctgttggctgttggtgcatgcttcagagcaaatcaaagggctttcttcctttaatcctttttttttgcttcgtgtggttctttcagccatatgtactatgcagcttgtgaatgtaaagctgtacggaaggtgacatgtttctagcttcgtatatagttggagctcaatacagccaacctggtactcactccgttattttttatttatcacgttttatttcaaaaataa

SEQ ID NO: 7583 - DNA, 2439 bp, Zea Mays
gatcactcaattcctcgttgcggttcgcgggtcctggaagcaggaatcatcaagacgctccgcgcgccattacagtctgacagcgaccccacaggctcgtcctccgtaagtccgtcctcctgtcgctgtcccgctcatgaaccgggcaacaactacggagcgagcggacgaggagatgctgtttcgattttccacttcctcttcctctacctctacctcggggtaacttgtagaactcaatttcacccttgcgttccgtccctttcctatgttcctccagcggtccagcctagtagtttcttgctctgcaattcgccagttttgggctcctgatcgatcgaatcgtcgtcctggtggctcccatacagccggaccgcatggctgggcagcgctgggtcggtaaagtggcggctgctgctgttgtggcgctcttgctcctgtcgaccgctcttcccggaggagcacggagagaacccgatgtcaacaacaatggacggagttttgtttttaactatactctgaccaaagctgttgtggaatatgctgcagctgtaagttatttcaaagcccttcatttattttagcttaatgtgccatagtactagtttttttgtattttattttccccacatttttcttaagtgcttccaaataaaccctaagagtcagccagtttatgcatcttgttactttattttaatatcattcatttagtttcgatttttcactctatattttaatgttgtcaaaatagagattcccattttttccctggtacataggtatatatgacagatctgacggctctatacacatggacatgctcaagatgcaatgacttgactcgagtaagattatctaggagtatggcgtgtagtgaatagttcaatgtgacctgtttcagttgaagtacaacaaagatacgtttttcactgactttgccattgttacctatttcacaaaacagggctttgagatgacttgtataattgttgatgtccagaattgcttgcaggcattcgtcggtgttgatcacaatctcaatgctatcattgtttccatcagggggactcaagagaacagcatacagaattggattaaggacctgatatggaagcaggttaaacttaattatccaaacatgcccaatgctaagttttacgtccagccatcacgaatgctgttcgcaaggcaaggaagctacatggacacagtgacgtaattgtaacagggcattcgatgggtggagcactagcttctttttgtgcccttgatcttgcaatgagctttggaagtaacaatgttcatctgatgacttttgggcaaccacgcgttggcaatgctgcatttgcctcctactttgcccagtatgtgccatacacagtccgaatgacacatgaacgtgatattgtacctcatctgccgccttatttcttcttcctcccaaaactgacatacaagcacttccccagagaggtatgctcctgaacaaacataggaaacattgtccaaattttctctttgatgtgcttatcttctctgtggattgaaataaaaagttgaacccgatggctatttgcttggcggcatgtggatttgagtgcaccgattgcttccgaaatgatacgagcatcctcatagtatgtaaacgcaatgaaaacgtaactaatctttcagttcttgaacaaattgttgcaaactgtcattctctgtttctgagttgattaatttgtcacgctgttgagccccacttgaagaacctgcagcatgtgctatgttgtcttgaatcttacatgagctaaattctgaagtgttttcttactgacgaaaccatacacacctttgcaacgccatcctaaactcttcacatgtgttattaggtgtgggaacatgaagtcgatggcaacacaacctatcaagtctgtgatggcagcggtgaagacccaaactgttgcaggagtgtgtttgcgctgttctggagcgcttctgaccatttgacctacatgggagttgagatagcggccgacgactggagcacctgcaggatcgtccttgggcgaggcgtcgagcagctcaaagggagtcttcccaacaacattgttacgtccggacgctccgtcgacgttgtcatcgcagacgatgatacacttcagattgattgacgcagttcagggtagtcgttggtagtcatgcatatagctagaagataagctgttggctgttggtgcatgcttcagagcaaatcaaagggctttcttcctttaatcctttttttttgcttcgtgtggttctttcagccatatgtactatgcagcttgtgaatgtaaagctgtacggaaggtgacatgtttctagcttcgtatatagttggagctcaatacagccaacctggtactcactccgttattttttatttatcacgttttatttcaaaaataa

SEQ ID NO: 7584 - DNA, 2383 bp, Zea Mays
gatcactcaattcctcgttgcggttcgcgggtcctggaagcaggaatcatcaagacgctccgcgcgccattacagtctgacagcgaccccacaggctcgtcctccgtaagtccgtcctcctgtcgctgtcccgctcatgaaccgggcaacaactacggagcgagcggacgaggagatgctgtttcgattttccacttcctcttcctctacctctacctcggggtaacttgtagaactcaatttcacccttgcgttccgtccctttcctatgttcctccagcggtccagcctagtagtttcttgctctgcaattcgccagttttgggctcctgatcgatcgaatcgtcgtcctggtggctcccatacagccggaccgcatggctgggcagcgctgggtcggtaaagtggcggctgctgctgttgtggcgctcttgctcctgtcgaccgctcttcccggaggagcacggagagaacccgatgtcaacaacaatggacggagttttgtttttaactatactctgaccaaagctgttgtggaatatgctgcagctgtaagttatttcaaagcccttcatttattttagcttaatgtgccatagtactagtttttttgtattttattttccccacatttttcttaagtgcttccaaataaaccctaagagtcagccagtttatgcatcttgttactttattttaatatcattcatttagtttcgatttttcactctatattttaatgttgtcaaaatagagattcccattttttccctggtacataggtatatatgacagatctgacggctctatacacatggacatgctcaagatgcaatgacttgactcgagtaagattatctaggagtatggcgtgtagtgaatagttcaatgtgacctgtttcagttgaagtacaacaaagatacgtttttcactgactttgccattgttacctatttcacaaaacagggctttgagatgacttgtataattgttgatgtccagaattgcttgcaggcattcgtcggtgttgatcacaatctcaatgctatcattgtttccatcagggggactcaagagaacagcatacagaattggattaaggacctgatatggaagcaggttaaacttaattatccaaacatgcccaatgctaaggtttgtggtattaaccatctgatgcaattttacttctcttttcaacagtaaggcatgacttatctttcctccaccttttttttcttctgatgagatttctcctatggttaaaggtccacattgggttttactcttcttacaataatacagttttacgtccagccatcacgaatgctgttcgcaaggcaaggaagctacatggacacagtgacgtaattgtaacagggcattcgatgggtggagcactagcttctttttgtgcccttgatcttgcaatgagctttggaagtaacaatgttcatctgatgacttttgggcaaccacgcgttggcaatgctgcatttgcctcctactttgcccagtatgtgccatacacagtccgaatgacacatgaacgtgatattgtacctcatctgccgccttatttcttcttcctcccaaaactgacatacaagcacttccccagagaggtatgctcctgaacaaacataggaaacattgtccaaattttctctttgatgtgcttatcttctctgtggattgaaataaaaagttgaacccgatggctatttgcttggcggcatgtggatttgagtgcaccgattgcttccgaaatgatacgagcatcctcatagtgtgggaacatgaagtcgatggcaacacaacctatcaagtctgtgatggcagcggtgaagacccaaactgttgcaggtggggggcgggcgcctgtttcgattcggcactggagtgtgtttgcgctgttctggagcgcttctgaccatttgacctacatgggagttgagatagcggccgacgactggagcacctgcaggatcgtccttgggcgaggcgtcgagcagctcaaagggagtcttcccaacaacattgttacgtccggacgctccgtcgacgttgtcatcgcagacgatgatacacttcagattgattgacgcagttcagggtagtcgttggtagtcatgcatatagctagaagataagctgttggctgttggtgcatgcttcagagcaaatcaaagggctttcttcctttaatcctttttttttgcttcgtgtggttctttcagccatatgtactatgcagcttgtgaatgtaaagctgtacggaaggtgacatgtttctagcttcgtatatagttggagctcaatacagccaacctggtactcactccgttattttttatttatcacgttttatttcaaaaataa

SEQ ID NO: 7585 - DNA, 1642 bp, Zea Mays
gatcactcaattcctcgttgcggttcgcgggtcctggaagcaggaatcatcaagacgctccgcgcgccattacagtctgacagcgaccccacaggctcgtcctccgtaagtccgtcctcctgtcgctgtcccgctcatgaaccgggcaacaactacggagcgagcggacgaggagatgctgtttcgattttccacttcctcttcctctacctctacctcggggtaacttgtagaactcaatttcacccttgcgttccgtccctttcctatgttcctccagcggtccagcctagtagtttcttgctctgcaattcgccagttttgggctcctgatcgatcgaatcgtcgtcctggtggctcccatacagccggaccgcatggctgggcagcgctgggtcggtaaagtggcggctgctgctgttgtggcgctcttgctcctgtcgaccgctcttcccggaggagcacggagaggtatatatgacagatctgacggctctatacacatggacatgctcaagatgcaatgacttgactcgaggctttgagatgacttgtataattgttgatgtccagaattgcttgcaggcattcgtcggtgttgatcacaatctcaatgctatcattgtttccatcagggggactcaagagaacagcatacagaattggattaaggacctgatatggaagcaggttaaacttaattatccaaacatgcccaatgctaaggtccacattgggttttactcttcttacaataatacagttttacgtccagccatcacgaatgctgttcgcaaggcaaggaagctacatggacacagtgacgtaattgtaacagggcattcgatgggtggagcactagcttctttttgtgcccttgatcttgcaatgagctttggaagtaacaatgttcatctgatgacttttgggcaaccacgcgttggcaatgctgcatttgcctcctactttgcccagtatgtgccatacacagtccgaatgacacatgaacgtgatattgtacctcatctgccgccttatttcttcttcctcccaaaactgacatacaagcacttccccagagaggtgtgggaacatgaagtcgatggcaacacaacctatcaagtctgtgatggcagcggtgaagacccaaactgttgcaggagtgtgtttgcgctgttctggagcgcttctgaccatttgacctacatgggagttgagatagcggccgacgactggagcacctgcaggatcgtccttgggcgaggcgtcgagcagctcaaagggagtcttcccaacaacattgttacgtccggacgctccgtcgacgttgtcatcgcagacgatgatacacttcagattgattgacgcagttcagggtagtcgttggtagtcatgcatatagctagaagataagctgttggctgttggtgcatgcttcagagcaaatcaaagggctttcttcctttaatcctttttttttgcttcgtgtggttctttcagccatatgtactatgcagcttgtgaatgtaaagctgtacggaaggtgacatgtttctagcttcgtatatagttggagctcaatacagccaacctggtactcactccgttattttttatttatcacgttttatttcaaaaataa

SEQ ID NO: 7586 - DNA, 1527 bp, Zea Mays
gatcactcaattcctcgttgcggttcgcgggtcctggaagcaggaatcatcaagacgctccgcgcgccattacagtctgacagcgaccccacaggctcgtcctccgtaagtccgtcctcctgtcgctgtcccgctcatgaaccgggcaacaactacggagcgagcggacgaggagatgctgtttcgattttccacttcctcttcctctacctctacctcgggccggaccgcatggctgggcagcgctgggtcggtaaagtggcggctgctgctgttgtggcgctcttgctcctgtcgaccgctcttcccggaggagcacggagagaacccgatgtcaacaacaatggacggagttttgtttttaactatactctgaccaaagctgttgtggaatatgctgcagctgtatatatgacagatctgacggctctatacacatggacatgctcaagatgcaatgacttgactcgaggctttgagatgacttgtataattgttgatgtccagaattgcttgcaggcattcgtcggtgttgatcacaatctcaatgctatcattgtttccatcagggggactcaagagaacagcatacagaattggattaaggacctgatatggaagcaggttaaacttaattatccaaacatgcccaatgctaagccatcacgaatgctgttcgcaaggcaaggaagctacatggacacagtgacgtaattgtaacagggcattcgatgggtggagcactagcttctttttgtgcccttgatcttgcaatgagctttggaagtaacaatgttcatctgatgacttttgggcaaccacgcgttggcaatgctgcatttgcctcctactttgcccagtatgtgccatacacagtccgaatgacacatgaacgtgatattgtacctcatctgccgccttatttcttcttcctcccaaaactgacatacaagcacttccccagagaggtgtgggaacatgaagtcgatggcaacacaacctatcaagtctgtgatggcagcggtgaagacccaaactgttgcaggagtgtgtttgcgctgttctggagcgcttctgaccatttgacctacatgggagttgagatagcggccgacgactggagcacctgcaggatcgtccttgggcgaggcgtcgagcagctcaaagggagtcttcccaacaacattgttacgtccggacgctccgtcgacgttgtcatcgcagacgatgatacacttcagattgattgacgcagttcagggtagtcgttggtagtcatgcatatagctagaagataagctgttggctgttggtgcatgcttcagagcaaatcaaagggctttcttcctttaatcctttttttttgcttcgtgtggttctttcagccatatgtactatgcagcttgtgaatgtaaagctgtacggaaggtgacatgtttctagcttcgtatatagttggagctcaatacagccaacctggtactcactccgttattttttatttatcacgttttatttcaaaaataa

SEQ ID NO: 7587 - DNA, 2184 bp, Zea Mays
gatcactcaattcctcgttgcggttcgcgggtcctggaagcaggaatcatcaagacgctccgcgcgccattacagtctgacagcgaccccacaggctcgtcctccccggaccgcatggctgggcagcgctgggtcggtaaagtggcggctgctgctgttgtggcgctcttgctcctgtcgaccgctcttcccggaggagcacggagaggtacttcgatctcactcgtgccagattcctatggatgcgcagcggaatccatgcgctccggacgggctctgactagttattttgctcccagattgggggtttccatccccggattcccccatttgcctctctgctttcccagtcgtatcttgctaccgtgtgtttttaatgttaactaaagataagtaagaactgccttgtgtaaaccaactgctctaattatcacagaacccgatgtcaacaacaatggacggagttttgtttttaactatactctgaccaaagctgttgtggaatatgctgcagctgtaagttatttcaaagcccttcatttattttagcttaatgtgccatagtactagtttttttgtattttattttccccacatttttcttaagtgcttccaaataaaccctaagagtcagccagtttatgcatcttgttactttattttaatatcattcatttagtttcgatttttcactctatattttaatgttgtcaaaatagagattcccattttttccctggtacataggtatatatgacagatctgacggctctatacacatggacatgctcaagatgcaatgacttgactcgagtaagattatctaggagtatggcgtgtagtgaatagttcaatgtgacctgtttcagttgaagtacaacaaagatacgtttttcactgactttgccattgttacctatttcacaaaacagggctttgagatgacttgtataattgttgatgtccagaattgcttgcaggcattcgtcggtgttgatcacaatctcaatgctatcattgtttccatcagggggactcaagagaacagcatacagaattggattaaggacctgatatggaagcaggttaaacttaattatccaaacatgcccaatgctaaggtttgtggtattaaccatctgatgcaattttacttctcttttcaacagtaaggcatgacttatctttcctccaccttttttttcttctgatgagatttctcctatggttaaaggtccacattgggttttactcttcttacaataatacagttttacgtccagccatcacgaatgctgttcgcaaggcaaggaagctacatggacacagtgacgtaattgtaacagggcattcgatgggtggagcactagcttctttttgtgcccttgatcttgcaatgagctttggaagtaacaatgttcatctgatgacttttgggcaaccacgcgttggcaatgctgcatttgcctcctactttgcccagtatgtgccatacacagtccgaatgacacatgaacgtgatattgtacctcatctgccgccttatttcttcttcctcccaaaactgacatacaagcacttccccagagaggtgtgggaacatgaagtcgatggcaacacaacctatcaagtctgtgatggcagcggtgaagacccaaactgttgcaggtggggggcgggcgcctgtttcgattcggcactggagtgtgtttgcgctgttctggagcgcttctgaccatttgacctacatgggagttgagatagcggccgacgactggagcacctgcaggatcgtccttgggcgaggcgtcgagcagctcaaagggagtcttcccaacaacattgttacgtccggacgctccgtcgacgttgtcatcgcagacgatgatacacttcagattgattgacgcagttcagggtagtcgttggtagtcatgcatatagctagaagataagctgttggctgttggtgcatgcttcagagcaaatcaaagggctttcttcctttaatcctttttttttgcttcgtgtggttctttcagccatatgtactatgcagcttgtgaatgtaaagctgtacggaaggtgacatgtttctagcttcgtatatagttggagctcaatacagccaacctggtactcactccgttattttttatttatcacgttttatttcaaaaataa

SEQ ID NO: 7588 - DNA, 2182 bp, Zea Mays
gatcactcaattcctcgttgcggttcgcgggtcctggaagcaggaatcatcaagacgctccgcgcgccattacagtctgacagcgaccccacaggctcgtcctccgtaagtccgtcctcctgtcgctgtcccgctcatgaaccgggcaacaactacggagcgagcggacgaggagatgctgtttcgattttccacttcctcttcctctacctctacctcgggccggaccgcatggctgggcagcgctgggtcggtaaagtggcggctgctgctgttgtggcgctcttgctcctgtcgaccgctcttcccggaggagcacggagaggtacttcgatctcactcgtgccagattcctatggatgcgcagcggaatccatgcgctccggacgggctctgactagttattttgctcccagattgggggtttccatccccggattcccccatttgcctctctgctttcccagtcgtatcttgctaccgtgtgtttttaatgttaactaaagataagtaagaactgccttgtgtaaaccaactgctctaattatcacagaacccgatgtcaacaacaatggacggagttttgtttttaactatactctgaccaaagctgttgtggaatatgctgcagctgtaagttatttcaaagcccttcatttattttagcttaatgtgccatagtactagtttttttgtattttattttccccacatttttcttaagtgcttccaaataaaccctaagagtcagccagtttatgcatcttgttactttattttaatatcattcatttagtttcgatttttcactctatattttaatgttgtcaaaatagagattcccattttttccctggtacataggtatatatgacagatctgacggctctatacacatggacatgctcaagatgcaatgacttgactcgaggctttgagatgacttgtataattgttgatgtccagaattgcttgcaggcattcgtcggtgttgatcacaatctcaatgctatcattgtttccatcagggggactcaagagaacagcatacagaattggattaaggacctgatatggaagcaggttaaacttaattatccaaacatgcccaatgctaaggtttgtggtattaaccatctgatgcaattttacttctcttttcaacagtaaggcatgacttatctttcctccaccttttttttcttctgatgagatttctcctatggttaaaggtccacattgggttttactcttcttacaataatacagttttacgtccagccatcacgaatgctgttcgcaaggcaaggaagctacatggacacagtgacgtaattgtaacagggcattcgatgggtggagcactagcttctttttgtgcccttgatcttgcaatgagctttggaagtaacaatgttcatctgatgacttttgggcaaccacgcgttggcaatgctgcatttgcctcctactttgcccagtatgtgccatacacagtccgaatgacacatgaacgtgatattgtacctcatctgccgccttatttcttcttcctcccaaaactgacatacaagcacttccccagagaggtgtgggaacatgaagtcgatggcaacacaacctatcaagtctgtgatggcagcggtgaagacccaaactgttgcaggtggggggcgggcgcctgtttcgattcggcactggagtgtgtttgcgctgttctggagcgcttctgaccatttgacctacatgggagttgagatagcggccgacgactggagcacctgcaggatcgtccttgggcgaggcgtcgagcagctcaaagggagtcttcccaacaacattgttacgtccggacgctccgtcgacgttgtcatcgcagacgatgatacacttcagattgattgacgcagttcagggtagtcgttggtagtcatgcatatagctagaagataagctgttggctgttggtgcatgcttcagagcaaatcaaagggctttcttcctttaatcctttttttttgcttcgtgtggttctttcagccatatgtactatgcagcttgtgaatgtaaagctgtacggaaggtgacatgtttctagcttcgtatatagttggagctcaatacagccaacctggtactcactccgttattttttatttatcacgttttatttcaaaaataa

SEQ ID NO: 7589 - DNA, 1379 bp, Zea Mays
aatccacgacgcccatttccgattcttgccgttttcgggcaggcagccagtccctttaaagcaccactaggcaggcactaggccggtagtatataaaataatgtcctactcctaccccgccaccacgccgcggcagcacaagcccctctccgcccccagccagccctcctcagatctcaatcccggcgctccctccctccctcctcgcctcgggacagcgagcgccgccgtccgccgtccatggagcacgacgccgaggcgcgccgcgggttcgccaggatgggcttcgggtgcaagcactaccggaggcggtgccggatccgcgcgccctgctgcggcgacgtcttccactgccgccattgccacaacgagtccacgaaagacgggcacgagctggatcggcacgacgtccaatcggttatctgcctcgtctgtgacaccgagcagccgatcgcgcaggtgtgctgcaactgcggcgtctgcatgggggagtacttctgcgcagcctgcaacttcttggacgatgacgttgacaaggagcagttccattgcgacgattgcggcatctgcagagtaggaggaaaggagaacttcttccactgccaaaagtgtggatcctgctactcgacgacccttcgcgacaggcactgctgcatcgagaactcgatgaagaacaactgccccatctgctacgaggcagtacctgttcgattcgctgagggagacgtcggtgctccgctgcggccacaccatgcacctgcagtgcttccacgagatgttgaagcacgacaagttctcgtgccccatatgcgccacgcccatcttcgacatggacaagttcttcaaggccctcgacgcagagatggaggcaagctacttgtacacgggaaagggatgggtcgtgtgcaacgactgcagggacacgacgcaggtcttctccggcatggcgggccacaagtgctgccactgccagtcccacaacacctgccgggtggcaccccccgtcctcccgtagccaccaccaccaccacatcattgttgttggaattggatgcagccagccaagatacccccggccccagcagctacgctattattaccagtagcgcctgcgcttttacgcaccgctccgttccagtccatgatgaactgcataatttcgtgccatgcaggtatgtacgtacactgttattggagatcggaagatttatccgactcgggacgcattatttgtaccacaacaaaacacgtgttacactattgtaataccagatctggatacgaaactattttttaggatgcttgaacgagtggtatttccttggagtgtgtataacatttatttattagctcaaatctctctctctctctttgtgatg

SEQ ID NO: 7590 - DNA, 1715 bp, Zea Mays
aatccacgacgcccatttccgattcttgccgttttcgggcaggcagccagtccctttaaagcaccactaggcaggcactaggccggtagtatataaaataatgtcctactcctaccccgccaccacgccgcggcagcacaagcccctctccgcccccagccagccctcctcagatctcaatcccggcgctccctccctccctcctcgcctcgggacagcgagcgccgccgtccgccgtccatggagcacgacgccgaggcgcgccgcgggttcgccaggatgggcttcgggtgcaagcactaccggaggcggtgccggatccgcgcgccctgctgcggcgacgtcttccactgccgccattgccacaacgagtccacgaaagacgggcacgagctggatcggcacgacgtccaatcggttatctgcctcgtctgtgacaccgagcagccgatcgcgcaggtgtgctgcaactgcggcgtctgcatgggggagtacttctgcgcagcctgcaacttcttggacgatgacgttgacaaggagcagttccattgcgacgattgcggcatctgcaggtgcgtgcgtgcgtgtgtctgtccctctttttttgtttcttgttttcttttcttccttccattgcggtcactgagttacaggatctgagtcgccgcgcacaaatcgcgattttagtaggaacccccccctctgattaactaactaagctactactacctattgatgatgatccaacaaagctgacagaaactgtggtgcatttgcatttgttcgaacagagtaggaggaaaggagaacttcttccactgccaaaagtgtggtaaagaaataaacaaatccatcaccagccatattcaccacacccgaggatgttctggctccccatcaccagccatacatcatcctgttgttttttttttgtttgcacacgcaggatcctgctactcgacgacccttcgcgacaggcactgctgcatcgagaactcgatgaagaacaactgccccatctgctacgagaaggcagtacctgttcgattcgctgagggagacgtcggtgctccgctgcggccacaccatgcacctgcagtgcttccacgagatgttgaagcacgacaagttctcgtgccccatatgcgccacgcccatcttcgacatggacaagttcttcaaggccctcgacgcagagatggaggcaagctacttgtacacgggaaagggatgggtcgtgtgcaacgactgcagggacacgacgcaggtcttctccggcatggcgggccacaagtgctgccactgccagtcccacaacacctgccgggtggcaccccccgtcctcccgtagccaccaccaccaccacatcattgttgttggaattggatgcagccagccaagatacccccggccccagcagctacgctattattaccagtagcgcctgcgcttttacgcaccgctccgttccagtccatgatgaactgcataatttcgtgccatgcaggtatgtacgtacactgttattggagatcggaagatttatccgactcgggacgcattatttgtaccacaacaaaacacgtgttacactattgtaataccagatctggatacgaaactattttttaggatgcttgaacgagtggtatttccttggagtgtgtataacatttatttattagctcaaatctctctctctctctttgtgatg

SEQ ID NO: 7591 - DNA, 1598 bp, Zea Mays
aatccacgacgcccatttccgattcttgccgttttcgggcaggcagccagtccctttaaagcaccactaggcaggcactaggccggtagtatataaaataatgtcctactcctaccccgccaccacgccgcggcagcacaagcccctctccgcccccagccagccctcctcagatctcaatcccggcgctccctccctccctcctcgcctcgggacagcgagcgccgccgtccgccgtccatggagcacgacgccgaggcgcgccgcgggttcgccaggatgggcttcgggtgcaagcactaccggaggcggtgccggatccgcgcgccctgctgcggcgacgtcttccactgccgccattgccacaacgagtccacgaaagacgggcacgagctggatcggcacgacgtccaatcggttatctgcctcgtctgtgacaccgagcagccgatcgcgcaggtgtgctgcaactgcggcgtctgcatgggggagtacttctgcgcagcctgcaacttcttggacgatgacgttgacaaggagcagttccattgcgacgattgcggcatctgcaggtgcgtgcgtgcgtgtgtctgtccctctttttttgtttcttgttttcttttcttccttccattgcggtcactgagttacaggatctgagtcgccgcgcacaaatcgcgattttagtaggaacccccccctctgattaactaactaagctactactacctattgatgatgatccaacaaagctgacagaaactgtggtgcatttgcatttgttcgaacagagtaggaggaaaggagaacttcttccactgccaaaagtgtggatcctgctactcgacgacccttcgcgacaggcactgctgcatcgagaactcgatgaagaacaactgccccatctgctacgaggcagtacctgttcgattcgctgagggagacgtcggtgctccgctgcggccacaccatgcacctgcagtgcttccacgagatgttgaagcacgacaagttctcgtgccccatatgcgccacgcccatcttcgacatggacaagttcttcaaggccctcgacgcagagatggaggcaagctacttgtacacgggaaagggatgggtcgtgtgcaacgactgcagggacacgacgcaggtcttctccggcatggcgggccacaagtgctgccactgccagtcccacaacacctgccgggtggcaccccccgtcctcccgtagccaccaccaccaccacatcattgttgttggaattggatgcagccagccaagatacccccggccccagcagctacgctattattaccagtagcgcctgcgcttttacgcaccgctccgttccagtccatgatgaactgcataatttcgtgccatgcaggtatgtacgtacactgttattggagatcggaagatttatccgactcgggacgcattatttgtaccacaacaaaacacgtgttacactattgtaataccagatctggatacgaaactattttttaggatgcttgaacgagtggtatttccttggagtgtgtataacatttatttattagctcaaatctctctctctctctttgtgatg

SEQ ID NO: 7592 - DNA, 1774 bp, Zea Mays
aatccacgacgcccatttccgattcttgccgttttcgggcaggcagccagtccctttaaagcaccactaggcaggcactaggccggtagtatataaaataatgtcctactcctaccccgccaccacgccgcggcagcacaagcccctctccgcccccagccagccctcctcagatctcaatcccggcgctccctccctccctcctcgcctcgggacagcgagcgccgccgtccgccgtccatggagcacgacgccgaggcgcgccgcgggttcgccaggatgggcttcgggtgcaagcactaccggaggcggtgccggatccgcgcgccctgctgcggcgacgtcttccactgccgccattgccacaacgagtccacgaaagacgggcacgagctggatcggcacgacgtccaatcggttatctgcctcgtctgtgacaccgagcagccgatcgcgcaggtgtgctgcaactgcggcgtctgcatgggggagtacttctgcgcagcctgcaacttcttggacgatgacgttgacaaggagcagttccattgcgacgattgcggcatctgcaggtgcgtgcgtgcgtgtgtctgtccctctttttttgtttcttgttttcttttcttccttccattgcggtcactgagttacaggatctgagtcgccgcgcacaaatcgcgattttagtaggaacccccccctctgattaactaactaagctactactacctattgatgatgatccaacaaagctgacagaaactgtggtgcatttgcatttgttcgaacagagtaggaggaaaggagaacttcttccactgccaaaagtgtggatcctgctactcgacgacccttcgcgacaggcactgctgcatcgagaactcgatgaagaacaactgccccatctgctacgagtacctgttcgattcgctgagggagacgtcggtgctccgctgcggccacaccatgcacctgcagtgcttccacgagatgttgaagcacgacaagttctcgtgccccatatgcgccacgcccatcttcgacatggacaagttcttcaaggccctcgacgcagagatggaggcaagctacttgtacacgggaaagaacaaagtagccctctcgtcttctcgtataaatggcacagatccagagagaggagacttggaagcggccggcgccggccccggcccccagacgccaagacgctcggcaacaagatccgccgtgtcagtggctcagtgcccgtgctgatcgatgctcgtgtgtgtgtgtgtgctggtgcagggatgggtcgtgtgcaacgactgcagggacacgacgcaggtcttctccggcatggcgggccacaagtgctgccactgccagtcccacaacacctgccgggtggcaccccccgtcctcccgtagccaccaccaccaccacatcattgttgttggaattggatgcagccagccaagatacccccggccccagcagctacgctattattaccagtagcgcctgcgcttttacgcaccgctccgttccagtccatgatgaactgcataatttcgtgccatgcaggtatgtacgtacactgttattggagatcggaagatttatccgactcgggacgcattatttgtaccacaacaaaacacgtgttacactattgtaataccagatctggatacgaaactattttttaggatgcttgaacgagtggtatttccttggagtgtgtataacatttatttattagctcaaatctctctctctctctttgtgatg

SEQ ID NO: 7593 - DNA, 1373 bp, Zea Mays
aatccacgacgcccatttccgattcttgccgttttcgggcaggcagccagtccctttaaagcaccactaggcaggcactaggccggtagtatataaaataatgtcctactcctaccccgccaccacgccgcggcagcacaagcccctctccgcccccagccagccctcctcagatctcaatcccggcgctccctccctccctcctcgcctcgggacagcgagcgccgccgtccgccgtccatggagcacgacgccgaggcgcgccgcgggttcgccaggatgggcttcgggtgcaagcactaccggaggcggtgccggatccgcgcgccctgctgcggcgacgtcttccactgccgccattgccacaacgagtccacgaaagacgggcacgagctggatcggcacgacgtccaatcggttatctgcctcgtctgtgacaccgagcagccgatcgcgcaggtgtgctgcaactgcggcgtctgcatgggggagtacttctgcgcagcctgcaacttcttggacgatgacgttgacaaggagcagttccattgcgacgattgcggcatctgcagtaggaggaaaggagaacttcttccactgccaaaagtgtggatcctgctactcgacgacccttcgcgacaggcactgctgcatcgagaactcgatgaagaacaactgccccatctgctacgagtacctgttcgattcgctgagggagacgtcggtgctccgctgcggccacaccatgcacctgcagtgcttccacgagatgttgaagcacgacaagttctcgtgccccatatgcgccacgcccatcttcgacatggacaagttcttcaaggccctcgacgcagagatggaggcaagctacttgtacacgggaaagggatgggtcgtgtgcaacgactgcagggacacgacgcaggtcttctccggcatggcgggccacaagtgctgccactgccagtcccacaacacctgccgggtggcaccccccgtcctcccgtagccaccaccaccaccacatcattgttgttggaattggatgcagccagccaagatacccccggccccagcagctacgctattattaccagtagcgcctgcgcttttacgcaccgctccgttccagtccatgatgaactgcataatttcgtgccatgcaggtatgtacgtacactgttattggagatcggaagatttatccgactcgggacgcattatttgtaccacaacaaaacacgtgttacactattgtaataccagatctggatacgaaactattttttaggatgcttgaacgagtggtatttccttggagtgtgtataacatttatttattagctcaaatctctctctctctctttgtgatg

SEQ ID NO: 7594 - DNA, 1607 bp, Zea Mays
aatccacgacgcccatttccgattcttgccgttttcgggcaggcagccagtccctttaaagcaccactaggcaggcactaggccggtagtatataaaataatgtcctactcctaccccgccaccacgccgcggcagcacaagcccctctccgcccccagccagccctcctcagatctcaatcccggcgctccctccctccctcctcgcctcgggacagcgagcgccgccgtccgccgtccatggagcacgacgccgaggcgcgccgcgggttcgccaggatgggcttcgggtgcaagcactaccggaggcggtgccggatccgcgcgccctgctgcggcgacgtcttccactgccgccattgccacaacgagtccacgaaagacgggcacgagctggatcggcacgacgtccaatcggttatctgcctcgtctgtgacaccgagcagccgatcgcgcaggtgtgctgcaactgcggcgtctgcatgggggagtacttctgcgcagcctgcaacttcttggacgatgacgttgacaaggagcagttccattgcgacgattgcggcatctgcaggatcctgctactcgacgacccttcgcgacaggcactgctgcatcgagaactcgatgaagaacaactgccccatctgctacgagtacctgttcgattcgctgagggagacgtcggtgctccgctgcggccacaccatgcacctgcagtgcttccacgagatgttgaagcacgacaagttctcgtgccccatatgcgccacgcccatcttcgacatggacaagttcttcaaggccctcgacgcagagatggaggcaagctacttgtacacgggaaaggtcagtgcgccttactgccagcctgatgctgtcctgtatgacccaatgcaaccaaccttcccagttctggtctattcttcccttcttctgtagaacaaagtagccctctcgtcttctcgtataaatggcacagatccagagagaggagacttggaagcggccggcgccggccccggcccccagacgccaagacgctcggcaacaagatccgccgtgtcagtggctcagtgcccgtgctgatcgatgctcgtgtgtgtgtgtgtgctggtgcagggatgggtcgtgtgcaacgactgcagggacacgacgcaggtcttctccggcatggcgggccacaagtgctgccactgccagtcccacaacacctgccgggtggcaccccccgtcctcccgtagccaccaccaccaccacatcattgttgttggaattggatgcagccagccaagatacccccggccccagcagctacgctattattaccagtagcgcctgcgcttttacgcaccgctccgttccagtccatgatgaactgcataatttcgtgccatgcaggtatgtacgtacactgttattggagatcggaagatttatccgactcgggacgcattatttgtaccacaacaaaacacgtgttacactattgtaataccagatctggatacgaaactattttttaggatgcttgaacgagtggtatttccttggagtgtgtataacatttatttattagctcaaatctctctctctctctttgtgatg

SEQ ID NO: 7595 - DNA, 1334 bp, Zea Mays
aatccacgacgcccatttccgattcttgccgttttcgggcaggcagccagtccctttaaagcaccactaggcaggcactaggccggtagtatataaaataatgtcctactcctaccccgccaccacgccgcggcagcacaagcccctctccgcccccagccagccctcctcagatctcaatcccggcgctccctccctccctcctcgcctcgggacagcgagcgccgccgtccgccgtccatggagcacgacgccgaggcgcgccgcgggttcgccaggatgggcttcgggtgcaagcactaccggaggcggtgccggatccgcgcgccctgctgcggcgacgtcttccactgccgccattgccacaacgagtccacgaaagacgggcacgagctggatcggcacgacgtccaatcggttatctgcctcgtctgtgacaccgagcagccgatcgcgcaggtgtgctgcaactgcggcgtctgcatgggggagtacttctgcgcagcctgcaacttcttggacgatgacgttgacaaggagcagttccattgcgacgattgcggcatctgcaggatcctgctactcgacgacccttcgcgacaggcactgctgcatcgagaactcgatgaagaacaactgccccatctgctacgagtacctgttcgattcgctgagggagacgtcggtgctccgctgcggccacaccatgcacctgcagtgcttccacgagatgttgaagcacgacaagttctcgtgccccatatgcgccacgcccatcttcgacatggacaagttcttcaaggccctcgacgcagagatggaggcaagctacttgtacacgggaaagggatgggtcgtgtgcaacgactgcagggacacgacgcaggtcttctccggcatggcgggccacaagtgctgccactgccagtcccacaacacctgccgggtggcaccccccgtcctcccgtagccaccaccaccaccacatcattgttgttggaattggatgcagccagccaagatacccccggccccagcagctacgctattattaccagtagcgcctgcgcttttacgcaccgctccgttccagtccatgatgaactgcataatttcgtgccatgcaggtatgtacgtacactgttattggagatcggaagatttatccgactcgggacgcattatttgtaccacaacaaaacacgtgttacactattgtaataccagatctggatacgaaactattttttaggatgcttgaacgagtggtatttccttggagtgtgtataacatttatttattagctcaaatctctctctctctctttgtgatg

SEQ ID NO: 7596 - DNA, 1760 bp, Zea Mays
aatccacgacgcccatttccgattcttgccgttttcgggcaggcagccagtccctttaaagcaccactaggcaggcactaggccggtagtatataaaataatgtcctactcctaccccgccaccacgccgcggcagcacaagcccctctccgcccccagccagccctcctcagatctcaatcccggcgctccctccctccctcctcgcctcgggacagcgagcgccgccgtccgccgtccatggagcacgacgccgaggcgcgccgcgggttcgccaggatgggcttcgggtgcaagcactaccggaggcggtgccggatccgcgcgccctgctgcggcgacgtcttccactgccgccattgccacaacgagtccacgaaagacgggcacgagctggatcggcacgacgtccaatcggttatctgcctcgtctgtgacaccgagcagccgatcgcgcaggtgtgctgcaactgcggcgtctgcatgggggagtacttctgcgcagcctgcaacttcttggacgatgacgttgacaaggagcagttccattgcgacgattgcggcatctgcagtaggaggaaaggagaacttcttccactgccaaaagtgtggtaaagaaataaacaaatccatcaccagccatattcaccacacccgaggatgttctggctccccatcaccagccatacatcatcctgttgttttttttttgtttgcacacgcaggatcctgctactcgacgacccttcgcgacaggcactgctgcatcgagaactcgatgaagaacaactgccccatctgctacgagtacctgttcgattcgctgagggagacgtcggtgctccgctgcggccacaccatgcacctgcagtgcttccacgagatgttgaagcacgacaagttctcgtgccccatatgcgccacgcccatcttcgacatggacaagttcttcaaggccctcgacgcagagatggaggcaagctacttgtacacgggaaaggtcagtgcgccttactgccagcctgatgctgtcctgtatgacccaatgcaaccaaccttcccagttctggtctattcttcccttcttctgtagaacaaagtagccctctcgtcttctcgtataaatggcacagatccagagagaggagacttggaagcggccggcgccggccccggcccccagacgccaagacgctcggcaacaagatccgccgtgtcagtggctcagtgcccgtgctgatcgatgctcgtgtgtgtgtgtgtgctggtgcagggatgggtcgtgtgcaacgactgcagggacacgacgcaggtcttctccggcatggcgggccacaagtgctgccactgccagtcccacaacacctgccgggtggcaccccccgtcctcccgtagccaccaccaccaccacatcattgttgttggaattggatgcagccagccaagatacccccggccccagcagctacgctattattaccagtagcgcctgcgcttttacgcaccgctccgttccagtccatgatgaactgcataatttcgtgccatgcaggtatgtacgtacactgttattggagatcggaagatttatccgactcgggacgcattatttgtaccacaacaaaacacgtgttacactattgtaataccagatctggatacgaaactattttttaggatgcttgaacgagtggtatttccttggagtgtgtataacatttatttattagctcaaatctctctctctctctttgtgatg

SEQ ID NO: 7597 - DNA, 1648 bp, Zea Mays
aatccacgacgcccatttccgattcttgccgttttcgggcaggcagccagtccctttaaagcaccactaggcaggcactaggccggtagtatataaaataatgtcctactcctaccccgccaccacgccgcggcagcacaagcccctctccgcccccagccagccctcctcagatctcaatcccggcgctccctccctccctcctcgcctcgggacagcgagcgccgccgtccgccgtccatggagcacgacgccgaggcgcgccgcgggttcgccaggatgggcttcgggtgcaagcactaccggaggcggtgccggatccgcgcgccctgctgcggcgacgtcttccactgccgccattgccacaacgagtccacgaaagacgggcacgagctggatcggcacgacgtccaatcggttatctgcctcgtctgtgacaccgagcagccgatcgcgcaggtgtgctgcaactgcggcgtctgcatgggggagtacttctgcgcagcctgcaacttcttggacgatgacgttgacaaggagcagttccattgcgacgattgcggcatctgcagagtaggaggaaaggagaacttcttccactgccaaaagtgtggatcctgctactcgacgacccttcgcgacaggcactgctgcatcgagaactcgatgaagaacaactgccccatctgctacgagtacctgttcgattcgctgagggagacgtcggtgctccgctgcggccacaccatgcacctgcagtgcttccacgagatgttgaagcacgacaagttctcgtgccccatatgcgccacgcccatcttcgacatggacaagttcttcaaggccctcgacgcagagatggaggcaagctacttgtacacgggaaaggtcagtgcgccttactgccagcctgatgctgtcctgtatgacccaatgcaaccaaccttcccagttctggtctattcttcccttcttctgtagaacaaagtagccctctcgtcttctcgtataaatggcacagatccagagagaggagacttggaagcggccggcgccggccccggcccccagacgccaagacgctcggcaacaagatccgccgtgtcagtggctcagtgcccgtgctgatcgatgctcgtgtgtgtgtgtgtgctggtgcagggatgggtcgtgtgcaacgactgcagggacacgacgcaggtcttctccggcatggcgggccacaagtgctgccactgccagtcccacaacacctgccgggtggcaccccccgtcctcccgtagccaccaccaccaccacatcattgttgttggaattggatgcagccagccaagatacccccggccccagcagctacgctattattaccagtagcgcctgcgcttttacgcaccgctccgttccagtccatgatgaactgcataatttcgtgccatgcaggtatgtacgtacactgttattggagatcggaagatttatccgactcgggacgcattatttgtaccacaacaaaacacgtgttacactattgtaataccagatctggatacgaaactattttttaggatgcttgaacgagtggtatttccttggagtgtgtataacatttatttattagctcaaatctctctctctctctttgtgatg

SEQ ID NO: 7598 - DNA, 1661 bp, Zea Mays
gtactagtagggtcactcactgcgcccagaagagaagtgcaggggcccgggccagggcgaccgacccaatccacgacgcccatttccgattcttgccgttttcgggcaggcagccagtccctttaaagcaccactaggcaggcactaggccggtagtatataaaataatgtcctactcctaccccgccaccacgccgcggcagcacaagcccctctccgcccccagccagccctcctcagatctcaatcccggcgctccctccctccctcctcgcctcgggacagcgagcgccgccgtccgccgtccatggagcacgacgccgaggcgcgccgcgggttcgccaggatgggcttcgggtgcaagcactaccggaggcggtgccggatccgcgcgccctgctgcggcgacgtcttccactgccgccattgccacaacgagtccacgaaagacgggcacgagctggatcggcacgacgtccaatcggttatctgcctcgtctgtgacaccgagcagccgatcgcgcaggtgtgctgcaactgcggcgtctgcatgggggagtacttctgcgcagcctgcaacttcttggacgatgacgttgacaaggagcagttccattgcgacgattgcggcatctgcaggtgcgtgcgtgcgtgtgtctgtccctctttttttgtttcttgttttcttttcttccttccattgcggtcactgagttacaggatctgagtcgccgcgcacaaatcgcgattttagtaggaacccccccctctgattaactaactaagctactactacctattgatgatgatccaacaaagctgacagaaactgtggtgcatttgcatttgttcgaacagagtaggaggaaaggagaacttcttccactgccaaaagtgtggatcctgctactcgacgacccttcgcgacaggcactgctgcatcgagaactcgatgaagaacaactgccccatctgctacgagtacctgttcgattcgctgagggagacgtcggtgctccgctgcggccacaccatgcacctgcagtgcttccacgagatgttgaagcacgacaagttctcgtgccccatatgcgccacgcccatcttcgacatggacaagttcttcaaggccctcgacgcagagatggaggcaagctacttgtacacgggaaagggatgggtcgtgtgcaacgactgcagggacacgacgcaggtcttctccggcatggcgggccacaagtgctgccactgccagtcccacaacacctgccgggtggcaccccccgtcctcccgtagccaccaccaccaccacatcattgttgttggaattggatgcagccagccaagatacccccggccccagcagctacgctattattaccagtagcgcctgcgcttttacgcaccgctccgttccagtccatgatgaactgcataatttcgtgccatgcaggtatgtacgtacactgttattggagatcggaagatttatccgactcgggacgcattatttgtaccacaacaaaacacgtgttacactattgtaataccagatctggatacgaaactattttttaggatgcttgaacgagtggtatttccttggagtgtgtataacatttatttattagctcaaatctctctctctctctttgtgatg

SEQ ID NO: 7599 - DNA, 2967 bp, Zea Mays
actatacatcagagaacacaagttcatgaggtttaaatgaaacactgttgatatagaatatgagagctgatgactctttgcctgtcgataggataaatgaccaaagcaactatgcaccggcgaggggacatcttgatggcgccaagatcccctcattggaggcttgactacctttgaggatgtttttccatctgaagcaactactgttgaggagtacttgcagcagcttcatgaaatggccattgtttcatccatccaagaagctcagaaggacaatttgaagagttttaacaactatatgatgcaagttcttgaggatgactggcagaaagagaagagagacttcttgcagagtctaagccggctttctacattacccaagagaaacactaatctctcgaccagtgggttgggtcgccctgcttcaatgccaccatcaacttccagtcttcatgctccatcaggcctgccttctgctgaagtcatgcctataccgaacaagactattattgaaaaaaaatcttcagtttatgctggggttgtgagggacctcaatgattctagagggcgcagtctaccttttaatcctgctacggcttttagggctgcttatgaatccttgtctattgatgccattggcacaaagtcagtgagtatgcagaaagtgtggcatctaattcaggcattggttggggaagggttgactcatcgaaatgtttcaagaaaaatgtcactagtggtaggtgcaaggcaccatcttgagtggggtcatgaaaagtacatacttgagaccatcaacagccatccagctcttgctgcccttggtggatctgttggcaatcttcagaagatccgagcatttcttcgggtaaggctgcgggatcaaggtgtgctagactttgacgcaaccgatctacgcagacagcctccagtggatacaacctggcagcagatttacttctgcttgagaaccggatactatgatgaagcaagacaagttgcccaatcatctcgtactgcatataacttcgctcccctgcttgcagattggatttctactaatggtgctgtatcaccagagactgctctggcagcttctgaggaatgtgataaaatgctcagaatgggtgatcggccagggcgtcctggctacgacaggaagaagttactgctttatgccataatttgtggttgtcggcggcaaattgaaagaatgctaaaagacctaccaacactttttaacactatagaggatttcttgtggtttaagctgtcagctctgcgggaatacaccaatgcatcttcttctaatcttatgaatgaaggcttggtgccttatacgctggatgacctgcaaagttacttgaataaatttgagccatcatattatacaaagaatggaaaagatcccctagtctatccctacattctgttcttaagcatccaattactcccagcaattctttatttgtctaaagaagttggagaggatggataccatgttgatgctgtgcatatttcaattgctttagctgaccatagtgttctccctgacggtattgggtcaggccagaaaattggcgtcatggatgcctgtgcagaggctgcaagcataatacgacagtatggctctatatacttgcgtaatggtaacattgatctagccttggagtattatgcacaagctgctgctgccatgggtggaggtgaggcatcgtggattggtgaagggcatgctgataagcagcgacaacgaagtttgatgttgaagcaactactgatggagatattgctaagggatggtggtattcaacttttgcttggtccaagtggaatgggagaagaaggagagctgaaaaagtatatgatggattggagaagtaggcagcaattcttacttgaagctgcccatcggtgtcaagaggctgggctctatgacaaagctgtggaaattcacaaaagagtaggagcctttgccatggctcttcagacaataaacaagtgcttgtctgatgcagtctgtgccatggcacggagtatgttagatggcgagagtcgtgctgctgccctaattcattctggcaatgaaattttggagacagctagatactcttctgaagccagcattcaagagaaggacctcatttctgagcaacaaactgtgctgagacagcttgaagctattctccatatttataggctagctcgagctgggcaaactgtagatgctttgagggaaaccatcaggctacccttccttcatttggaccccaaggctccaaatgtgactgttgacattttcaggaacttgtcaccccatgttcaagcttgcgtgccagatctcctgaaggttgctctaaattgcattgacaatgttagagatactgatgggaccttgcgcgctgtcaaatcaaagatcgcaaaccttgtagcaagcaacatgagccggaattggccacaggatttgtatcagaaggtggcacagtgcatatgaagtggcttgtgttttgagttgatcaggaatctggactaatctgtatcagaactctgaagctttcaaacaatatgaatccttaggccttattcggttgccgatcaatcaaggggggttgaaggggcttgaggcggaatctctagcaagtcaaaatctttcctaatcccctctaacctcatagaatggggaataaccgaatgaagccttaagatcttaaggggcatattggtccagtgcacatgcgtcgacaaggacctttgccagctgttggcaacttggcatctccgcctgattgcaggagtgcacggagccagataaacatttgtagcctgtatgtaagttactgttggaaatgtctttgaagacttgtattgtacgagagcatcactgtttgttacggaacatcagcattacttgaggaatcgcgaactccgtatgtttattcgaatggtaaagtctcgtggtacagttta

SEQ ID NO: 7600 - DNA, 3290 bp, Zea Mays
atggctacaggcgatgcgcgtgattcaagccccagcccagcaaccatttcagcagaacgctccaccgcttctccgaaaaggcaaaaaccccacagctcgagcgccgcgccggaagcctgcgcccccgaaaccacgagcgtaaaccctcctagtccggcggtgatggccggcgtcggtggcagcggcggtggaggtggggacgacgcggagatgggcggttggacggggcttctccactcctccacgaagctcctcgagcaggcggcgccaaccccgcacttccctccccttcagaggaatctggaccagctcgaggcgctctccaccaagctcaaggccaagaccatccgctctgaggctccgtcacagtcgctctccgccaccagattgttagcacgcgaggggatcaatgctgagcagctcgccagggacctcaagtcattcgaactcaagactacctttgaggatgtttttccatctgaagcaactactgttgaggagtacttgcagcagcttcatgaaatggccattgtttcatccatccaagaagctcagaaggacaatttgaagagttttaacaactatatgatgcaagttcttgaggatgactggcagaaagagaagagagacttcttgcagagtctaagccggctttctacattacccaagagaaacactaatctctcgaccagtgggttgggtcgccctgcttcaatgccaccatcaacttccagtcttcatgctccatcaggcctgccttctgctgaagtcatgcctataccgaacaagactattattgaaaaaaaatcttcagtttatgctggggttgtgagggacctcaatgattctagagggcgcagtctaccttttaatcctgctacggcttttagggctgcttatgaatccttgtctattgatgccattggcacaaagtcagtgagtatgcagaaagtgtggcatctaattcaggcattggttggggaagggttgactcatcgaaatgtttcaagaaaaatgtcactagtggtaggtgcaaggcaccatcttgagtggggtcatgaaaagtacatacttgagaccatcaacagccatccagctcttgctgcccttggtggatctgttggcaatcttcagaagatccgagcatttcttcgggtaaggctgcgggatcaaggtgtgctagactttgacgcaaccgatctacgcagacagcctccagtggatacaacctggcagcagatttacttctgcttgagaaccggatactatgatgaagcaagacaagttgcccaatcatctcgtactgcatataacttcgctcccctgcttgcagattggatttctactaatggtgctgtatcaccagagactgctctggcagcttctgaggaatgtgataaaatgctcagaatgggtgatcggccagggcgtcctggctacgacaggaagaagttactgctttatgccataatttgtggttgtcggcggcaaattgaaagaatgctaaaagacctaccaacactttttaacactatagaggatttcttgtggtttaagctgtcagctctgcgggaatacaccaatgcatcttcttctaatcttatgaatgaaggcttggtgccttatacgctggatgacctgcaaagttacttgaataaatttgagccatcatattatacaaagaatggaaaagatcccctagtctatccctacattctgttcttaagcatccaattactcccagcaattctttatttgtctaaagaagttggagaggatggataccatgttgatgctgtgcatatttcaattgctttagctgaccatagtgttctccctgacggtattgggtcaggccagaaaattggcgtcatggatgcctgtgcagaggctgcaagcataatacgacagtatggctctatatacttgcgtaatggtaacattgatctagccttggagtattatgcacaagctgctgctgccatgggtggaggtgaggcatcgtggattggtgaagggcatgctgataagcagcgacaacgaagtttgatgttgaagcaactactgatggagatattgctaagggatggtggtattcaacttttgcttggtccaagtggaatgggagaagaaggagagctgaaaaagtatatgatggattggagaagtaggcagcaattcttacttgaagctgcccatcggtgtcaagaggctgggctctatgacaaagctgtggaaattcacaaaagagtaggagcctttgccatggctcttcagacaataaacaagtgcttgtctgatgcagtctgtgccatggcacggagtatgttagatggcgagagtcgtgctgctgccctaattcattctggcaatgaaattttggagacagctagatactcttctgaagccagcattcaagagaaggacctcatttctgagcaacaaactgtgctgagacagcttgaagctattctccatatttataggctagctcgagctgggcaaactgtagatgctttgagggaaaccatcaggctacccttccttcatttggaccccaaggctccaaatgtgactgttgacattttcaggaacttgtcaccccatgttcaagcttgcgtgccagatctcctgaaggttgctctaaattgcattgacaatgttagagatactgatgggaccttgcgcgctgtcaaatcaaagatcgcaaaccttgtagcaagcaacatgagccggaattggccacaggatttgtatcagaaggtggcacagtgcatatgaagtggcttgtgttttgagttgatcaggaatctggactaatctgtatcagaactctgaagctttcaaacaatatggttgtcatcccatcctgtgtttaatgtgtgtcaaataatccttaggccttattcggttgccgatcaatcaaggggggttgaaggggcttgaggcggaatctctagcaagtcaaaatctttcctaatcccctctaacctcatagaatggggaataaccgaatgaagccttaagatcttaaggggcatattggtccagtgcacatgcgtcgacaaggacctttgccagctgttggcaacttggcatctccgcctgattgcaggagtgcacggagccagataaacatttgtagcctgtatgtaagttactgttggaaatgtctttgaagacttgtattgtacgagagcatcactgtttgttacggaacatcagcattacttgaggaatcgcgaactccgtatgtttattcgaatggtaaagtctcgtggtacagttta

SEQ ID NO: 7601 - DNA, 3375 bp, Zea Mays
atggctacaggcgatgcgcgtgattcaagccccagcccagcaaccatttcagcagaacgctccaccgcttctccgaaaaggcaaaaaccccacagctcgagcgccgcgccggaagcctgcgcccccgaaaccacgagcgtaaaccctcctagtccggcggtgatggccggcgtcggtggcagcggcggtggaggtggggacgacgcggagatgggcggttggacggggcttctccactcctccacgaagctcctcgagcaggcggcgccaaccccgcacttccctccccttcagaggaatctggaccagctcgaggcgctctccaccaagctcaaggccaagaccatccgctctgaggctccgtcacagtcgctctccgccaccagattgttagcacgcgaggggatcaatgctgagcagctcgccagggacctcaagtcattcgaactcaagactacctttgaggatgtttttccatctgaagcaactactgttgaggagtacttgcagcagcttcatgaaatggccattgtttcatccatccaagaagctcagaaggacaatttgaagagttttaacaactatatgatgcaagttcttgaggatgactggcagaaagagaagagagacttcttgcagagtctaagccggctttctacattacccaagagaaacactaatctctcgaccagtgggttgggtcgccctgcttcaatgccaccatcaacttccagtcttcatgctccatcaggcctgccttctgctgaagtcatgcctataccgaacaagactattattgaaaaaaaatcttcagtttatgctggggttgtgagggacctcaatgattctagagggcgcagtctaccttttaatcctgctacggcttttagggctgcttatgaatccttgtctattgatgccattggcacaaagtcagtgagtatgcagaaagtgtggcatctaattcaggcattggttggggaagggttgactcatcgaaatgtttcaagaaaaatgtcactagtggtaggtgcaaggcaccatcttgagtggggtcatgaaaagtacatacttgagaccatcaacagccatccagctcttgctgcccttggtggatctgttggcaatcttcagaagatccgagcatttcttcgggtaaggctgcgggatcaaggtgtgctagactttgacgcaaccgatctacgcagacagcctccagtggatacaacctggcagcagatttacttctgcttgagaaccggatactatgatgaagcaagacaagttgcccaatcatctcgtactgcatataacttcgctcccctgcttgcagattggatttctactaatggtgctgtatcaccagagactgctctggcagcttctgaggaatgtgataaaatgctcagaatgggtgatcggccagggcgtcctggctacgacaggaagaagttactgctttatgccataatttgtggttgtcggcggcaaattgaaagaatgctaaaagacctaccaacactttttaacactatagaggatttcttgtggtttaagctgtcagctctgcgggaatacaccaatgcatcttcttctaatcttatgaatgaaggcttggtgccttatacgctggatgacctgcaaagttacttgaataaatttgagccatcatattatacaaagaatggaaaagatcccctagtctatccctacattctgttcttaagcatccaattactcccagcaattctttatttgtctaaagaagttggagaggatggataccatgttgatgctgtgcatatttcaattgctttagctgaccatagtgttctccctgacggtattgggtcaggccagaaaattggcgtcatggatgcctgtgcagaggctgcaagcataatacgacagtatggctctatatacttgcgtaatggtaacattgatctagccttggagtattatgcacaagctgctgctgccatgggtggaggtgaggcatcgtggattggtgaagggcatgctgataagcagcgacaacgaagtttgatgttgaagcaactactgatggagatattgctaagggatggtggtattcaacttttgcttggtccaagtggaatgggagaagaaggagagctgaaaaagtatatgatggattggagaagtaggcagcaattcttacttgaagctgcccatcggtgtcaagaggctgggctctatgacaagctgtggaaattcacaaaagagtaggagcctttgccatggctcttcagacaataaacaagtgcttgtctgatgcagtctgtgccatggcacggagtatgttagatggcgagagtcgtgctgctgccctaattcattctggcaatgaaattttggagacagctagatactcttctgaagccagcattcaagagaaggacctcatttctgagcaacaaactgtgctgagacagcttgaagctattctccatatttataggctagctcgagctgggcaaactgtagatgctttgagggaaaccatcaggctacccttccttcatttggaccccaaggctccaaatgtgactgttgacattttcaggaacttgtcaccccatgttcaagcttgcgtgccagatctcctgaaggttgctctaaattgcattgacaatgttagagatactgatgggaccttgcgcgctgtcaaatcaaagatcgcaaaccttgtagcaagcaacatgagccggaattggccacaggatttgtatcagaaggtggcacagtgcatatgaagtggcttgtgttttgagttgatcaggaatctggactaatctgtatcagaactctgaagctttcaaacaatatggttgtcatcccatcctgtgtttaatgtgtgtcaaatgtaagatgtttattttttaaaaaagaaatttccactgatatttttctgtctttgtcgtgggaaaaacggctcacccgttgttacagaatccttaggccttattcggttgccgatcaatcaaggggggttgaaggggcttgaggcggaatctctagcaagtcaaaatctttcctaatcccctctaacctcatagaatggggaataaccgaatgaagccttaagatcttaaggggcatattggtccagtgcacatgcgtcgacaaggacctttgccagctgttggcaacttggcatctccgcctgattgcaggagtgcacggagccagataaacatttgtagcctgtatgtaagttactgttggaaatgtctttgaagacttgtattgtacgagagcatcactgtttgttacggaacatcagcattacttgaggaatcgcgaactccgtatgtttattcgaatggtaaagtctcgtggtacagttta

SEQ ID NO: 7602 - DNA, 2249 bp, Zea Mays
gtcaaacctttctccggagtccggagcacgggcacacaaggcagagccgcagaggcacgtccagctctcctcctcggtcccggtcccctccccggtccacactccatcgcgcccgctgcactccactccctctccccactccccaaccccagctccagagccaccgccggtgaccagcaacaccctcatgggctgcgtccacggccgcccctccacgcccagccccgaccacccgccgcagccgcccgagccgccagcccccgcggcggcgcaggaggccaccgggaaggccgagcagccggcggcgccagccgagaagccggccccacgggagaggcgctccctctcgccgcgcagcggccccggccccagcttcgccaacagggcgcgcggggagcaggtcgccgccggctggcccgcctggctctccgccgtcgccggcgaggccatcgacggatggaccccgcgtcgtgccgactccttcgagaagattgacaagatcggccagggcacatacagcaacgtgtacaaggcgcgcgacacggtgagcggcaagatcgtggcgctcaagaaggtgcgcttcgacaacctcgagcccgagagcgtccgcttcatggcccgcgagatcctcatcctccgacgcctcgaccaccccaacgtcgtcaagctcgacggcctcgtcacctcccgcatgtcctgcagcctctacctcgtcttcgagtacatggagcacgacctcgcgggcctcgccgccagcccggaaatcaagttcaccgagccacaggtcaagtgctatatgaatcagttgttgtcgggtctggagcactgccacgaccggggggtgctgcatcgcgacatcaagggctcgaatctgctcctggacaacaatggcatgctcaagattgcagattttggtctcgcgtcattcttcgacccggaccgtaaacagccgatgacgagccgggtggtgaccctatggtaccggccacccgagctacttctcggcgcaacggactatggggtaggtgtggacctgtggagcgcagggtgtatcctggccgagttgctcgctgggaggccaattatgccggggcaaacagaggtggagcagatgcataaaatttttaagttatgtggctccccgacagaagaatattggaaaaagtccaagctacctggtgctacaatatttaagactcagctgccatacaaaaggcgaataagagagacatttgaggattttccacaatcagcgctgcagttgatcgagatactacttgcaattaatccagcagatcggttaacagcgacttctgcattaagaagcgatttctttacaactgaaccttttgcatgtgaaccatcgagtcttccaaaatatcctccaagcaaagaaatagatgtgaaaagaagagacgaagaagccagacgtttaagggctactggtggtagagctaacggtgatggagccaagaagacgagagcacgtgatcgacctaaggcagttccagctccagaggcaaatgctgaacttcaaaaacgaaggttcgtcactcatgcagctaagagcaagagcgaaaagttccctcccccacatcaagatggtgcggttggtgtccctttggacacttcaaatcatatggacccactatatgagcctccagacccgtcttccttcagcactgtgttcacgcacgagaaaggcgctgtgcctacttggtccggaccattggttgatcctgctgcagtggtgaaccaaaagcggaagcacaagtttgggcgctcatcgaaacaaccggccactgcccgtgctcggtaagatcctaaggatcaatatttacaggtaaaaaaaaggagacttcaacatgggggaaatgctccatgcagctgttttgcaaacgaaaaatgcaatgataatgtattttgttggttacctgttgtcatgtgagtgattttttttctagacatcatgtataggctggggagggagttgaagtagttagttctgtatattaggttttctttcctgctctttaagcagctgcgtttgatgttagatttatttgaatggaagcttagatctctagcgtttcactacacccctttccattgtaacagtctgttgcctgcataatcagttatcaattcaacgcaaattttcaatcggatgttttggtgaaaagttggtggattcatgaaccatgacatgtatcacattgtaagctggagtaatattcctaaaatttctg

SEQ ID NO: 7603 - DNA, 3549 bp, Zea Mays
gtcaaacctttctccggagtccggagcacgggcacacaaggcagagccgcagaggcacgtccagctctcctcctcggtcccggtcccctccccggtccacactccatcgcgcccgctgcactccactccctctccccactccccaaccccagctccagagccaccgccggtgaccagcaacaccctcatgggctgcgtccacggccgcccctccacgcccagccccgaccacccgccgcagccgcccgagccgccagcccccgcggcggcgcaggaggccaccgggaaggccgagcagccggcggcgccagccgagaagccggccccacgggagaggcgctccctctcgccgcgcagcggccccggccccagcttcgccaacagggcgcgcggggagcaggtcgccgccggctggcccgcctggctctccgccgtcgccggcgaggccatcgacggatggaccccgcgtcgtgccgactccttcgagaagattgacaagatcggccagggcacatacagcaacgtgtacaaggcgcgcgacacggtgagcggcaagatcgtggcgctcaagaaggtgcgcttcgacaacctcgagcccgagagcgtccgcttcatggcccgcgagatcctcatcctccgacgcctcgaccaccccaacgtcgtcaagctcgacggcctcgtcacctcccgcatgtcctgcagcctctacctcgtcttcgagtacatggagcacgacctcgcgggcctcgccgccagcccggaaatcaagttcaccgagccacaggtcaagtgctatatgaatcagttgttgtcgggtctggagcactgccacgaccggggggtgctgcatcgcgacatcaagggctcgaatctgctcctggacaacaatggcatgctcaagattgcagattttggtctcgcgtcattcttcgacccggaccgtaaacagccgatgacgagccgggtggtgaccctatggtaccggccacccgagctacttctcggcgcaacggactatggggtaggtgtggacctgtggagcgcagggtgtatcctggccgagttgctcgctgggaggccaattatgccggggcaaacagaggtggagcagatgcataaaatttttaagttatgtggctccccgacagaagaatattggaaaaagtccaagctacctggtgctacaatatttaagactcagctgccatacaaaaggcgaataagagagacatttgaggattttccacaatcagcgctgcagttgatcgagatactacttgcaattaatccagcagatcggttaacagcgacttctgcattaagaagcgatttctttacaactgaaccttttgcatgtgaaccatcgagtcttccaaaatatcctccaagcaaagaaatagatgtgaaaagaagagacgaagaagccagacggtttgtcaccttgccacttatttcattacttaggatgatccagtgtcataaacttatctactttgagtttgcagtaacaaacttgttgatctataaatgcatgctatgagcgtagccactgttgcctataattgtgtttagtggggtaacactgctatccttacacacacaaaagaaaaaaaaacacaaatgagcgaggtcaattagattttatgaacatttcctattctatcttctgtttttttgtggcctgaaaccacaatcgttccatctagatttgcctcagtaacatggaaaatatgcaaattttacagtattgatattttaaattgttggtataagatatttctgtcaaataattccttagtatgataatgtagggttccatgcttagtgagtgagtgcttactggcagcaagaaaaagacgtgagtgcacatcattagaaggttttgtgaacactagctttggctagtatctggaaagaacaaacatgttattaacctattagatattgggtctttggatgtacatctggaagagttccaggtactcactactcaccacgagtcattaacattgatacagaagttggacaacagcactgtcatgatttagtaaatgtaaaatggcattttgtcctcctttgagctcctgttaaacacgagtgctaaatagtgagctacttaaattgacccagaacttttgtggtattttaatgttaatacctatgccctttgtaagttgaaaaaagggggaaaatgagagaatgacgaaagagcctcatgacgtgctggttttacgcttccattatactatacaaaagcaaaaaacatttcttctctcaaaaaaccattttagttagccactggtcaaacttcgtgtgctaaaatctccaggatttctgtaatttgttgagtatgctttgtagacctcatagttgagtcaaaggacaagtactgtctcatttttctgattgatttttttcactgattgcatgtcctcatatctgcaactagtcagatatcctagtggtctcatgccagttcaattgattgcttcttatgcactatcagtagtgggcccagcgtttgatcatagcttgggcaaaacacattgagccaattaaatcatgtactttagcacctgatgcaaatcatgccatacaaacataactacataaggatccagtggcatcacagccgagcaggtgcccagggtcgtcggctcctgtgtccgccactgcacactatcatgatgctacctgacttgtctaccatgttcaacagtttaagggctactggtggtagagctaacggtgatggagccaagaagacgagagcacgtgatcgacctaaggcagttccagctccagaggcaaatgctgaacttcaagtaaatatcgataaacgaaggttcgtcactcatgcagctaagagcaagagcgaaaagttccctcccccacatcaagatggtgcggttggtgtccctttggacacttcaaatcatatggacccactatatgagcctccagacccgtcttccttcagcactgtgttcacgcacgagaaaggcgctgtgcctacttggtccggaccattggttgatcctgctgcagtggtgaaccaaaagcggaagcacaagtttgggcgctcatcgaaacaaccggccactgcccgtgctcggtaagatcctaaggatcaatatttacaggtaaaaaaaaggagacttcaacatgggggaaatgctccatgcagctgttttgcaaacgaaaaatgcaatgataatgtattttgttggttacctgttgtcatgtgagtgattttttttctagacatcatgtataggctggggagggagttgaagtagttagttctgtatattaggttttctttcctgctctttaagcagctgcgtttgatgttagatttatttgaatggaagcttagatctctagcgtttcactacacccctttccattgtaacagtctgttgcctgcataatcagttatcaattcaacgcaaattttcaatcggatgttttggtgaaaagttggtggattcatgaaccatgacatgtatcacattgtaagctggagtaatattcctaaaatttctg

SEQ ID NO: 7604 - DNA, 2215 bp, Zea Mays
gtcaaacctttctccggagtccggagcacgggcacacaaggcagagccgcagaggcacgtccagctctcctcctcggtcccggtcccctccccggtccacactccatcgcgcccgctgcactccactccctctccccactccccaaccccagctccagagccaccgccggtgaccagcaacaccctcatgggctgcgtccacggccgcccctccacgcccagccccgaccacccgccgcagccgcccgagccgccagcccccgcggcggcgcaggaggccaccgggaaggccgagcagccggcggcgccagccgagaagccggccccacgggagaggcgctccctctcgccgcgcagcggccccggccccagcttcgccaacagggcgcgcggggagcaggtcgccgccggctggcccgcctggctctccgccgtcgccggcgaggccatcgacggatggaccccgcgtcgtgccgactccttcgagaagattgacaagatcggccagggcacatacagcaacgtgtacaaggcgcgcgacacggtgagcggcaagatcgtggcgctcaagaaggtgcgcttcgacaacctcgagcccgagagcgtccgcttcatggcccgcgagatcctcatcctccgacgcctcgaccaccccaacgtcgtcaagctcgacggcctcgtcacctcccgcatgtcctgcagcctctacctcgtcttcgagtacatggagcacgacctcgcgggcctcgccgccagcccggaaatcaagttcaccgagccacaggtcaagtgctatatgaatcagttgttgtcgggtctggagcactgccacgaccggggggtgctgcatcgcgacatcaagggctcgaatctgctcctggacaacaatggcatgctcaagattgcagattttggtctcgcgtcattcttcgacccggaccgtaaacagccgatgacgagccgggtggtgaccctatggtaccggccacccgagctacttctcggcgcaacggactatggggtaggtgtggacctgtggagcgcagggtgtatcctggccgagttgctcgctgggaggccaattatgccggggcaaacagagaagaatattggaaaaagtccaagctacctggtgctacaatatttaagactcagctgccatacaaaaggcgaataagagagacatttgaggattttccacaatcagcgctgcagttgatcgagatactacttgcaattaatccagcagatcggttaacagcgacttctgcattaagaagcgatttctttacaactgaaccttttgcatgtgaaccatcgagtcttccaaaatatcctccaagcaaagaaatagatgtgaaaagaagagacgaagaagccagacgtttaagggctactggtggtagagctaacggtgatggagccaagaagacgagagcacgtgatcgacctaaggcagttccagctccagaggcaaatgctgaacttcaagtaaatatcgataaacgaaggttcgtcactcatgcagctaagagcaagagcgaaaagttccctcccccacatcaagatggtgcggttggtgtccctttggacacttcaaatcatatggacccactatatgagcctccagacccgtcttccttcagcactgtgttcacgcacgagaaaggcgctgtgcctacttggtccggaccattggttgatcctgctgcagtggtgaaccaaaagcggaagcacaagtttgggcgctcatcgaaacaaccggccactgcccgtgctcggtaagatcctaaggatcaatatttacaggtaaaaaaaaggagacttcaacatgggggaaatgctccatgcagctgttttgcaaacgaaaaatgcaatgataatgtattttgttggttacctgttgtcatgtgagtgattttttttctagacatcatgtataggctggggagggagttgaagtagttagttctgtatattaggttttctttcctgctctttaagcagctgcgtttgatgttagatttatttgaatggaagcttagatctctagcgtttcactacacccctttccattgtaacagtctgttgcctgcataatcagttatcaattcaacgcaaattttcaatcggatgttttggtgaaaagttggtggattcatgaaccatgacatgtatcacattgtaagctggagtaatattcctaaaatttctg

SEQ ID NO: 7605 - DNA, 2252 bp, Zea Mays
gtcaaacctttctccggagtccggagcacgggcacacaaggcagagccgcagaggcacgtccagctctcctcctcggtcccggtcccctccccggtccacactccatcgcgcccgctgcactccactccctctccccactccccaaccccagctccagagccaccgccggtgaccagcaacaccctcatgggctgcgtccacggccgcccctccacgcccagccccgaccacccgccgcagccgcccgagccgccagcccccgcggcggcgcaggaggccaccgggaaggccgagcagccggcggcgccagccgagaagccggccccacgggagaggcgctccctctcgccgcgcagcggccccggccccagcttcgccaacagggcgcgcggggagcaggtcgccgccggctggcccgcctggctctccgccgtcgccggcgaggccatcgacggatggaccccgcgtcgtgccgactccttcgagaagattgacaagggcacatacagcaacgtgtacaaggcgcgcgacacggtgagcggcaagatcgtggcgctcaagaaggtgcgcttcgacaacctcgagcccgagagcgtccgcttcatggcccgcgagatcctcatcctccgacgcctcgaccaccccaacgtcgtcaagctcgacggcctcgtcacctcccgcatgtcctgcagcctctacctcgtcttcgagtacatggagcacgacctcgcgggcctcgccgccagcccggaaatcaagttcaccgagccacaggtcaagtgctatatgaatcagttgttgtcgggtctggagcactgccacgaccggggggtgctgcatcgcgacatcaagggctcgaatctgctcctggacaacaatggcatgctcaagattgcagattttggtctcgcgtcattcttcgacccggaccgtaaacagccgatgacgagccgggtggtgaccctatggtaccggccacccgagctacttctcggcgcaacggactatggggtaggtgtggacctgtggagcgcagggtgtatcctggccgagttgctcgctgggaggccaattatgccggggcaaacagaggtggagcagatgcataaaatttttaagttatgtggctccccgacagaagaatattggaaaaagtccaagctacctggtgctacaatatttaagactcagctgccatacaaaaggcgaataagagagacatttgaggattttccacaatcagcgctgcagttgatcgagatactacttgcaattaatccagcagatcggttaacagcgacttctgcattaagaagcgatttctttacaactgaaccttttgcatgtgaaccatcgagtcttccaaaatatcctccaagcaaagaaatagatgtgaaaagaagagacgaagaagccagacgtttaagggctactggtggtagagctaacggtgatggagccaagaagacgagagcacgtgatcgacctaaggcagttccagctccagaggcaaatgctgaacttcaagtaaatatcgataaacgaaggttcgtcactcatgcagctaagagcaagagcgaaaagttccctcccccacatcaagatggtgcggttggtgtccctttggacacttcaaatcatatggacccactatatgagcctccagacccgtcttccttcagcactgtgttcacgcacgagaaaggcgctgtgcctacttggtccggaccattggttgatcctgctgcagtggtgaaccaaaagcggaagcacaagtttgggcgctcatcgaaacaaccggccactgcccgtgctcggtaagatcctaaggatcaatatttacaggtaaaaaaaaggagacttcaacatgggggaaatgctccatgcagctgttttgcaaacgaaaaatgcaatgataatgtattttgttggttacctgttgtcatgtgagtgattttttttctagacatcatgtataggctggggagggagttgaagtagttagttctgtatattaggttttctttcctgctctttaagcagctgcgtttgatgttagatttatttgaatggaagcttagatctctagcgtttcactacacccctttccattgtaacagtctgttgcctgcataatcagttatcaattcaacgcaaattttcaatcggatgttttggtgaaaagttggtggattcatgaaccatgacatgtatcacattgtaagctggagtaatattcctaaaatttctg

SEQ ID NO: 7606 - DNA, 2348 bp, Zea Mays
gcactagcagagctaaaacccttgcggcggctacctttccctcaccccctttctcgcctcgcggcggctacctttccccccttctcgcctctcgcctcgcggcggctacctttccccccttctcgcctctcgcctcgcggccgccgcaggcgaccccttgtcgcctcgtgctgtccaccgccgaatcttccccaggttagggagggtatctgttgtttcagctcagttttaccgggggactggttgtgggcggagatgttggtgctctttgagacccccgcgggcttcgccctattcaaggtgctcgacgagggtaagctcgacaaggtcgaggatctatggaaggagttcacgacgtcggactcagcaagaaaggtggttgagctgaaggctttcaataagtttgagaacacatctgatgctctatctgcggcaacccttattattgatagcaagcctagcaagggtctgcgcaagttcttacagaaacattgtgagggtgaaacattagcggttgctgattctaagctaggaaatgctataaaagaaaagctggtcagtagtatttctcaatttattacttttttgtgaatggtcagccttcatgggactttaattgtgttgcagaaaattgactgccttcacaatagtgctgtgatggagctgatgagagggctgagaaatcagctcactgagcttataactgggttgggtgctcaagaccttggcccaatgagcttgggattgtcccacagcctgtctaggtataagctgaagttcagtcccgagaaggttgataccatgatcattcaagccattggattattggatgatcttgacaaggagcttaacacttatgccatgagagttcgtgaatggtatggctggcactttccagagctcaccaaaatagttacagataatatacagtatgccaaagttgtgaagatgatgggaaacagaaccaatgcagtcaatcttgacttctctgagatattatcagatgaagagctagaaacacagctaaaggaggcagcagtgatatctatgggaacagaagttagtgacctcgacttgtcaaatataagagagctatgcgatcaagtgctggcactttctgagtacagagcccagctgtatgactatttaaaaagcaggatgaacactattgcaccaaatctgacagccctagtgggtgaattagttggtgctcgccttattgcacatggtggaagtttgctaaatttagccaagcagcctggtagcacaattcagatacttggtgcagagaaggctttattcagagctctaaagacaaagcattctactcctaagtatggcctcatctaccatgcatccttaattggtaaggcttctcaaaagcacaagggaaaaatctctcgttctcttgctgcaaaaactgctcttgccatccgatatgatgcgcttggcgatggtgaggacaactccattggtactgagagccgacttaagttcttgagggtagagaacttgggaaatctgctggttccacaaaggggaagcccaagatagaagtgtatgaaaaggaccggaagcagggtgctggggctttaacaactcctgctaagacatacaaccctgcagctgatctggtacttactgaagaaacaccaaagaagtcagaattggcttcaaagaagaggaaacatcatgaggttcaaactgaaccatcggcagagcttgcagagggagcagtccaggaggataggaagaagaagaaaaagaacaaggaaagcgaggaggctcctgctgctgaaggtgatggtgagaagaaaaagaaaaagaagtccaaggatgtcggggaagagcctgctgtggctgctgctgctgccacagaaggtgagaaaaagaagaagaaaaagaagtctgacgcggacggtgagggtgttacaacgcaaaccgaagagtctggtaagaaagataagaagaaaaagaagaaaaggcatgccgatgatgagtgagacattcttcggaagagaatgtgcgggtaccaaatgctgggactcagctgttctgtaaaatgggtatcacggggttagaaaacatattgagatcagtttttggggttacctggtttttttgggggacctggcttgtattcaacaattacttgctcggtctagatgatgatggaatttttaacttttgctgttgtaaccccataaatttagtatgatgattgtcatggtaactctgcaactgagagaccttccattctcaatgctgacctggacttgctttgccactcttgtaatcggtaattcggtactatatatctcgaggtcaccaaatttctggtatctgat

SEQ ID NO: 7607 - DNA, 1467 bp, Zea Mays
tgccgctccgcgcacgcccgcggccgaacgctccccgcaccttcatcctccgcgcagccacgcatccacagccgtgattcccgccgccccgccgcgctcaccttccagcccgcggccgaacgctcccccgcaccttccatcctccgcgcagccacgcatcccgcagccgcgattcccgccacgctcaccttccatccccgcgctctcccatcgacgtcgatgctcatcctccgcgcagccacagccgcgattcccgccgccccgccgcgctcacctaccagccccgccgcggatccctgatgttgagatctgggagctgaagctgaagatctcgcggatgcgggtgcggctgacggagctggagcgggagcaggggctaatgaagcagcaggggaggatgcgcggcggggacggcggcggcggcgagcacgaccgcgccttccttgcgtcgctctcgaggggcatcggcagcatcaccatgttcggcgggcccgcggcggccgacagacggcgcaagaattgtggcggccggagctcccagtgctccgacggcaaggcccgcaggcggcagaaggcatccttccctatgactgatgcttcgctgctagcgtcgacagtggaggcgcggcaggcggtgatcgtggatggatgcggtctcagcgtctggaggatcggtcggagctaagcagggacggtgggtgctgacagctgagtgatacgtgtatttctaggaagatcaagcccagagctgtcgcatagccagaactgcatctacttccacggcaccgtcagcaaggacaagttggtcatccagctctctaggaagatcaaggacggcatctgaagactgaagtactttgaagtttgatgaacaacaaggacatcctcacgcacaagtttgatgaacaagggagttgccgacctttctctaggttcctgcctgatgactcatttctccagttctttgatttcaccacaaattcgaaggttcaaggtcaacaaaattcttgagccagttcactccaacccaatgggacaaggatcagtggtatcctttcatggggccactgcggtccatccaagtgttgttcatttgtgttgtcttcgtgatcgtggagatcaacacattcttccttaagcttacgtccttattgccgagttcctcaaaaggactaagtcgttactgtggttcagtctctacttgaatgatattagtgacaagggcttttctagctctcgagtgatgtggtcgatggcgccataatctatgcaccagcttgaattagtttgataagaatatgacagaggcaacaagttttttatctgggacaaaaaattatcaaacttgtgctagcattcacagttgtatgatttttaagcaaacttgagatatgagttgctcctcttatctaccacggttatgattagaactattagggttgtggcccctattattatcgtacccaa

SEQ ID NO: 7608 - DNA, 1692 bp, Zea Mays
aaataaagagtcaaataaagatttaaaaaataaagtccgttggagatgctatcataaacgaaacatctatttagttacaactcttcataatatctcaacagcctcccttaatcttcaccttctctaatctagattatacttagaattttctattaatcttacatgtaaagcttcagtaaatccatcgaccacttaatcatttgagaaaaaatcaatatcaaccattcttttaaaaactctttctaaaaaaatgataatctctactactattatgtgagcactgtaggcgtccatctcgcggtgcacacgttctgccgctccgcgcacgcccgcggccgaacgctccccgcaccttcatcctccgcgcagccacgcatccacagccgtgattcccgccgccccgccgcgctcaccttccagcccgcggccgaacgctcccccgcaccttccatcctccgcgcagccacgcatcccgcagccgcgattcccgccacgctcaccttccatccccgcgctctcccatcgacgtcgatgctcatcctccgcgcagccacagccgcgattcccgccgccccgccgcgctcacctaccagccccgccgcggatccctgatgttgagatctgggagctgaagctgaagatctcgcggatgcgggtgcggctgacggagctggagcgggagcaggggctaatgaagcagcaggggaggatgcgcggcggggacggcggcggcggcgagcacgaccgcgccttccttgcgtcgctctcgaggggcatcggcagcatcaccatgttcggcgggcccgcggcggccgacagacggcgcaagaattgtggcggccggagctcccagtgctccgacggcaaggcccgcaggcggcagaaggcatccttccctatgactgatgcttcgctgctagcgtcgacagtggaggcgcggcaggcggtgatcgtggatggatgcggtctcagcgtctggaggatcggtcggagctaagcagggacggtgggtgctgacagctgagtgatacgtgtatttctaggaagatcaagcccagagctgtcgcatagccagaactgcatctacttccacggcaccgtcagcaaggacaagttggtcatccagctctctaggaagatcaaggacggcatctgaagactgaagtactttgaagtttgatgaacaacaaggacatcctcacgcacaagtttgatgaacagtcaacaaaattcttgagccagttcactccaacccaatgggacaaggatcagtggtatcctttcatggggccactgcggtccatccaagtgttgttcatttgtgttgtcttcgtgatcgtggagatcaacacattcttccttaagcttacgtccttattgccgagttcctcaaaaggactaagtcgttactgtggttcagtctctacttgaatgatattagtgacaaggcttttctagctctcgagtgatgtggtcgatggcgccataatctatgcaccagcttgaattagtttgataagaatatgacagaggcaacaagttttttatctgggacaaaaaattatcaaacttgtgctagcattcacagttgtatgatttttaagcaaacttgagatatgagttgctcctcttatctaccacggttatgattagaactattagggttgtggcccctattattatcgtacccaa

SEQ ID NO: 7609 - DNA, 1778 bp, Zea Mays
aaataaagagtcaaataaagatttaaaaaataaagtccgttggagatgctatcataaacgaaacatctatttagttacaactcttcataatatctcaacagcctcccttaatcttcaccttctctaatctagattatacttagaattttctattaatcttacatgtaaagcttcagtaaatccatcgaccacttaatcatttgagaaaaaatcaatatcaaccattcttttaaaaactctttctaaaaaaatgataatctctactactattatgtgagcactgtaggcgtccatctcgcggtgcacacgttctgccgctccgcgcacgcccgcggccgaacgctccccgcaccttcatcctccgcgcagccacgcatccacagccgtgattcccgccgccccgccgcgctcaccttccagcccgcggccgaacgctcccccgcaccttccatcctccgcgcagccacgcatcccgcagccgcgattcccgccacgctcaccttccatccccgcgctctcccatcgacgtcgatgctcatcctccgcgcagccacagccgcgattcccgccgccccgccgcgctcacctaccagccccgccgcggatccctgatgttgagatctgggagctgaagctgaagatctcgcggatgcgggtgcggctgacggagctggagcgggagcaggggctaatgaagcagcaggggaggatgcgcggcggggacggcggcggcggcgagcacgaccgcgccttccttgcgtcgctctcgaggggcatcggcagcatcaccatgttcggcgggcccgcggcggccgacagacggcgcaagaattgtggcggccggagctcccagtgctccgacggcaaggcccgcaggcggcagaaggcatccttccctatgactgatgcttcgctgctagcgtcgacagtggaggcgcggcaggcggtgatcgtggatggatgcggtctcagcgtctggaggatcggtcggagctaagcagggacggtgggtgctgacagctgagtgatacgtgtatttctaggaagatcaagcccagagctgtcgcatagccagaactgcatctacttccacggcaccgtcagcaaggacaagttggtcatccagctctctaggaagatcaaggacggcatctgaagactgaagtactttgaagtttgatgaacaacaaggacatcctcacgcacaagtttgatgaacaagggagttgccgacctttctctaggttcctgcctgatgactcatttctccagttctttgatttcaccacaaattcgaaggttcaaggtcaacaaaattcttgagccagttcactccaacccaatgggacaaggatcagtggtatcctttcatggggccactgcggtccatccaagtgttgttcatttgtgttgtcttcgtgatcgtggagatcaacacattcttccttaagcttacgtccttattgccgagttcctcaaaaggactaagtcgttactgtggttcagtctctacttgaatgatattagtgacaaggcttttctagctctcgagtgatgtggtcgatggcgccataatctatgcaccagcttgaattagtttgataagaatatgacagaggcaacaagttttttatctgggacaaaaaattatcaaacttgtgctagcattcacagttgtatgatttttaagcaaacttgagatatgagttgctcctcttatctaccacggttatgattagaactattagggttgtggcccctattattatcgtacccaa

SEQ ID NO: 7610 - DNA, 2242 bp, Zea Mays
cccagacaaaagcagccagcggaaaagaggggaaccctctcatcccatcccaccagttccccaattccatttctccatccatgacagctcgccatttccccacctgttcctacgctaccgccacctaaaaaaaattccaggcacctagtgcttcccattccaatcttgctcaaaggtcatttcatttcggccggtgcctattttaggccgattggagggaaggctggtctgtgttttattttcctgctgcgagcgctttcttgggcgagttgaatttgggcgcctcttgctccaggcagtattttatcgagctagagtctggtacccggtgattcttgcttggtccaggcgccaaggcgaggaattgggcctagctccagctcaaatctgtgccttgttgcagacagaaggatttctgcatgggcgagttgaatttgggcgcctcttgctccaggcagtattttatcgagctagagtctggtacccggtgattcttgcttggtccaggcgccaaggcgaggaattgggcctagctccagctcaaatctgtgccttgttgcagacagaaggatttctgcatgggcgaccataactaagatgtgagatttggtggcgtcagctcggctggtgggtgattctcggtgcgtacacagacacatccctggagcctggaggcttgagctgatttggcgaggaggacagtgcaggagagagatgtctttcaggagcctgattcaggacatgaaggacgagttcgggagcatctcgcggcatagcctgcggtcccggtctcaccgctccgccgggaacgcggcgcgggcggcggccgcgggaccgtcggaggcgatggatcagagctgctggtcgcagctgccccccgagctcctgcgggaggtgctggtgaggatcgaggcatcggagagctggtggccagcgcgcaagaacgtggtgtcaggcgccggcgtctgccggacctggaggggcatcatgaaggaggccgtgcgcgtcccggaggtgtcagggaagctcacgttccccatctcacttaagcagcctggcccaagggatggcactcttaaatgtttcatcaggagaaatcgaactactcagacatattatctgtatattggattgacagaagcattggctgatgatgggaagtttctacttgctgcacgcaagtgtcgtaagcccacctgcacagactacctaatttctcttgataaggtcgatatgtcaaagggaagcagcacctatattggcaagctaagatcaaatttccttggaacaaagttcactgtctatgatgctcatccaccatatgatggtgctgcggtctcaaagagtcgctctgcacgtgtggttggtttgaagcaggtctcccctagagttccggctggaaattatcccgtttcacatatttcttacgagctaaatgttctgggctccagaggtccaagaaggatgaactgtgttatggattccatccctgcatcagctgttaaggaaggagggaaaactcctacacagactgaatttccacttagcagccttgactctttcccatcatttccattcttcagatctaaatcagctcggatagacagttcaacgtcgcaatcatccagtcagagggaagataggttggtgcttaagaacaagtctcctaggtggcacgaacagctgcagtgttggtgcctgaatttccgtgggcgggtcactgttgcctcggttaaaaacttccagttggtggcttctgaggacaatggaccagagaaccaagagagtgacaaggtgattctccaattcggaaagatcggaaaagacttgttcaccatggactacggttatccaatatcggcatttcaagcttttgcaatttgtctgagcagttttgatacaaaaattgcctgcgaatgaggcaaggatggctggaaactaccgtaccgccagaagacgtcgtccaaaatgattatgagctgcagagctggggcgtaaatagctgcatctagttgttccctgcttgttctgccgcctagtttatttctctgaatttggatatacgcattgtttgccggtgttggccatcggtgagctgacgagattgtgagggttccggtgataatgtagcgtacgagatcttgagttttaatagtgtaattacgcaacacaaagaacaccgcatcgacaactagcacgaagaaaagatactataccaatagatcagtacatactagtccta

SEQ ID NO: 7611 - DNA, 2296 bp, Zea Mays
agacaaaagcagccagcggaaaagaggggaaccctctcatcccatcccaccagttccccaattccatttctccatccatgacagctcgccatttccccacctgttcctacgctaccgccacctaaaaaaaattccaggcacctagtgcttcccattccaatcttgctcaaaggtcatttcatttcggccggtgcctattttaggccgattggagggaaggctggtctgtgttttattttcctgctgcgagcgctttcttgggcgagttgaatttgggcgcctcttgctccaggcagtattttatcgagctagagtctggtacccggtgattcttgcttggtccaggcgccaaggcgaggaattgggcctagctccagctcaaatctgtgccttgttgcagacagaaggatttctgcatgggcgagttgaatttgggcgcctcttgctccaggcagtattttatcgagctagagtctggtacccggtgattcttgcttggtccaggcgccaaggcgaggaattgggcctagctccagctcaaatctgtgccttgttgcagacagaaggatttctgcatgggcgaccataactaagatgtgagatttggtggcgtcagctcggctggtgggtgattctcggtgcgtacacagacacatccctggagcctggaggcttgagctgatttggcgaggaggacagtgcaggagagagatgtctttcaggagcctgattcaggacatgaaggacgagttcgggagcatctcgcggcatagcctgcggtcccggtctcaccgctccgccgggaacgcggcgcgggcggcggccgcgggaccgtcggaggcgatggatcagagctgctggtcgcagctgccccccgagctcctgcgggaggtgctggtgaggatcgaggcatcggagagctggtggccagcgcgcaagaacgtggtgtcaggcgccggcgtctgccggacctggaggggcatcatgaaggaggccgtgcgcgtcccggaggtgtcagggaagctcacgttccccatctcacttaagcagcctggcccaagggatggcactcttaaatgtttcatcaggagaaatcgaactactcagacatattatctgtatattggattgacagaagcattggctgatgatgggaagtttctacttgctgcacgcaagtgtcgtaagcccacctgcacagactacctaatttctcttgataaggtcgatatgtcaaagggaagcagcacctatattggcaagctaagatcaaatttccttggaacaaagttcactgtctatgatgctcatccaccatatgatggtgctgcggtctcaaagagtcgctctgcacgtgtggttggtttgaagcaggtctcccctagagttccggctggaaattatcccgtttcacatatttcttacgagctaaatgttctgggctccagaggtccaagaaggatgaactgtgttatggattccatccctgcatcagctgttaaggaaggagggaaaactcctacacagactgaatttccacttagcagccttgactctttcccatcatttccattcttcagatctaaatcagctcggatagacagttcaacgtcgcaatcatccagtcagagggaagataggttggtgcttaagaacaagtctcctaggtggcacgaacagctgcagtgttggtgcctgaatttccgtgggcgggtcactgttgcctcggttaaaaacttccagttggtggcttctgaggacaatggaccagagaaccaagagagtgacaaggtgattctccaattcggaaagatcggaaaagacttgttcaccatggactacggttatccaatatcggcatttcaagcttttgcaatttgtctgagcagttttgatacaaaaattgcctgcgaatgaggcaagagaaaaataggtgcagatttgcttgtgcaagcaaaacatctgccctctctccacctttaactcaacaatgcttttgtcctcgtctatctgcagaagctggatagcggtggcggatagcatgacagcaatagggggatagcatgacagcaataggaaaacggtcgcaaacgtatatttattcggtttgacttttttctttaattttgaataaataagatatataatgtgcaatacaaatttatatttttgtttttagcattgagtctgtaaaagttcataaaagataaatctcaaatttattatatatcttctcttcttaaataagattcggatacaaatttagagtttttattaccttttttgttgtacagag

SEQ ID NO: 7612 - DNA, 2242 bp, Zea Mays
caggcacccatcattttcagctgccgagacgcgagacccagacaaaagcagccagcggaaaagaggggaaccctctcatcccatcccaccagttccccaattccatttctccatccatgacagctcgccatttccccacctgttcctacgctaccgccacctaaaaaaaattccaggcacctagtgcttcccattccaatcttgctcaaaggtcatttcatttcggccggtgcctattttaggccgattggagggaaggctggtctgtgttttattttcctgctgcgagcgctttcttgggcgagttgaatttgggcgcctcttgctccaggcagtattttatcgagctagagtctggtacccggtgattcttgcttggtccaggcgccaaggcgaggaattgggcctagctccagctcaaatctgtgccttgttgcagacagaaggatttctgcatgggcgagttgaatttgggcgcctcttgctccaggcagtattttatcgagctagagtctggtacccggtgattcttgcttggtccaggcgccaaggcgaggaattgggcctagctccagctcaaatctgtgccttgttgcagacagaaggatttctgcatgggcgaccataactaagatgtgagatttggtggcgtcagctcggctggtgggtgattctcggtgcgtacacagacacatccctggagcctggaggcttgagctgatttggcgaggaggacagtgcaggagagagatgtctttcaggagcctgattcaggacatgaaggacgagttcgggagcatctcgcggcatagcctgcggtcccggtctcaccgctccgccgggaacgcggcgcgggcggcggccgcgggaccgtcggaggcgatggatcagagctgctggtcgcagctgccccccgagctcctgcgggaggtgctggtgaggatcgaggcatcggagagctggtggccagcgcgcaagaacgtggtgtcaggcgccggcgtctgccggacctggaggggcatcatgaaggaggccgtgcgcgtcccggaggtgtcagggaagctcacgttccccatctcacttaagcagcctggcccaagggatggcactcttaaatgtttcatcaggagaaatcgaactactcagacatattatctgtatattggattgacagaagcattggctgatgatgggaagtttctacttgctgcacgcaagtgtcgtaagcccacctgcacagactacctaatttctcttgataaggtcgatatgtcaaagggaagcagcacctatattggcaagctaagatcaaatttccttggaacaaagttcactgtctatgatgctcatccaccatatgatggtgctgcggtctcaaagagtcgctctgcacgtgtggttggtttgaagcaggtctcccctagagttccggctggaaattatcccgtttcacatatttcttacgagctaaatgttctgggctccagaggtccaagaaggatgaactgtgttatggattccatccctgcatcagctgttaaggaaggagggaaaactcctacacagactgaatttccacttagcagccttgactctttcccatcatttccattcttcagatctaaatcagctcggatagacagttcaacgtcgcaatcatccagtcagagggaagataggttggtgcttaagaacaagtctcctaggtggcacgaacagctgcagtgttggtgcctgaatttccgtgggcgggtcactgttgcctcggttaaaaacttccagttggtggcttctgaggacaatggaccagagaaccaagagagtgacaaggtgattctccaattcggaaagatcggaaaagacttgttcaccatggactacggttatccaatatcggcatttcaagcttttgcaatttgtctgagcagttttgatacaaaaattgcctgcgaatgaggcaagaagctggatagcggtggcggatagcatgacagcaatagggggatagcatgacagcaataggaaaacggtcgcaaacgtatatttattcggtttgacttttttctttaattttgaataaataagatatataatgtgcaatacaaatttatatttttgtttttagcattgagtctgtaaaagttcataaaagataaatctcaaatttattatatatcttctcttcttaaataagattcggatacaaatttagagtttttattaccttttttgttgtacagag

SEQ ID NO: 7613 - DNA, 207 bp, Zea Mays
atgaaaccttgtttgaatgaccttgacccaagaagcaatcatgtaacatcatcgaagcataggtccacatataacactcaagttgcaatagcactccaaaacaaaagtggcacggacagaaatatcaccctaggttgtcagatccatgatggcagtgacaatgtccccattagaagccttgagggccttgacagccttgggccttga

SEQ ID NO: 7614 - DNA, 1994 bp, Zea Mays
gaaaaaataagaaaaataaggtaaatctgacggcccacgagagcccataaattctgccccgccgcctcgtgtcaaccccgtcactcttgtgtcctcctaaaaccctaaccctccgccgcccctcggacccccaaccagcagctgccgcggccatccgccggcgagatggcgctgtacctgctgttcgagtcggcgtccggctacggtctattccacgcgtacggcatcgatgagatcgggcagagcgtggaggccgttcgctcctccgtgctggacctcgatcgcttcggcaaggccgtcaagctcaccgccttcaaccctttctcctctgccgtcgatgcactcaatcagtgcaacgctatatccgaagggatcatgaccgatgaactgaggagtttcctggagctgaacctgccgaagcccaaggaggggaagaaggccaaatacagcctcggggtcgtcgagcccaaggtcggttctcacatctccgaggtcaccggcattccctgccagagcaacgaattcgtccaggagctgctccgcggtgtccgcctccacttcgaccgtttcatcaacgagcttaaggattctgacttggagaaggcccagcttggcctggggcatagctacagcagggccaaggtgaagttcaatgtgaatcgtgttgacaacatggtgatccaggcaatctttctattggatacgcttgacaaggacatcaattccttctccatgagagtcagggaatggttctcatggcacttccctgagcttgtcaagattgtgaacgacaattacctatatgccaagcttgctaagtttatcgtgaacaaatctgatttgacggaaaaagatattcctgctttggctgatatagttggcgacgaggacaaggctaaagaaattgttgaagcagcaaaggcttcaatgggccaggatctgtcaccagttgatttgatcaatgtccagcaatttgcccaaagggttatgaatctctctgagtatcgcaaaaacctttatgagtatcttgtgactaagatgaatgatattgcacccaacctgacatcgttgattggtgaagtagttggagctcgcctaatctctcatgctggcagtctttcaaaccttgctaagtgtgcagcctccacccttcaaatacttggtgctgagaaggccctattcagagcactgaaaactcgagggaacacaccaaagtatgggcttatattccactcctcctttattggccgtgcttcaactaagaacaagggcagaatggctcgttacctggcaaacaaatgctcgattgcttcacgcattgactgctactcggaggctagcacctctgtctttgggcaaaagttgcgtgagcaagtcgaggagagactggaattctatgacaagggtgttgcgcctcgtaaaaaccttgatgtgatgaaagccgctattgacagcatggtcaatggcacctcaatggatgatgatgatatcgagaagaccgatgcatctcccaagaaaagcaagaaaaagaagaccaaaaccaaggctgatggtgatgcaatggacgtggataaaccctccaacgttgctggtggagaagctgagcctggaactgagaagaagaagaagaaaaagaagcataagctggaggaggaggcacaggaggagaacggtgcagcagatactacccctaagaaaaagaaaaagaagagccgtgaagcttccgaagaagctgaacctaagaccgccaccgatggtaagaagaagaagaaaaagaaggctaaggccgaggatgatgagtagccaagttatttgttgtatggcgtatgaatccgagagtatttgttgaaaaacagagatgaacgcctgcctagctcaactagcttgtagttcatgaggcgtttgatgcaaacccaactcaaagtacgaagttttcctatcgtctttacaaaaaaagaaaaaagaaaaaaaagcttctgcaaccatcagattaa

SEQ ID NO: 7615 - DNA, 916 bp, Zea Mays
cacaagtgcctggctcactgtacgccgctgcacggttcttttatgtactgaactgaaaagaaaaagagctcccacaagaagcatacgaatactcatgacaatgacagtacggacaagaatggagagcccgatgtgggaggtgatcacccggggagtattcacacagaaaatgaacagatcggcgaaccaaggcctaaaagatcaaaaaggctgatgaagagcattactgataaggaactagcggctgctgcaggtgatgaggaaccggcagaaaatcacagagcccatgattatgatggtacagaagaggttcaagacggcactgcagcctgatccacttgacatataaacgagaaccgaggatgatacatggcaagacgagtaatttactatgctgagcttgggcatcagaggtgtgtagatcaggagccttctacatggtacagacatgggaagcacacagattatttaaccacacacctcccatactaaaatcagcgaaatcaggtgattaggccgtcagtgcggtggtccgtagcaataagctgacagagggagagggtgttgccttttagaggcgagggctatatcctccagaggttaacatgcagtccacatctgcagtattcgttgtgctggctgtgaccataatggaggaggtggagggtccatgaccagcacacacagaaatagtttcgcgtaaagagggtagctatatctgtattggcgatagttttggtgttgataattaaagcaatggaacacggctggaaaatagctgccgtgatgttgtaatgtattttaaggggggcgtttggtatggctcaatcctaacttcagagttgtaaagtagttttgggagctgcagtataaatttaattttcgacttttggaacacagctgtcaaacaccctct

SEQ ID NO: 7616 - DNA, 810 bp, Zea Mays
atgggcatgctgcttgatgtgaaaaagagctcccacaagaagcatacgaatactcatgacaatgacagtacggacaagaatggagagcccgatgtgggaggtgatcacccggggagtattcacacagaaaatgaacagatcggcgaaccaaggcctaaaagatcaaaaaggctgatgaagagcattactgataaggaactagcggctgctgcaggtgatgaggaaccggcagaaaatcacagagcccatgattatgatggtacagaagaggttcaagacggcactgcagcctgatccacttgacatataaacgagaaccgaggatgatacatggcaagacgagtaatttactatgctgagcttgggcatcagaggtgtgtagatcaggagccttctacatggtacagacatgggaagcacacagattatttaaccacacacctcccatactaaaatcagcgaaatcaggtgattaggccgtcagtgcggtggtccgtagcaataagctgacagagggagagggtgttgccttttagaggcgagggctatatcctccagaggttaacatgcagtccacacagaaatagtttcgcgtaaagagggtagctatatctgtattggcgatagttttggtgttgataattaaagcaatggaacacggctggaaaatagctgccgtgatgttgtaatgtattttaaggggggcgtttggtatggctcaatcctaacttcagagttgtaaagtagttttgggagctgcagtataaatttaattttcgacttttggaacacagctgtcaaacaccctct

SEQ ID NO: 7617 - DNA, 2087 bp, Zea Mays
gtttggttgaataaaaccagatcgcgcgatgaaatgtcatgtctgtgttcaattatcatccgaggggagcgagtcgacggcaacaacagctcgaggagacgcgccaccgcccaccagctagcgcaccacgccaccacccccgcccccgatcaacgcagcagcagggacgcctataaatgcctaggtgcgtgcgggcatcgtctgacgccccggcgccttcctgctagcactacgccactaccagtcagggcaagactcgcagcccggacaaggtaaggcgacgtacggcggcgatggcgccggtggtcatgatgagcatgtgcgtcgtcgtgtcgctggtggcggtgcagctgcaggcgacgagcagcgacggcgccacggccgccacaccgtccgtggtgctgccgccggtgacggtgccccgtgtgcgcggccggttggaggccggtcgtaagctgcaggccgtcgacgccgtcgggatgggcatggactccgtggtgcgtcggacggtggtgctcaccacgatgcagacgagcaactcgccctccctgggctacggctcgctccgcccgaacaacgctgtgtgcgggtccagctgcgccggcagacctcctggtgagccgtatctgcatcagatccgcccgtgtggggagtattatcagtgtccgtctacaccgtcttaattagatctaggcggcgcggcgtacgtttcatcaaattcaataaacataaatatgtataggtgagaactctatgaaatatatatgaatgtgtcatgtatatgcacgatggattatgaaatatgtatgttatattattctataatagtacacaaaatgtttctaccagtggtgtcgtcataagctcatcgttactggtgtttcttagaacttagaacccctagtgaaaatcgacgtcttctttttaagaactgccgatataaatatttatttacaggcacgtgtggttttgttaagaaaaccaccaaggtttgattaatctgcgtaataaaaaaatggagtcggtctatttaattaaaggttctagtgtttgatgatcaacataattatttgaactaatatatttctctagtgtttatgtttatagtgtaaaggatgcggcgtggatttggacgaaagcaaatgggagtataaaacatgagacaatagaagcccaggaaggcaagaaaagaaatgagaagtcatgaagaaaacaggctgcacagagtgcagtggatgtgtccgatggcacatcggatagacatgcgtgtacagatgtgttcatgagcttttgtagcaaaggacatgctctacatcgtcctaatcaatctctagaccagcttcaataatctcaaagttgcttacttatatgtgatagtgaaagggaattaggcttgcacctagttcctaaattattttggtggttgaattgcccaacacaaataattggactaactagtttgctctagattgtatgttctacaggtgccaaaggttcatctacaactatactaattcgactgtccgggataccgtagattattccggacaggagaagttttttggaaaaacaggccaagcgcggaccgtccgggctcctgcggcggaccgtccgcgacacaagaatgaccctcggacagattcaatgcaaaaacacaagtttccactacagactgtccggaggaaaagcaaagacagtccgagccctcgcgcggaccgtccggcctcaggcgcggaccgtccggtcggtaagaaaccaaaaaacccgaaggtaacgggttcggagaaatgaattatagggggcctcgcggaccgtccggggtgcacgaccggaccgtccgcgcctggctctgtctgacatctgacgacacattaaatgcaatatagccgttgatatagccgttactgctgaccgttgcattttcagccgttgatctacaggggcggaccgtccggacccggctcgcggaccgtccgcgctcagcagaatggtccaacggctaggaagtggttggtggctataaatacaaccccaaccacctccattcacttcacccaagcattccaaccttcaacattcaatacaag

SEQ ID NO: 7618 - DNA, 1595 bp, Zea Mays
gtttggttgaataaaaccagatcgcgcgatgaaatgtcatgtctgtgttcaattatcatccgaggggagcgagtcgacggcaacaacagctcgaggagacgcgccaccgcccaccagctagcgcaccacgccaccacccccgcccccgatcaacgcagcagcagggacgcctataaatgcctaggtgcgtgcgggcatcgtctgacgccccggcgccttcctgctagcactacgccactaccagtcagggcaagactcgcagcccggacaaggtaaggcgacgtacggcggcgatggcgccggtggtcatgatgagcatgtgcgtcgtcgtgtcgctggtggcggtgcagctgcaggcgacgagcagcgacggcgccacggccgccacaccgtccgtggtgctgccgccggtgacggtgccccgtgtgcgcggccggttggaggccggtcgtaagctgcaggccgtcgacgccgtcgggatgggcatggactccgtggtgcgtcggacggtggtgctcaccacgatgcagacgagcaactcgccctccctgggctacggctcgctccgcccgaacaacgctgtgtgcgggtccagctgcgccggcagacctcctgtgtaaaggatgcggcgtggatttggacgaaagcaaatgggagtataaaacatgagacaatagaagcccaggaaggcaagaaaagaaatgagaagtcatgaagaaaacaggctgcacagagtgcagtggatgtgtccgatggcacatcggatagacatgcgtgtacagatgtgttcatgagcttttgtagcaaaggacatgctctacatcgtcctaatcaatctctagaccagcttcaataatctcaaagttgcttacttatatgtgatagtgaaagggaattaggcttgcacctagttcctaaattattttggtggttgaattgcccaacacaaataattggactaactagtttgctctagattgtatgttctacaggtgccaaaggttcatctacaactatactaattcgactgtccgggataccgtagattattccggacaggagaagttttttggaaaaacaggccaagcgcggaccgtccgggctcctgcggcggaccgtccgcgacacaagaatgaccctcggacagattcaatgcaaaaacacaagtttccactacagactgtccggaggaaaagcaaagacagtccgagccctcgcgcggaccgtccggcctcaggcgcggaccgtccggtcggtaagaaaccaaaaaacccgaaggtaacgggttcggagaaatgaattatagggggcctcgcggaccgtccggggtgcacgaccggaccgtccgcgcctggctctgtctgacatctgacgacacattaaatgcaatatagccgttgatatagccgttactgctgaccgttgcattttcagccgttgatctacaggggcggaccgtccggacccggctcgcggaccgtccgcgctcagcagaatggtccaacggctaggaagtggttggtggctataaatacaaccccaaccacctccattcacttcacccaagcattccaaccttcaacattcaatacaag

SEQ ID NO: 7619 - DNA, 2567 bp, Zea Mays
ggctactggattcttctctcttctctttctctgagtcgcagcttcggcagctggcggtctggtctacggtctaccactaccactctaccagagaggggatcgatcacacaaacacacccatggcgggctgcgcggcggcgcgcatgttcgcgtacaacgccagcctctgcgcctgcgatccggggtactactactacctcagcagcaacggcaccgcgagctgcatcccgatgccgggcggcgggtggggcgactggcaggtgggctccgtgggcgcgccgaggaaccagagcctctacttcctggagccggtgctctcggtctacgccatccgccgcctcacccagtcccaggccgtgctcctcgaggcgaccctcgcgtcgctcctctgctggatcgccttctgcgccgcagccaggttcggcggccgggacccccgcggggagaagaggctgttccgggcccggtactgggtcagccgcctcgactgcctcttcgacaacagccactgggcgggggatcagcaagtactaaggaaaaggaaaaccgaattgggtggcacattctcagtcgctagcttgatcatcttcactggattattaactgtcctcttgtatcaagccatcaaaaggcgcagccttgagatgcatcgagtcaagccagcaaatgctccggacctgctgtctttcgtgaatgatctcgagttccacatctcaaccatctccagcatgtcctgcactcaagcggttgctcctttgacggtagcaatggggacaccagggttcatggacttcagggtggttcccctgtcaacactgttcacctacagttgcacaaacacgagccacgggccatccattacgctcaggtgcaatggatgccgggtccctccaagagatcactacgtgtcctggcaatttgttgacctgctggggcagccagcaactgctgttggtttccagttcaacctgaccgcaaggcaacatggcaacaatcagcacatgagctttgtgagtggtacaatgaactctgacggttatactgatgatgtcaagttgaagacgttcagggggagggattccaatgttctaaagatccagctgtttcctcagatatacaacaatcttggtaacctgcggctcttgcagccactggttcaagacttcactcaaggatctatgttttctgatgtcagcagcttgaattcctccctgcagaaccctagggatggagtggtgaatactactctctacataagttatctctcagactacattgtggagatcagcaatgagagtgtagtaggcccaggtgagtttcatgaagcaatgtcctttacgcacagattacatttgtagcatctaatggagacgattatctgcagttagtgtactcgcaagtattggtggcctttatgccttcagtgtggcaatttgtctctgcctcatgtctcaagtaagtctttgcaaaaatcggtgttgttgtctgaaagccttgccaacgtttttcattttttttttttttttgccaatgaaactaaatagtccaactttggtttctgcgtctttccatccctttgccattttatttggttccttcacgtccactgtccatttggttgttattcacgcttattctgtggcaccgaaacaaaggaataaccctgagctgtccgtttgtcatagcaagaaaataaaataaaagttatgcaactgcttgtgttattaacacatcatgttttcagtgtgaagcaaggataaagaagcttcgtgacgaggataccagaatgctgaaaattctgagcaaacgacgtgctcagcggaattgggataagctgcggaagtttgtcatgtatacctggggtctaagcaacctagacccatctgatagaacctgtcagcagcctgaaggatcagtgatggattctcggcatatgagaagagaagcaattagacaaggaatctaagacgctaacagtactcatagagttcctgatgaaatggggggaaattgacatagaaagagctgcgagcatccaagcagttcaatatagccttgatcaagacttttagacgcaaagttgacatagccacttcgactcattcagatcccttcctgatatccttcatagatggaccttttgaaattttcccctctgcatagtcgtgttggtccctgaagatttgtcaatgcaaagagcaaaaaaaaaaaagtacagaggcagcagattgtccatgtcggttgcacctgaagctgcagagatagacttctggcatgttcctggtatagctcagctcattcgctagtcaccacccagttttattttctagttggcattacgctataaagtgactaacacgttgtaaacaaacggtacacacacaactagcatcctatcgtgccgtgaatttgcgatttggttactcagctggtgtttggtcaaaacgaatccaatactgacatggaagattacagtcgctaacccaacctgtgttcctatcctgaaacagagatcagttttaataaactggactccgccccctgcatgcatccattttatattgtcg

SEQ ID NO: 7620 - DNA, 2215 bp, Zea Mays
ggctactggattcttctctcttctctttctctgagtcgcagcttcggcagctggcggtctggtctacggtctaccactaccactctaccagagaggggatcgatcacacaaacacacccatggcgggctgcgcggcggcgcgcatgttcgcgtacaacgccagcctctgcgcctgcgatccggggtactactactacctcagcagcaacggcaccgcgagctgcatcccgatgccgggcggcgggtggggcgactggcaggtgggctccgtgggcgcgccgaggaaccagagcctctacttcctggagccggtgctctcggtctacgccatccgccgcctcacccagtcccaggccgtgctcctcgaggcgaccctcgcgtcgctcctctgctggatcgccttctgcgccgcagccaggttcggcggccgggacccccgcggggagaagaggctgttccgggcccggtactgggtcagccgcctcgactgcctcttcgacaacagccactgggcgggggatcagcaagtactaaggaaaaggaaaaccgaattgggtggcacattctcagtcgctagcttgatcatcttcactggattattaactgtattattgcagcctcttgtatcaagccatcaaaaggcgcagccttgagatgcatcgagtcaagccagcaaatgctccggacctgctgtctttcgtgaatgatctcgagttccacatctcaaccatctccagcatgtcctgcactcaagcggttgctcctttgacggtagcaatggggacaccagggttcatggacttcagggtggttcccctgtcaacactgttcacctacagttgcacaaacacgagccacgggccatccattacgctcaggtgcaatggatgccgggtccctccaagagatcactacgtgtcctggcaatttgttgacctgctggggcagccagcaactgctgttggtttccagttcaacctgaccgcaaggcaacatggcaacaatcagcacatgagctttgtgagtggtacaatgaactctgacggttatactgatgatgtcaagttgaagacgttcagggggagggattccaatgttctaaagatccagctgtttcctcagatatacaacaatcttggtaacctgcggctcttgcagccactggttcaagacttcactcaaggatctatgttttctgatgtcagcagcttgaattcctccctgcagaaccctagggatggagtggtgaatactactctctacataagttatctctcagactacattgtggagatcagcaatgagagtgtagtaggcccagttagtgtactcgcaagtattggtggcctttatgccttcagtgtggcaatttgtctctgcctcatgtctcaatgtgaagcaaggataaagaagcttcgtgacgaggataccagaatgctgaaaattctgagcaaacgacgtgctcagcggaattgggataagctgcggaagtttgtcatgtatacctggggtctaagcaacctagacccatctgatagaacctgtcagcagcctgaaggatcagtgatggattctcggcatatgagaagagaagcaattagacaaggaatctaagacgctaacagtactcatagagttcctgatgaaatggggggaaattgacatagaaagagctgcgagcatccaagcagttcaatatagccttgatcaagacttttagacgcaaagttgacatagccacttcgactcattcagatcccttcctgatatccttcatagatggaccttttgaaattttcccctctgcatagtcgtgttggtccctgaagatttgtcaatgcaaagagcaaaaaaaaaaaagtacagaggcagcagattgtccatgtcggttgcacctgaagctgcagagatagacttctggcatgttcctggtatagctcagctcattcgctagtcaccacccagttttattttctagttggcattacgctataaagtgactaacacgttgtaaacaaacggtacacacacaactagcatcctatcgtgccgtgaatttgcgatttggttactcagctggtgtttggtcaaaacgaatccaatactgacatggaagattacagtcgctaacccaacctgtgttcctatcctgaaacagagatcagttttaataaactggactccgccccctgcatgcatccattttatattgtcg

SEQ ID NO: 7621 - DNA, 2518 bp, Zea Mays
cgagcccgatcggcaaaagggcaactcgaacgttgatgttgtttccagttgagttggagcggagtgcgggcaggcaaaggccgcaggacacgccgaccagcagcttcttttccgccgcctcgcctcccacacttttccctctgctgtgctgggtgctccgctttgctctgcttgccgctctccgcctctccccgatctccactcgactcgtgttggcttggcttccacttccaactgactcgactggattcaagcgcccgacatccgcggagacttggccgcgagcctgcgttcgaatcctgaggacgagatcgccagagccgccgggaccgatcgagttccggctgccaatgccggctctgctcttgctgctcctgttggccgcggcgccggcgccggcgcgggcgggagacccgtactcctactacgactgggaggtctcctacatttcggcgcagcccctcggcgtcaagcagaaggtgattggcatcaacggccagttcccgggccctcccctgaacgtgaccaccaactggaacgtggtggtgaacgtccgcaacgcgctggacgagccgctgctgctcacctggaacggcgtgcagcagcgcaagacggcgtggcaggacggcgtgctcggcaccaactgcgccatccccgccgggtggaactggacctacacgttccaggtcaaggaccaggtcggcagcttcttctacttcccctccacgccgctgcaccgcgccgccgggggctacggcgccatcaccatcaacaaccgcgacgtcatacccatcccctttgcctttcccgacggggacatcacgctctttatcggtgactggtataaccgtgggcacagggagctcaggagcgcgctcgacgggggcaccctgctgggcgcccctgatggtgtgctcatcaatggattgggaccctatcagtacaacgaatccgtggttccaccagggattgtctatgagaggatcaatgtcgagccagggaaaacttacaggtttcgggtacacaatgttggggtctcaacaagcctcaatttcaggatccagaaccataacctgctccttgttgagacagaaggctcctacacctcgcagcagaactacaccaacctggacatccatgttggccagtcctactccttcttggtcaccatggaccagaatgccagcactgattactatgttgttgcaagcgcacgctttgttgatgcagctgttgtggataaattgaccggtgttgctattctccattactctaactcccagggtccagcctctggccctcttccagatcctccgaacgatcagtatgacacggcgttctctataaaccaagcaagatccatcagatggaatgttacagctagcggtgcccgcccaaatccacagggctcattccattatggtgacattactgtaacagatgtgttcctgttgcagagtagagcacctgagctcatagatggaaaactgcgttctactctcaatgagatttcttacattgcaccctcaacccctttggtgcttgcacaaatatttaatgtccccggagtcttcaaattggattttcctaatcatcctatgaaccgactaccaaaagttgacacatctattataaatggcacttataagggatttatggagattatattccaaaataatgccacaaatgttcagagctaccacttggatggctatgcattctttgttgttgggatggactatggtctatggacagaaaatagtcgcggtacttataacaaatgggatggtgttgcacgctctacaatccaggtattccctggagcttggacagctattcttgtgtttctggacaatgcaggcatatggaacttgcgtgttcagaaccttgacacctggtacttgggtcaagaagtgtacataaatgtggttaacccagaggacagcagcaccactcttccggataacgcaattttctgtggtgcactctcaagcctacagaaagaacaatcacatagattccaatactcaaaagctgccccagttccacaatggggagaaacaatttctctcctggttttgttggcatgctttgccctttggtcgctatgattcaacccccacctaagttgtctattgaggtcagtaggggggcactgctacaatggacatggaaggcagtgtggatgatgttagattattttctgaggactccgattcttgatttggttacgctcgtgtggtttgatgcaactcccaagagtgggagatttgcagaggtggagtaagttttgttttttcccctccagaagtgtaggtaaataatgcgcttggtgttgccgggttgagtgttgttaggactccgatctggatactagaagcttagaataccatattatcaaatcgagacagtaatgaacttttatattatattatccctatcctgatactataattgagttccatatgattccatgatattgtaatcttgatcctacataatataaatggctttcaaa

SEQ ID NO: 7622 - DNA, 1890 bp, Zea Mays
gtcccaccaacggcgtccaagccctagcctaacgatacttgcttcagcccagggctttcctccgaatccccttctcgtccaggcagttgttgcaaaaatcccgcctccctgattgcggttgttgcaaaaatcccgctacgctagtcgctaggctttcctcagcagcacttccgcgcttcgactcctggcagattggattgggtcgctgcttccaccagcaatccaattccggagatgactaccactcagttcgccatggttgaggagctggcctcgctcatcaaggacaacctgcacagcaagcacctgatcctctccaccgaggaagccctcatcgcagccctccagcagctgcactgccgcgacggcgaccgtgaagaggacgacgatgcggcggatacgatagagcttcagcctgctggggcctaccaccgccttctcttgcatcgccttgctgaaatctatgggttcgctcatgaatcggttggtgaaggcgaggatcgacatttagtcctccagtgctgccctgaaacagccatattttcaaaaacctcagaaggcagatgttgtcaaagatgtttctgttaaaaactcacatctgaaagataatacagacttgaaacctctgaagcagccagcagtacttccagcggcgtcattgaaggagagggaagctgcttatcgagctgctcgtgaacgaatcttctctggggatggtgccaagggaaatgatagatcatatgtgaaatgtagacaggttcctgtcgttgcaaaacggatgattgcccatgcactcggtcaaaaggttcaaaataccacagagacagccgcctccaaagaaagcaaagggaaacaactgtcgaatgggaaaactattccgacacatagcaggaacaacttctgcccagttacaccagataacatagaagcagttctaatggggatgccaagctcagctggtagtaactcgtatcaaactccaccaagccaaaggtgccacgcaactaatactagagctgttactgctgaaagcttgaagaaagagcagactggagcagctaagagaatgtttgcgcatgcactggggctgtctgcagctcgaggaagttgtggtacgctgcccaaaccgaagtaaagatctggagtcgagaacgcggataagtgaagaaggttggctgttgccgatgcaaggtccgactgagcttcatgtcctatcatatgtgagccatgggaatggaatgagcctgcaatggttggtgccatctactgatctacctctgcgaaacacgttttttgtgatgtgctagtagatgaaagggtttgttggttggatgttaattgttgggacccagagaggatctggtagccctggttcgaaacgcaacctcagtcggtgagagagcttgctggaatgctggatacgcatggacatggcatgccaagccaagtggatgttcttcaccagagtggaagcaaaatgatccttcacatgctctaggttgctgcaatgctgcatatgtttactctagcatgttgttaggctgtctccagcaaaacttgtatacaggcgtttaaaacactttttatactgtagacatgaggctttccatgcttacgtaagcatgaggcttttaataagtgttaattagagctccagcctcacgaattttgtagctgtctgtctctagctatagaaacttaagctgcgggtaggttgaaggcatttaattgatcctttctttttcttattttggattggattaattttaaggtttagtccatttcaattatcatgtgaacctgatgtactaactaaaacaggctcctgtttatctgttcatagacaacttctttgttgttttctggagaggatgaaccttgaagagcatc

SEQ ID NO: 7623 - DNA, 2505 bp, Zea Mays
cgaagatatatggtacccagaataagcatttgtcccaccaacggcgtccaagccctagcctaacgatacttgcttcagcccagggctttcctccgaatccccttctcgtccaggcagttgttgcaaaaatcccgcctccctgattgcggttgttgcaaaaatcccgctacgctagtcgctaggctttcctcagcagcacttccgcgcttcgactcctggcagattggattgggtcgctgcttccaccagcaatccaattccggagatgactaccactcagttcgccatggttgaggagctggcctcgctcatcaaggacaacctgcacagcaagcacctgatcctctccaccgaggaagccctcatcgcagccctccagcagctgcactgccgcgacggcgaccgtgaagaggacgacgatgcggcggatacgatagagcttcagcctgctggggcctaccaccgccttctcttgcatcgccttgctgaaatctatgggttcgctcatgaatcggttggtgaaggcgaggatcgacatttagtcctccagtgctgccctgaaacagccatgtatgttgccaagcttgcttccacccatctgtccttgttagtgatatgatatggaagtttgataacagtgacgatttggcgtccgttgtgctaaccagaaatgatataggtgagtcacttttctgcccatttgtataataaaagaggggtattttatctgccatatcatgtgcatagtgcatctagtatttggacttagtgtcataatctacctataaggagctgtagagaagccatatctttgcaatttgcaagcaagatttggcaataggagatgtaaaaaaactggttgtcggaataaatctacacccatgttcttgcagggtttacatgggtggttagccaatacatctgttattatctggttcatttgcaacatgtgtgtttttcattgtttgtatggacatatgttgatacttcacaggacatacttgttttgatgcctagctattgttgccccaaaaaaaactctgaatacatcatcgcgttgtaatgttattataaccactattatgcatattgctgtaaggtcccatgtagacatgtactcactcctgtgtaacaagttgtgattcttctatcagattttcaaaaacctcagaaggcagatgttgtcaaagatgtttctgttaaaaactcacatctgaaagataatacagacttgaaacctctgaagcagccagcagtacttccagcggcgtcattgaaggagagggaagctgcttatcgagctgctcgtgaacgaatcttctctggggatggtgccaagggaaatgatagatcatatgtgaaatgtagacaggttcctgtcgttgcaaaacggatgattgcccatgcactcggtcaaaaggttcaaaataccacagagacagccgcctccaaagaaagcaaagggaaacaactgtcgaatgggaaaactattccgacacatagcaggaacaacttctgcccagttacaccagataacatagaagcagttctaatggggatgccaagctcagctggtagtaactcgtatcaaactccaccaagccaaaggtgccacgcaactaatactagagctgttactgctgaaagcttgaagaaagagcagactggagcagctaagagaatgtttgcgcatgcactggggctgtctgcagctcgaggaagttgtggtacgctgcccaaaccgaagtaaagatctggagtcgagaacgcggataagtgaagaaggttggctgttgccgatgcaaggtccgactgagcttcatgtcctatcatatgtgagccatgggaatggaatgagcctgcaatggttggtgccatctactgatctacctctgcgaaacacgttttttgtgatgtgctagtagatgaaagggtttgttggttggatgttaattgttgggacccagagaggatctggtagccctggttcgaaacgcaacctcagtcggtgagagagcttgctggaatgctggatacgcatggacatggcatgccaagccaagtggatgttcttcaccagagtggaagcaaaatgatccttcacatgctctaggttgctgcaatgctgcatatgtttactctagcatgttgttaggctgtctccagcaaaacttgtatacaggcgtttaaaacactttttatactgtagacatgaggctttccatgcttacgtaagcatgaggcttttaataagtgttaattagagctccagcctcacgaattttgtagctgtctgtctctagctatagaaacttaagctgcgggtaggttgaaggcatttaattgatcctttctttttcttattttggattggattaattttaaggtttagtccatttcaattatcatgtgaacctgatgtactaactaaaacaggctcctgtttatctgttcatagacaacttctttgttgttttctggagaggatgaaccttgaagagcatc

SEQ ID NO: 7624 - DNA, 3186 bp, Zea Mays
cgccgccgccacccatccctgctatcgcaagaacggcagctcttttctcaccgctaggtacggtagtgctaaataaatgacagtgaggtaatcaagcaagaagcatatgtattgtgaggtatttttagctattgacaatttctcattaaaatattttagcgaacgaagatatatggtacccagaataagcatttgtcccaccaacggcgtccaagccctagcctaacgatacttgcttcagcccagggctttcctccgaatccccttctcgtccaggcagttgttgcaaaaatcccgcctccctgattgcggttgttgcaaaaatcccgctacgctagtcgctaggctttcctcagcagcacttccgcgcttcgactcctggcagattggattgggtcgctgcttccaccagcaatccaattccggagatgactaccactcagttcgccatggttgaggagctggcctcgctcatcaaggacaacctgcacagcaagcacctgatcctctccaccgaggaagccctcatcgcagccctccagcagctgcactgccgcgacggcgaccgtgaagaggacgacgatgcggcggatacgatagagcttcagcctgctggggcctaccaccgccttctcttgcatcgccttgctgaaatctatgggttcgctcatgaatcggttggtgaaggcgaggatcgacatttagtcctccagtgctgccctgaaacagccatgtatgttgccaagcttgcttccagtaaaatctcttgacttgttgcctgtcatctctatgcctttgcttttctgttctctagattatgttctaacattagatcagaatccccactgtaccacaatattagtatgtttcaagtatatctttcaaccagcatttgatgcttgcatgaatgcaggagaaacaaagttacagccaattcagttaaacactcaagacacaactttctaatagtgtttcaatatatgtaatccgctgtagtaccagttgcaccctaactcattttgtgttctataatttggatctatgcatgttcttttgggtaccatactattgtgagcttcaactgcaccatgtatccttagcatcttacatgttgctttcttcatgtttgatgtaccttttgttgctgctctcacctgctctgttctttctacattatatttatctcaaaagctatgctatatcttattgattgagtaaatacgtagctgttgtgttttcccgttaggttgaattagtcatctcgtttgttgcagcccatctgtccttgttagtgatatgatatggaagtttgataacagtgacgatttggcgtccgttgtgctaaccagaaatgatataggtgagtcacttttctgcccatttgtataataaaagaggggtattttatctgccatatcatgtgcatagtgcatctagtatttggacttagtgtcataatctacctataaggagctgtagagaagccatatctttgcaatttgcaagcaagatttggcaataggagatgtaaaaaaactggttgtcggaataaatctacacccatgttcttgcagggtttacatgggtggttagccaatacatctgttattatctggttcatttgcaacatgtgtgtttttcattgtttgtatggacatatgttgatacttcacaggacatacttgttttgatgcctagctattgttgccccaaaaaaaactctgaatacatcatcgcgttgtaatgttattataaccactattatgcatattgctgtaaggtcccatgtagacatgtactcactcctgtgtaacaagttgtgattcttctatcagattttcaaaaacctcagaaggcagatgttgtcaaagatgtttctgttaaaaactcacatctgaaagataatacagacttgaaacctctgaagcagccagcagtacttccagcggcgtcattgaaggagagggaagctgcttatcgagctgctcgtgaacgaatcttctctggggatggtgccaagggaaatgatagatcatatgtgaaatgtagacaggttcctgtcgttgcaaaacggatgattgcccatgcactcggtcaaaaggttcaaaataccacagagacagccgcctccaaagaaagcaaagggaaacaactgtcgaatgggaaaactattccgacacatagcaggaacaacttctgcccagttacaccagataacatagaagcagttctaatggggatgccaagctcagctggtagtaactcgtatcaaactccaccaagccaaaggtgccacgcaactaatactagagctgttactgctgaaagcttgaagaaagagcagactggagcagctaagagaatgtttgcgcatgcactggggctgtctgcagctcgaggaagttgtggtacgctgcccaaaccgaagtaaagatctggagtcgagaacgcggataagtgaagaaggttggctgttgccgatgcaaggtccgactgagcttcatgtcctatcatatgtgagccatgggaatggaatgagcctgcaatggttggtgccatctactgatctacctctgcgaaacacgttttttgtgatgtgctagtagatgaaagggtttgttggttggatgttaattgttgggacccagagaggatctggtagccctggttcgaaacgcaacctcagtcggtgagagagcttgctggaatgctggatacgcatggacatggcatgccaagccaagtggatgttcttcaccagagtggaagcaaaatgatccttcacatgctctaggttgctgcaatgctgcatatgtttactctagcatgttgttaggctgtctccagcaaaacttgtatacaggcgtttaaaacactttttatactgtagacatgaggctttccatgcttacgtaagcatgaggcttttaataagtgttaattagagctccagcctcacgaattttgtagctgtctgtctctagctatagaaacttaagctgcgggtaggttgaaggcatttaattgatcctttctttttcttattttggattggattaattttaaggtttagtccatttcaattatcatgtgaacctgatgtactaactaaaacaggctcctgtttatctgttcatagacaacttctttgttgttttctggagaggatgaaccttgaagagcatc

SEQ ID NO: 7625 - DNA, 2673 bp, Zea Mays
ccccttcccacatcccaatcgttgtgcacgccgccgccacccatccctgctatcgcaagaacggcagctcttttctcaccgctaggtacggtagtgctaaataaatgacagtgaggtaatcaagcaagaagcatatgtattgtgaggtatttttagctattgacaatttctcattaaaatattttagcgaacgaagatatatggtacccagaataagcatttgtcccaccaacggcgtccaagccctagcctaacgatacttgcttcagcccagggctttcctccgaatccccttctcgtccaggcagttgttgcaaaaatcccgcctccctgattgcggttgttgcaaaaatcccgctacgctagtcgctaggctttcctcagcagcacttccgcgcttcgactcctggcagattggattgggtcgctgcttccaccagcaatccaattccggagatgactaccactcagttcgccatggttgaggagctggcctcgctcatcaaggacaacctgcacagcaagcacctgatcctctccaccgaggaagccctcatcgcagccctccagcagctgcactgccgcgacggcgaccgtgaagaggacgacgatgcggcggatacgatagagcttcagcctgctggggcctaccaccgccttctcttgcatcgccttgctgaaatctatgggttcgctcatgaatcggttggtgaaggcgaggatcgacatttagtcctccagtgctgccctgaaacagccatcccatctgtccttgttagtgatatgatatggaagtttgataacagtgacgatttggcgtccgttgtgctaaccagaaatgatataggtgagtcacttttctgcccatttgtataataaaagaggggtattttatctgccatatcatgtgcatagtgcatctagtatttggacttagtgtcataatctacctataaggagctgtagagaagccatatctttgcaatttgcaagcaagatttggcaataggagatgtaaaaaaactggttgtcggaataaatctacacccatgttcttgcagggtttacatgggtggttagccaatacatctgttattatctggttcatttgcaacatgtgtgtttttcattgtttgtatggacatatgttgatacttcacaggacatacttgttttgatgcctagctattgttgccccaaaaaaaactctgaatacatcatcgcgttgtaatgttattataaccactattatgcatattgctgtaaggtcccatgtagacatgtactcactcctgtgtaacaagttgtgattcttctatcagattttcaaaaacctcagaaggcagatgttgtcaaagatgtttctgttaaaaactcacatctgaaagataatacagacttgaaacctctgaagcagccagcagtacttccagcggcgtcattgaaggagagggaagctgcttatcgagctgctcgtgaacgaatcttctctggggatggtgccaagggaaatgatagatcatatgtgaaatgtagacaggttcctgtcgttgcaaaacggatgattgcccatgcactcggtcaaaaggttcaaaataccacagagacagccgcctccaaagaaagcaaagggaaacaactgtcgaatgggaaaactattccgacacatagcaggaacaacttctgcccagttacaccagataacatagaagcagttctaatggggatgccaagctcagctggtagtaactcgtatcaaactccaccaagccaaaggtgccacgcaactaatactagagctgttactgctgaaagcttgaagaaagagcagactggagcagctaagagaatgtttgcgcatgcactggggctgtctgcagctcgaggaagttgtggtacgctgcccaaaccgaagtaaagatctggagtcgagaacgcggataagtgaagaaggttggctgttgccgatgcaaggtccgactgagcttcatgtcctatcatatgtgagccatgggaatggaatgagcctgcaatggttggtgccatctactgatctacctctgcgaaacacgttttttgtgatgtgctagtagatgaaagggtttgttggttggatgttaattgttgggacccagagaggatctggtagccctggttcgaaacgcaacctcagtcggtgagagagcttgctggaatgctggatacgcatggacatggcatgccaagccaagtggatgttcttcaccagagtggaagcaaaatgatccttcacatgctctaggttgctgcaatgctgcatatgtttactctagcatgttgttaggctgtctccagcaaaacttgtatacaggcgtttaaaacactttttatactgtagacatgaggctttccatgcttacgtaagcatgaggcttttaataagtgttaattagagctccagcctcacgaattttgtagctgtctgtctctagctatagaaacttaagctgcgggtaggttgaaggcatttaattgatcctttctttttcttattttggattggattaattttaaggtttagtccatttcaattatcatgtgaacctgatgtactaactaaaacaggctcctgtttatctgttcatagacaacttctttgttgttttctggagaggatgaaccttgaagagcatc

SEQ ID NO: 7626 - DNA, 3703 bp, Zea Mays
cttctttcccttctctctccccgccgcctcctcccctcactcacgttgccaccgtcaacttcttccctcgtgtcgctatcgtcgttgttgattcctttccttctcaagattgtagcgttagtatggactatatgttagtgtgaaatacatccgacgtggttttatgataatttcttgttaaaagtcacagaaaagttaaaaaagtcagtggagaaaagaagaaaatgatttagcggcagggcagctgcctctcctctccccaatcaccgacaccgcgcgcgagatcgcaagcgtccacaccgtgaccaccggcgccgctgcggcgtccggagcaggcggcgagcgtcgtccacagggtaggctcggctcgctgaggcggacgagatgagcgggcacgactccaagtacttctctaccaccaagaagggggagatccccgagctcaaggaggagctcaactcccagtataaggacaagagaaaagatgctgtcaagaaagtgattgctgctatgactgtaggaaaggatgtctcatcattgttcactgatgttgtgaactgcatgcagactgagaacttggagctcaagaaactagtatatttgtatctcatcaactatgctaaaagtcaacctgatcttgccattcttgctgtgaacacatttgttaaggtaagaaagtctagccatatttgcaattatcacatttgttaaggtaagaaagtctagccatacttgcaattatcatttgtgcagaaaaagatgattactgtatgcaaaatatagggttgtatttatatctaacggtccaagagacctgcttgcacctaatggctgcttgcatagtagtcgttgccaaatataagaactatagatataatcagaggcatgaatattctgcaggattcacaagacccaaacccattgattcgtgctttggctgttaggacaatgggttgtatccgcgtggacaaaatcacagagtatctctgtgatccacttcaaagatgcctcaaggatgacgatccgtatgtacggaagactgcagctatttgcgttgctaaactttatgatataaacgctgagctagtagaggacagaggatttctggaggcccttaaggacttaatatctgacaataatcctatggttgttgcaaatgctgttgctgctctggcagagattcaagatagtagtgttcagccaatctttgaaatcaccagccatacactgtcaaagcttctgacagctttgaatgaatgcacagagtggggccaagttttcattttggattctttgtcaagatataaagcagcagatgccagggaagctgaaaacatagtggaacgagttacaccccgtctccaacatgcaaattgtgcggttgttctttctgctgtcaagataatccttctacaaatggagctcattacgagcacggatgtagtcaggaatctctgcaagaaaatggctccccctcttgttactcttttgtcagcagagcctgaaattcagtatgtagccttgaggaacattaatctgatagttcaaaagaggcctacaatactcgctcatgagattaaggttttcttttgcaagtacaatgaccctatatatgttaagatggaaaagctggagattatgataaagcttgcctcagatcgaaatatagatcaggtgctcttggaattcaaggagtatgccacagaggttgatgttgattttgtgcggaaagctgttcgtgcgattgggagatgtgcaattaaattggagagagctgctgaaaggtgcatcagcgttttgctcgagctgattaagataaaagttaattatgttgttcaggaagctataattgttatcaaagacatcttcagacgctaccctaatacgtatgagtctatcattgctacactttgtgaaagtctggacactttagatgaaccagaggctaaggcatccatgatttggataattggagaatatgctgaaagaattgacaatgcagatgaacttcttgagagcttcttggaaacattccctgaagaaccagcattagttcaactgcagctgctaaccgctactgttaaattgtttcttaagaagccaacagaggggccacaacagatgattcaggctgttctcaataatgcaacagttgaaacagataatcctgatttgagggacagagcttacatatattggcgacttctgtctactgatcctgaggctgcgaaagatgttgttttggcggagaaacctgtgatcagtgatgactccaaccagcttgactcatcacttcttgatgagctgctagcaaacatttctaccctttcatcagtttatcataagcccccagaatcatttgtcagccgtgttaaggctgctcctagggccgatgatgaagagtttgctgatacagctgaaacagggtactcggagtccccatcccagggtgttgatggggcatcaccttcatctagtgctggtacttcttctaatgtacccgtgaagcagctggcggttgcatccccacctgcaatgccagaccttttaggtgatttgatgggtatagataatgctattgttcctgttgatgaacctgcagcaccttccggccctccactacctgtcttactgccttcgactacaggtcaaggactgcaaattagtgcacaactaacacggcgtgatggccagatatactatgacatatcttttgagaatggcacccaaggtgtcctagatggatttatgattcagtttaacaagaacacatttggtcttgctgctggtgaagcacttcaggttactccactgcaaccaggccaatcaacaaggacacttttacaaatgaccccgttccagaatatcagccctggtgcaccaaactcgctactacaggttgctgtgaaaaataatcagcagccagtgtggtacttcaatgacaaaattccgctgcatgttttctttggtgaagatggaaaaatggaacgagctggttttcttgaggcctggaaatctttgcctgatgacaatgaatttacaaaagaattcccgggctctgtcatcagcagcatagatgctactgttgagcgcctcgtagcatcaaatgtgttcttcatagccaagcggaaaaatgcgaacatggatgttctgtatctctccgcgaagatgccccgtggaatccccttccttatagaggttacagccgtggttggtgttcctggtgtgaagtgtgcagtcaaaacaccaaatagggagatggttcctctcttctttgaagctatggaggctctcaccaagtgacgacaaacttaatggatctggatcggtggttctacaaaaaaaataccagtcgatgagctgctataggtgtttggacgtggcattttatttttcacggaagctggtgtgaattgtagtttttttggtattagattacagtatttaaactgctagtttcctggttccaaagttttttcaccagaaatactggaggtgttcatgccttgcatgatttgtacatcttaccatgttgtatgaagcgatgaaattgtaggtgacgaaaaagtagaataagcatagattaactggtacgattgtggattgttattaatttccctgcaacccaatcactattttaatggtgatgtatctatatttttcaaatggaccacaattctatctaattactacatcaaaccta

SEQ ID NO: 7627 - DNA, 2964 bp, Zea Mays
atggacgccgtcgcccaccgcctgggcgcatgcctgccccgcgtcccggttgcatgggccgacatggctccgcccccatcgcagacacatggaaaggacggcggagccgcggaggggccaaggagcggactgtcgtccttcacctggcgaatggtgacctacgacctccgtctccggctgccgtcctccggctccggctgccgtcctctgccatggtccatggaccgtagtccggcagcagcagggctccagcctctgcccaaccgcttgcccgccaccggcttccggcctcagcccgccaccggcgtctgccacctccgcatccggcctctgggcaccagtgtcccgtctctgcccccgacgttcatcgtccggtctccgacaccaggccctcagctacagcagtacagcaccagttcccgcaacagcgaggaggagccatctcctccaaatccacagccaatttattgcccgccaggtgttcgaccaaagtcccgcgtcgtggcgcgccttcctcaaggcctactcccacggtcctttcccctggaagctctgcacctcttcaagcacgcgcgccagcacctggctgatgacacatttgtcttcaagttcgtgctcaaggcttgtgcgggtctggggtggcatcgagctggtgcacagctccatgcgctcgttgtccagaaggggttcgagttccatgcctatgtgcacatcgcccttatcaatgtgtatgtcatgtccaggtgcttggtggaagcacgcaaggtgttcgatgaaatgccagtgaagaatgtagtttcgtggaatgtgatgatcactggctttgctggatgggatgaggttgagtatgcgaggcttctgtttgatcagatgccctgcagaaatgttgtctcatggactgggctgattgatggatatacacatgcttgtctttatgcagaggctcttactcttctccgccacatgatggcaggaggcattagcccgagtgagataattgttttagcagttattcctgcgatatctaatcttggagggatcgttatgggtgagatgctgaatggctattgtgagaagaagggtatcatgtcagatgtccgggttgggaattcactcatagacttgtatgctaagattggctctgtgcaaaactcgctaaaggtgtttgatgaaatgctggatagaagaaatttggtgtcatggacatcaataatttctggttttgcaatgcatgggctgtcagttgaggcacttgagttgtttgcagagatgagaagagcagggattaagcccaacagaatcaccttcttgagtgtcatcaatgtctgcagtcatgggggtctggtacagcaagggttagcatttttcaaaagcatggtttatgagtacaatatagatccagagatcaagcattttgggtacatcatagacatgctaggtagggctggacgtttgtgtgaggctgagcaaataatagaagggttgcctatggaggttaatgtaactgtatggaggatactgttaggttgtttcagtaagtatggagaagttgagatgggggagagggcaataaagatgatatcagacttagaaagagaatctggaggtgattttctgcagggctatgaaaacatgcgacacggaatagtagaaactcaccccaagcagcaagcacccgagcggccagctccagccccaccagagaaatacggcgtaaacgccgccggggaccaacccaggcgaccggggtgcctagctcgccgtttcttttcgccttctcctcgcaatttcttaggatcaacgccctactacacgacgggggttttccccttcggccgccactccgtcctttcgcagcctgccgccggcgccatgctgtacatcgtgggcctcggcctgggcgacgagcgcgacatcactgtgcgggggctcgatgccgtacgcagctgctccaagatatacatggaggcatacacatccctcctttccctcggcctcgacccggccgcgctcgccaacctgctgtacgggaaggagataacggtcgccgatcgggagatggtggaggagcgtgtcgaccaggtgctaagcgaggctgccgacactgacgtcgccttccttgttgttggcgacccgttcggggcaactacacatactgatctggttgttcgtgccaagaaaatgggagtagaagtgaaggtgatccacaatgcatctgtcatgaatgcaattggagtttgtgggctacaactttaccgctatggagaaactatctcaataccattcttcacagacgaatggagaccagatagtttctatgagaagattcagaacaatcgccagcttgggctacacacactttgcctgcttgatatccgtgtcaaggagccaacatgggaatctttagccagaggaaagaaagtctatgaaccaccaagattcatgactgtaaacactgcaataagtcagctttttgaggtggaggaagcacgtgggggatatgcatatcgcagggaaacattgtgcataggagtggcacgacttggaagtgatgatcagaagattgttgctgggcctatggagaagctactagatgttgattttgggccaccccttcactgcctgatcatagtgggagagactcatcctttggaagaagagatgctagagttttacatgatcaagtagtgatatacacaccctacacatgtgagttttcacttgtattgactaagggaatgcttagacttctgtccttgtcaatattggattgttgaatacttagccatttggatgtagaaccccaggaaatggtgcagtatgtgatttggagtgctggcagcttgtaaaacaaatctgtgctagcagtctaccattagtttacatctccgaatcttgtttgaaacttgcatgtgaacgcaggcctctgtctcaaaatataatttgttttagattaaacctaca

SEQ ID NO: 7628 - DNA, 3196 bp, Zea Mays
atggacgccgtcgcccaccgcctgggcgcatgcctgccccgcgtcccggttgcatgggccgacatggctccgcccccatcgcagacacatggaaaggacggcggagccgcggaggggccaaggagcggactgtcgtccttcacctggcgaatggtgacctacgacctccgtctccggctgccgtcctccggctccggctgccgtcctctgccatggtccatggaccgtagtccggcagcagcagggctccagcctctgcccaaccgcttgcccgccaccggcttccggcctcagcccgccaccggcgtctgccacctccgcatccggcctctgggcaccagtgtcccgtctctgcccccgacgttcatcgtccggtctccgacaccaggccctcagctacagcagtacagcaccagttcccgcaacagcgaggaggagccatctcctccaaatccacagccaatttattgcccgccaggtgttcgaccaaagtcccgcgtcgtggcgcgccttcctcaaggcctactcccacggtcctttcccctggaagctctgcacctcttcaagcacgcgcgccagcacctggctgatgacacatttgtcttcaagttcgtgctcaaggcttgtgcgggtctggggtggcatcgagctggtgcacagctccatgcgctcgttgtccagaaggggttcgagttccatgcctatgtgcacatcgcccttatcaatgtgtatgtcatgtccaggtgcttggtggaagcacgcaaggtgttcgatgaaatgccagtgaagaatgtagtttcgtggaatgtgatgatcactggctttgctggatgggatgaggttgagtatgcgaggcttctgtttgatcagatgccctgcagaaatgttgtctcatggactgggctgattgatggatatacacatgcttgtctttatgcagaggctcttactcttctccgccacatgatggcaggaggcattagcccgagtgagataattgttttagcagttattcctgcgatatctaatcttggagggatcgttatgggtgagatgctgaatggctattgtgagaagaagggtatcatgtcagatgtccgggttgggaattcactcatagacttgtatgctaagattggctctgtgcaaaactcgctaaaggtgtttgatgaaatgctggatagaagaaatttggtgtcatggacatcaataatttctggttttgcaatgcatgggctgtcagttgaggcacttgagttgtttgcagagatgagaagagcagggattaagcccaacagaatcaccttcttgagtgtcatcaatgtctgcagtcatgggggtctggtacagcaagggttagcatttttcaaaagcatggtttatgagtacaatatagatccagagatcaagcattttgggtacatcatagacatgctaggtagggctggacgtttgtgtgaggctgagcaaataatagaagggttgcctatggaggttaatgtaactgtatggaggatactgttaggttgtttcagtaagtatggagaagttgagatgggggagagggcaataaagatgatatcagacttagaaagagaatctggaggtgattttctgcagggctatgaaaacatgcgacacggaatagtagaaactcaccccaagcagcaagcacccgagcggccagctccagccccaccagagaaatacggcgtaaacgccgccggggaccaacccaggcgaccggggtgcctagctcgccgtttcttttcgccttctcctcgcaatttcttaggatcaacgccctactacacgacgggggttttccccttcggccgccactccgtcctttcgcagcctgccgccggcgccatgctgtacatcgtgggcctcggcctgggcgacgagcgcgacatcactgtgcgggggctcgatgccgtacgcagctgctccaagatatacatggaggcatacacatccctcctttccctcggcctcgacccggccgcgctcgccaacctggagaagctgtacgggaaggagataacggtcgccgatcgggagatggtggaggagcgtgtcgaccaggtgctaagcgaggctgccgacactgacgtcgccttccttgttgttggcgacccgttcggggcaactacacatactgatctggttgttcgtgccaagaaaatgggagtagaagtgaaggtgatccacaatgcatctgtcatgaatgcaattggagtttgtgggctacaactttaccgctatggagaaactatctcaataccattcttcacagacgaatggagaccagatagtttctatgagaagattcagaacaatcgccagcttgggctacacacactttgcctgcttgatatccgtgtcaaggagccaacatgggaatctttagccagaggaaagaaagtctatgaaccaccaagattcatgactgtaaacactgcaataagtcagctttttgaggtggaggaagcacgtgggggatatggtatttaaacttcttttgaggagctgtctttctttttaaaaaatcattttgtatcaaacaatagcttcttatgcttatcgaagttagaattgttttaaaaaacaattcatgattcttgctcataccatagatattgttaggtttttccttcattgttccaggtgcttcatatatccaaccatctagtattaccgtggtatcaaatttaaagatcattttcttccagcatatcgcagggaaacattgtgcataggagtggcacgacttggaagtgatgatcagaagattgttgctgggcctatggagaagctactagatgttgattttgggccaccccttcactgcctgatcatagtgggagagactcatcctttggaagaagagatgctagagttttacatgatcaagtagtgatatacacaccctacacatgtgagttttcacttgtattgactaagggaatgcttagacttctgtccttgtcaatattggattgttgaatacttagccatttggatgtagaaccccaggaaatggtgcagtatgtgatttggagtgctggcagcttgtaaaacaaatctgtgctagcagtctaccattagtttacatctccgaatcttgtttgaaacttgcatgtgaacgcaggcctctgtctcaaaatataatttgttttagattaaacctaca

SEQ ID NO: 7629 - DNA, 1055 bp, Zea Mays
agaatagaaccgctgtgtgcaagctccggaccgtcaggataagaaaacagcgcggcggcaggcagctcctcctgcgactgcgagcgcccgtccatggcgtccatctccccttccctccatcacccttgcaattctagaactggcttccttggaaagacacacgggactcgtcctcgtcttttctctgctggaagagttggatttgtcagaacactagtggagtgcaaggaatctagaattggaaagcagcccattgaagtcccaccgaatgttactctcacattagaagagcagtttgtcaaagctaagggcccactaggggaattatctctcagcttcccaggtgatgtgaagattgtgaaagaagaatccggtaacctgagagtttataagactgcagagaccaagcgggcgaaccagatgcacggtcttttcagggacttcttctccgccgaaggtcctctaagcaaaaacaccttcggcaaggccatatgcaagcaggcacaacacgaagaacattgacagacaacatcatcgttggtgtgtcgaaaggattcgataagaagcttcagctagtgggcgtcgggtatcgtgcggcggtggagggcaacgatctcgtgatgaacctgggattctcccaccctgttcggatggccattcctgaaggcctggcggtcaaggtggaggagaacacaaggatcaccgtgagcggctatgacaagagcgcgatcggtcagtttgctgctaccataaagaagtggaggccacctgagccatacaagggaaagggtatcagatatatggatgaagttgtccgaaggaaggaaggaaaagccggaaagaagaaatagaaagtgtttttttgccctctccttacttcatttcatttttcccactgtaatgatcttcgtttgctaaggctgaacctaagaaatatattgttctgtgctgatcatggcatatagatgtatactttgagcaccccattgtttcataatttcattgtttttcaaggtatttattctgctccattgaaaaagcgaaatgaatatcag

SEQ ID NO: 7630 - DNA, 940 bp, Zea Mays
agaatagaaccgctgtgtgcaagctccggaccgtcaggataagaaaacagcgcggcggcaggcagctcctcctgcgactgcgagcgcccgtccatggcgtccatctccccttccctccatcacccttgcaattctagaactggcttccttggaaagacacacgggactcgtcctcgtcttttctctgctggaagagttggatttgtcagaacactagtggagtgcaaggaatctagaattggaaagcagcccattgaagtcccaccgaatgttactctcacattagaagagcagtttgtcaaagctaagggcccactaggggaattatctctcagcttcccaggtgatgtgaagattgtgaaagaagaatccggtaacctgagagtttataagactgcagagaccaagcgggcgaaccagatgcacggtcttttcaggattcgataagaagcttcagctagtgggcgtcgggtatcgtgcggcggtggagggcaacgatctcgtgatgaacctgggattctcccaccctgttcggatggccattcctgaaggcctggcggtcaaggtggaggagaacacaaggatcaccgtgagcggctatgacaagagcgcgatcggtcagtttgctgctaccataaagaagtggaggccacctgagccatacaagggaaagggtatcagatatatggatgaagttgtccgaaggaaggaaggaaaagccggaaagaagaaatagaaagtgtttttttgccctctccttacttcatttcatttttcccactgtaatgatcttcgtttgctaaggctgaacctaagaaatatattgttctgtgctgatcatggcatatagatgtatactttgagcaccccattgtttcataatttcattgtttttcaaggtatttattctgctccattgaaaaagcgaaatgaatatcag

SEQ ID NO: 7631 - DNA, 1800 bp, Zea Mays
agaatagaaccgctgtgtgcaagctccggaccgtcaggataagaaaacagcgcggcggcaggcagctcctcctgcgactgcgagcgcccgtccatggcgtccatctccccttccctccatcacccttgcaattctagaactggcttccttggaaagacacacgggactcgtcctcgtcttttctctgctggaagagttggatttgtcagaacactagtggagtgcaaggaatctagaattggaaagcagcccattgaagtcccaccgaatgttactctcacattagaagagcagtttgtcaaagctaagggcccactaggggaattatctctcagcttcccaggtgatgtgaagattgtgaaagaagaatccggtaacctgagagtttataagactgcagagaccaagcgggcgaaccagatgcacggtcttttcaggtagacaattggaaactgtaatatgattttgcccatattagtttttactgatttacttctcataatgtgattcactgtttcactgcctttattccttgttgtgtatgccttctcctgatattcctaaaagcaactcgctaacttctgaactgtctgcttcttgccaaaactcttatatttgtgtcactttgtacaatcaagagcagtattgattcccatgggtatttcactgcgatagtaccagtgccttgaataagccgtatcacacatgttattttcatatgtgagtagataaactgtcctgtgatcctgctacctcttacaacgactaggattgagattttagatagcattgctctgcttcatgtgtctattttttcctctggcctcttgtctcaccaatgaccagtaaatatgatggacttatttttgtttgagacctgcgaaacaacactttctgccattttgtgttcaatccaccaatcaatctgcattgatataaaataaccacagttctagtagggctgacaaagatttgcaaaatgaatgccaatcttattgcattttccatcctttgtccagtattggtaccaaggaaataggctatgctatatcttgtttctggagtccaggaacaggaactgtaaaatctgtgttatctataacaaacataatcaagtgtcttgatcacttcctcacttcctctgttatttattgtggaactattgggaataatactgttgagggacttcttctccgccgaaggtcctctaagcaaaaacaccttcggcaaggccatatgcaagcaggcacaacacgaagaacattgacagacaacatcatcgttggtgtgtcgaaaggattcgataagaagcttcagctagtgggcgtcgggtatcgtgcggcggtggagggcaacgatctcgtgatgaacctgggattctcccaccctgttcggatggccattcctgaaggcctggcggtcaaggtggaggagaacacaaggatcaccgtgagcggctatgacaagagcgcgatcggtcagtttgctgctaccataaagaagtggaggccacctgagccatacaagggaaagggtatcagatatatggatgaagttgtccgaaggaaggaaggaaaagccggaaagaagaaatagaaagtgtttttttgccctctccttacttcatttcatttttcccactgtaatgatcttcgtttgctaaggctgaacctaagaaatatattgttctgtgctgatcatggcatatagatgtatactttgagcaccccattgtttcataatttcattgtttttcaaggtatttattctgctccattgaaaaagcgaaatgaatatcag

SEQ ID NO: 7632 - DNA, 1497 bp, Zea Mays
gaaaacaaagcacgaccagaaccgcagaggggggacacccggactcagagagagagagaggggcattcgcccgttcgaattctctcgcctcggcctcctcctcacctgcctgctcggctgctcgccagaccaaccacagccgtcggcgctgcagaccgcggcgggcaggatcagcggaccatataattccaagaccctgatgatggccacaactgcttatatcgatgattcctgttcggaggttattgatcccccgaagactgaggtgctggatgttgctgaactccctggtgaccatactcagaacccaccaaaaccgaatgttgtggtgtctagcagtgtgcgtgaacttctggaatgtccagtctgtttgagtgccatgtatcctcctattcatcagtgctctaatggtcatacattgtgttccggatgcaaaccaagggttcataaccgttgtccaacttgtaggcatgaactgggtaacataaggtgtcttgctcttgagaaggtggctgcatctcttgaacttccatgcaagtaccagtgctttgggtgcccaggcatttatccttactacagcaagctgaagcatgagtcgcagtgccaatatagaccttatagttgtccatatgctggatctgaatgcacagttgctggtgacatcccatatttggtgaatcacttgaaagatgaccacaaagttgacatgcacaatggctgtaccttcaatcatcgctatgtaaagccaaaccctcatgaagttgagaatgccacatggatgcttacggtattcagctgctttggccagtacttctgcctacacttcgaggccttccagctgggcatgtcacccgtctacatcgccttcctgaggttcatgggagacgacgcggaagcgaagaactacagctacagcctggaggtagggggcacggggcgcaagatggtctggcagggggtgccgcggagcatcagggacagccaccggaaggtccgggacagctacgacgggctcatcatccagaggaacatggccctgttcttctcgggtggcgacaggaaggagctcaagctgcgtgtcaccgggcggatctggaaggaacaatgagcttgatgggtcagctagtacgtctgtcccgctccgctgctgccctgaactcatgaatcgcatcgcaaagagcttttgccagtcgtaggaatgggcgactctgtggttcgttctgtgttttcagcttcttctcgcttgctattgtcttcatggttcctgcagggtaggtaggtgctgttggatgtgtagatcatgtagaggttggaggttgctaccgatgcagaattcgtggagatttcctattttattgaactgtctttagagcagcttcaagagatgagctattagtgttgtcgagtaaaaaatttggatgcccttcccgcgcggaagcatctttattcccgcacgtagccaatatcggtgctgcgagtagagatggcaacggctat

SEQ ID NO: 7633 - DNA, 877 bp, Zea Mays
ggaatcctcgcccaaaatccatagctgtcgcaccaccttccatccttggcagttggcacccccttcggcagcgccccccttctagcccccttccaactttgacgcccgcgtcagacggacaacgcacgatgcaagcccgagacccctccctccccacgccgccacccaccatgccctctccctcccctcacagccgtccctctccccaccccctggccccaccgcactaaacagcagcgacacacccgtccctaccccaaggaatcaagaggtcaatccccctgtgcttcgaccattctggaccgtatgagtaaagattccattgcgaaggaggtggcggaggcgcaatcggtactaacagtggacgccgtgtctgctgtattgtcaaggtaatttttcaataacacatcgggagattattttatgatggcatgtggtgcatggtcaaacggaaacttttcatgcaaaacaaggagcggctcgttcatgtcctgaaggggattacggtcggaatagagaagtgccaagcgacaccactatctcaggaagtgttgattgtatggggagaccacaaccagttgttcctggtggaggcgtttgcagttcataggactctgaattggagcgctagactggaggtcatatagaagacaagccatgttcctcagctggaggattcgacttgcttcaacaaggtcatcctggactttctcaaaaagcctaatctgtcggttaatggtagctcgcaataaggacaaaggtctcgtcggagataaggagaggatctgcatttgacaccaatatgcggaacctcgtgcccctgcctcttttggctcctccttctgccctgtccgagcgatggtgcccagaaacaaag

SEQ ID NO: 7634 - DNA, 1812 bp, Zea Mays
ggaatcctcgcccaaaatccatagctgtcgcaccaccttccatccttggcagttggcacccccttcggcagcgccccccttctagcccccttccaactttgacgcccgcgtcagacggacaacgcacgatgcaagcccgagacccctccctccccacgccgccacccaccatgccctctccctcccctcacagccgtccctctccccaccccctggccccaccgcactaaacagcagcgacacacccgtccctaccccaaggaatcaagaggtcaatccccctgtgcttcgaccattctggaccgtatgagtaaagattccattgcgaaggaggtggcggaggcgcaatcggtactaacagtggacgccgtgtctgctgtattgtcaagttagctgctctctcgtgccctctgcaatgtttccctacctctttgttgtacgtgcctttgtagccctatgtactgccatgaaatgttgggctcgtcgtcgttgtagacatcgtgtgtggttttttgtgtgtttggaatcatctctggtgttcttcttgattcatgccccctgactgctttgtctggcagacgacaagcagggatggtgccttatcttctttacagcctaacgaatgatggttttgaggtcattgtctaattaggtttaatcttggactaatccagtaatatttgtttgccattgttgaatcgaatactgctctttccattccccatcgtttggtgtgtttagactgtatgtgttgggtgaatggtgcccaaagtttatgagacatggaatgagtacaaataatctggttgttgttttttccagggtaatttttcaataacacatcgggagattattttatgatggcatgtggtgcatggtcaaacgggtaatgcatggtgcagattccatcgggagttccacatctatgtgtgcaatctttttgacacaagacgtgtatatgtaaattaggtccaataataccatgattcagatttagttgtgtcaaggcgtttaggaaaaaaatgtccctgctcatccataggaccaaaaatcgtttccaggatactatttcgctttggttagatagctggtccatgtaatcttccttttcctttacctccttttccttgtccatgtttgtaaatactttcctttatttataatttaacctggtaggggtctatcttttatgcctaaacttgacacttccttcagttttaactgttttttaatcgaagtaaccccatttccattcacagaacggaaatacaagtgagaaagatattacatactaatttaaagtttcatgttcatcgcctcctgaaatgctgccatagatgttgcttgtccactggtccagccagttcagcattgaagtactcctagcactgatttttttctttacctgtcatatgtcagaaacttttcatgcaaaacaaggagcggctcgttcatgtcctgaaggggattacggtcggaatagagaagtgccaagcgacaccactatctcagaggtgtgttgtgcaggaagtgttgattgtatggggagaccacaaccagttgttcctggtggaggcgtttgcagttcataggtactcctcatgactctgaattggagcgctagactggaggtcatatagaagacaagccatgttcctcagctggaggattcgacttgcttcaacaaggacaaaggtctcgtcggagataaggagaggatctgcatttgacaccaatatgcggaacctcgtgcccctgcctcttttggctcctccttctgccctgtccgagcgatggtgcccagaaacaaag

SEQ ID NO: 7635 - DNA, 946 bp, Zea Mays
atttcggctagcccccgttgtaccctcgcttaccctcgcaccctctcacacatgcgcatggaagtagcctcctcgtgttggaataaaggcccccctcgctctggaaggaaggcccattcgtgctggaggaatcctcgcccaaaatccatagctgtcgcaccaccttccatccttggcagttggcacccccttcggcagcgccccccttctagcccccttccaactttgacgcccgcgtcagacggacaacgcacgatgcaagcccgagacccctccctccccacgccgccacccaccatgccctctccctcccctcacagccgtccctctccccaccccctggccccaccgcactaaacagcagcgacacacccgtccctaccccaaggaatcaagaggtcaatccccctgtgcttcgaccattctggaccgtatgagtaaagattccattgcgaaggaggtggcggaggcgcaatcggtactaacagtggacgccgtgtctgctgtattgtcaaggtaatttttcaataacacatcgggagattattttatgatggcatgtggtgcatggtcaaacggaaacttttcatgcaaaacaaggagcggctcgttcatgtcctgaaggggattacggtcggaatagagaagtgccaagcgacaccactatctcaggaagtgttgattgtatggggagaccacaaccagttgttcctggtggaggcgtttgcagttcataggactctgaattggagcgctagactggaggtcatatagaagacaagccatgttcctcagctggaggattcgacttgcttcaacaaggacaaaggtctcgtcggagataaggagaggatctgcatttgacaccaatatgcggaacctcgtgcccctgcctcttttggctcctccttctgccctgtccgagcgatggtgcccagaaacaaag

SEQ ID NO: 7636 - DNA, 2050 bp, Zea Mays
ccaccgccccgtcctgaatctcgccccccgccgtggatctcgcgccagccatgctcgccaatctcggctatgcccgccaatttcggctagcccccgttgtaccctcgcttaccctcgcaccctctcacacatgcgcatggaagtagcctcctcgtgttggaataaaggcccccctcgctctggaaggaaggcccattcgtgctggaggaatcctcgcccaaaatccatagctgtcgcaccaccttccatccttggcagttggcacccccttcggcagcgccccccttctagcccccttccaactttgacgcccgcgtcagacggacaacgcacgatgcaagcccgagacccctccctccccacgccgccacccaccatgccctctccctcccctcacagccgtccctctccccaccccctggccccaccgcactaaacagcagcgacacacccgtccctaccccaaggaatcaagaggtcaatccccctgtgcttcgaccattctggaccgtatgagtaaagattccattgcgaaggaggtggcggaggcgcaatcggtactaacagtggacgccgtgtctgctgtattgtcaagttagctgctctctcgtgccctctgcaatgtttccctacctctttgttgtacgtgcctttgtagccctatgtactgccatgaaatgttgggctcgtcgtcgttgtagacatcgtgtgtggttttttgtgtgtttggaatcatctctggtgttcttcttgattcatgccccctgactgctttgtctggcagacgacaagcagggatggtgccttatcttctttacagcctaacgaatgatggttttgaggtcattgtctaattaggtttaatcttggactaatccagtaatatttgtttgccattgttgaatcgaatactgctctttccattccccatcgtttggtgtgtttagactgtatgtgttgggtgaatggtgcccaaagtttatgagacatggaatgagtacaaataatctggttgttgttttttccagggtaatttttcaataacacatcgggagattattttatgatggcatgtggtgcatggtcaaacgggtaatgcatggtgcagattccatcgggagttccacatctatgtgtgcaatctttttgacacaagacgtgtatatgtaaattaggtccaataataccatgattcagatttagttgtgtcaaggcgtttaggaaaaaaatgtccctgctcatccataggaccaaaaatcgtttccaggatactatttcgctttggttagatagctggtccatgtaatcttccttttcctttacctccttttccttgtccatgtttgtaaatactttcctttatttataatttaacctggtaggggtctatcttttatgcctaaacttgacacttccttcagttttaactgttttttaatcgaagtaaccccatttccattcacagaacggaaatacaagtgagaaagatattacatactaatttaaagtttcatgttcatcgcctcctgaaatgctgccatagatgttgcttgtccactggtccagccagttcagcattgaagtactcctagcactgatttttttctttacctgtcatatgtcagaaacttttcatgcaaaacaaggagcggctcgttcatgtcctgaaggggattacggtcggaatagagaagtgccaagcgacaccactatctcaggaagtgttgattgtatggggagaccacaaccagttgttcctggtggaggcgtttgcagttcataggactctgaattggagcgctagactggaggtcatatagaagacaagccatgttcctcagctggaggattcgacttgcttcaacaaggtcatcctggactttctcaaaaagcctaatctgtcggttaatggtagctcgcaataaggacaaaggtctcgtcggagataaggagaggatctgcatttgacaccaatatgcggaacctcgtgcccctgcctcttttggctcctccttctgccctgtccgagcgatggtgcccagaaacaaag

SEQ ID NO: 7637 - DNA, 1999 bp, Zea Mays
cttttcgccaccgccccgtcctgaatctcgccccccgccgtggatctcgcgccagccatgctcgccaatctcggctatgcccgccaatttcggctagcccccgttgtaccctcgcttaccctcgcaccctctcacacatgcgcatggaagtagcctcctcgtgttggaataaaggcccccctcgctctggaaggaaggcccattcgtgctggaggaatcctcgcccaaaatccatagctgtcgcaccaccttccatccttggcagttggcacccccttcggcagcgccccccttctagcccccttccaactttgacgcccgcgtcagacggacaacgcacgatgcaagcccgagacccctccctccccacgccgccacccaccatgccctctccctcccctcacagccgtccctctccccaccccctggccccaccgcactaaacagcagcgacacacccgtccctaccccaaggaatcaagaggtcaatccccctgtgcttcgaccattctggaccgtatgagtaaagattccattgcgaaggaggtggcggaggcgcaatcggtactaacagtggacgccgtgtctgctgtattgtcaagttagctgctctctcgtgccctctgcaatgtttccctacctctttgttgtacgtgcctttgtagccctatgtactgccatgaaatgttgggctcgtcgtcgttgtagacatcgtgtgtggttttttgtgtgtttggaatcatctctggtgttcttcttgattcatgccccctgactgctttgtctggcagacgacaagcagggatggtgccttatcttctttacagcctaacgaatgatggttttgaggtcattgtctaattaggtttaatcttggactaatccagtaatatttgtttgccattgttgaatcgaatactgctctttccattccccatcgtttggtgtgtttagactgtatgtgttgggtgaatggtgcccaaagtttatgagacatggaatgagtacaaataatctggttgttgttttttccagggtaatttttcaataacacatcgggagattattttatgatggcatgtggtgcatggtcaaacgggtaatgcatggtgcagattccatcgggagttccacatctatgtgtgcaatctttttgacacaagacgtgtatatgtaaattaggtccaataataccatgattcagatttagttgtgtcaaggcgtttaggaaaaaaatgtccctgctcatccataggaccaaaaatcgtttccaggatactatttcgctttggttagatagctggtccatgtaatcttccttttcctttacctccttttccttgtccatgtttgtaaatactttcctttatttataatttaacctggtaggggtctatcttttatgcctaaacttgacacttccttcagttttaactgttttttaatcgaagtaaccccatttccattcacagaacggaaatacaagtgagaaagatattacatactaatttaaagtttcatgttcatcgcctcctgaaatgctgccatagatgttgcttgtccactggtccagccagttcagcattgaagtactcctagcactgatttttttctttacctgtcatatgtcagaaacttttcatgcaaaacaaggagcggctcgttcatgtcctgaaggggattacggtcggaatagagaagtgccaagcgacaccactatctcaggaagtgttgattgtatggggagaccacaaccagttgttcctggtggaggcgtttgcagttcataggactctgaattggagcgctagactggaggtcatatagaagacaagccatgttcctcagctggaggattcgacttgcttcaacaaggacaaaggtctcgtcggagataaggagaggatctgcatttgacaccaatatgcggaacctcgtgcccctgcctcttttggctcctccttctgccctgtccgagcgatggtgcccagaaacaaag

SEQ ID NO: 7638 - DNA, 1513 bp, Zea Mays
gctagcccccgttgtaccctcgcttaccctcgcaccctctcacacatgcgcatggaagtagcctcctcgtgttggaataaaggcccccctcgctctggaaggaaggcccattcgtgctggaggaatcctcgcccaaaatccatagctgtcgcaccaccttccatccttggcagttggcacccccttcggcagcgccccccttctagcccccttccaactttgacgcccgcgtcagacggacaacgcacgatgcaagcccgagacccctccctccccacgccgccacccaccatgccctctccctcccctcacagccgtccctctccccaccccctggccccaccgcactaaacagcagcgacacacccgtccctaccccaaggaatcaagaggtcaatccccctgtgcttcgaccattctggaccgtatgagtaaagattccattgcgaaggaggtggcggaggcgcaatcggtactaacagtggacgccgtgtctgctgtattgtcaagttagctgctctctcgtgccctctgcaatgtttccctacctctttgttgtacgtgcctttgtagccctatgtactgccatgaaatgttgggctcgtcgtcgttgtagacatcgtgtgtggttttttgtgtgtttggaatcatctctggtgttcttcttgattcatgccccctgactgctttgtctggcagacgacaagcagggatggtgccttatcttctttacagcctaacgaatgatggttttgaggtcattgtctaattaggtttaatcttggactaatccagtaatatttgtttgccattgttgaatcgaatactgctctttccattccccatcgtttggtgtgtttagactgtatgtgttgggtgaatggtgcccaaagtttatgagacatggaatgagtacaaataatctggttgttgttttttccagggtaatttttcaataacacatcgggagattattttatgatggcatgtggtgcatggtcaaacggaaacttttcatgcaaaacaaggagcggctcgttcatgtcctgaaggggattacggtcggaatagagaagtgccaagcgacaccactatctcaggaagtgttgattgtatggggagaccacaaccagttgttcctggtggaggcgtttgcagttcataggactctgaattggagcgctagactggaggtcatatagaagacaagccatgttcctcagctggaggattcgacttgcttcaacaaggtcatcctggactttctcaaaaagcctaatctgtcggttaatggtagctcgcaataaggtaccaagctgcattggtgattagtcaatgatagtcgacttgattgtttgtaataagatatctagacagttcagtccattcaacaaatggtaactttcaaaaagaaaaaaaatatttctactttatctaagaacgtcgcaacagatatgcatgtatattgtaagttttggtcgtatggtgttttgatcgtcacttctcctatata

SEQ ID NO: 7639 - DNA, 1031 bp, Zea Mays
ggctagcccccgttgtaccctcgcttaccctcgcaccctctcacacatgcgcatggaagtagcctcctcgtgttggaataaaggcccccctcgctctggaaggaaggcccattcgtgctggaggaatcctcgcccaaaatccatagctgtcgcaccaccttccatccttggcagttggcacccccttcggcagcgccccccttctagcccccttccaactttgacgcccgcgtcagacggacaacgcacgatgcaagcccgagacccctccctccccacgccgccacccaccatgccctctccctcccctcacagccgtccctctccccaccccctggccccaccgcactaaacagcagcgacacacccgtccctaccccaaggaatcaagaggtcaatccccctgtgcttcgaccattctggaccgtatgagtaaagattccattgcgaaggaggtggcggaggcgcaatcggtactaacagtggacgccgtgtctgctgtattgtcaaaaacttttcatgcaaaacaaggagcggctcgttcatgtcctgaaggggattacggtcggaatagagaagtgccaagcgacaccactatctcagaggtgtgttgtgcaggaagtgttgattgtatggggagaccacaaccagttgttcctggtggaggcgtttgcagttcataggactctgaattggagcgctagactggaggtcatatagaagacaagccatgttcctcagctggaggattcgacttgcttcaacaaggtcatcctggactttctcaaaaagcctaatctgtcggttaatggtagctcgcaataaggtaccaagctgcattggtgattagtcaatgatagtcgacttgattgtttgtaataagatatctagacagttcagtccattcaacaaatggtaactttcaaaaagaaaaaaaatatttctactttatctaagaacgtcgcaacagatatgcatgtatattgtaagttttggtcgtatggtgttttgatcgtcacttctcctatata

SEQ ID NO: 7640 - DNA, 1631 bp, Zea Mays
gctatgcccgccaatttcggctagcccccgttgtaccctcgcttaccctcgcaccctctcacacatgcgcatggaagtagcctcctcgtgttggaataaaggcccccctcgctctggaaggaaggcccattcgtgctggaggaatcctcgcccaaaatccatagctgtcgcaccaccttccatccttggcagttggcacccccttcggcagcgccccccttctagcccccttccaactttgacgcccgcgtcagacggacaacgcacgatgcaagcccgagacccctccctccccacgccgccacccaccatgccctctccctcccctcacagccgtccctctccccaccccctggccccaccgcactaaacagcagcgacacacccgtccctaccccaaggaatcaagaggtcaatccccctgtgcttcgaccattctggaccgtatgagtaaagattccattgcgaaggaggtggcggaggcgcaatcggtactaacagtggacgccgtgtctgctgtattgtcaaggtaatttttcaataacacatcgggagattattttatgatggcatgtggtgcatggtcaaacgggtaatgcatggtgcagattccatcgggagttccacatctatgtgtgcaatctttttgacacaagacgtgtatatgtaaattaggtccaataataccatgattcagatttagttgtgtcaaggcgtttaggaaaaaaatgtccctgctcatccataggaccaaaaatcgtttccaggatactatttcgctttggttagatagctggtccatgtaatcttccttttcctttacctccttttccttgtccatgtttgtaaatactttcctttatttataatttaacctggtaggggtctatcttttatgcctaaacttgacacttccttcagttttaactgttttttaatcgaagtaaccccatttccattcacagaacggaaatacaagtgagaaagatattacatactaatttaaagtttcatgttcatcgcctcctgaaatgctgccatagatgttgcttgtccactggtccagccagttcagcattgaagtactcctagcactgatttttttctttacctgtcatatgtcagaaacttttcatgcaaaacaaggagcggctcgttcatgtcctgaaggggattacggtcggaatagagaagtgccaagcgacaccactatctcaggaagtgttgattgtatggggagaccacaaccagttgttcctggtggaggcgtttgcagttcataggactctgaattggagcgctagactggaggtcatatagaagacaagccatgttcctcagctggaggattcgacttgcttcaacaaggtcatcctggactttctcaaaaagcctaatctgtcggttaatggtagctcgcaataaggtaccaagctgcattggtgattagtcaatgatagtcgacttgattgtttgtaataagatatctagacagttcagtccattcaacaaatggtaactttcaaaaagaaaaaaaatatttctactttatctaagaacgtcgcaacagatatgcatgtatattgtaagttttggtcgtatggtgttttgatcgtcacttctcctatata

SEQ ID NO: 7641 - DNA, 1581 bp, Zea Mays
gtggatctcgcgccagccatgctcgccaatctcggctatgcccgccaatttcggctagcccccgttgtaccctcgcttaccctcgcaccctctcacacatgcgcatggaagtagcctcctcgtgttggaataaaggcccccctcgctctggaaggaaggcccattcgtgctggaggaatcctcgcccaaaatccatagctgtcgcaccaccttccatccttggcagttggcacccccttcggcagcgccccccttctagcccccttccaactttgacgcccgcgtcagacggacaacgcacgatgcaagcccgagacccctccctccccacgccgccacccaccatgccctctccctcccctcacagccgtccctctccccaccccctggccccaccgcactaaacagcagcgacacacccgtccctaccccaaggaatcaagaggtcaatccccctgtgcttcgaccattctggaccgtatgagtaaagattccattgcgaaggaggtggcggaggcgcaatcggtactaacagtggacgccgtgtctgctgtattgtcaagttagctgctctctcgtgccctctgcaatgtttccctacctctttgttgtacgtgcctttgtagccctatgtactgccatgaaatgttgggctcgtcgtcgttgtagacatcgtgtgtggttttttgtgtgtttggaatcatctctggtgttcttcttgattcatgccccctgactgctttgtctggcagacgacaagcagggatggtgccttatcttctttacagcctaacgaatgatggttttgaggtcattgtctaattaggtttaatcttggactaatccagtaatatttgtttgccattgttgaatcgaatactgctctttccattccccatcgtttggtgtgtttagactgtatgtgttgggtgaatggtgcccaaagtttatgagacatggaatgagtacaaataatctggttgttgttttttccagggtaatttttcaataacacatcgggagattattttatgatggcatgtggtgcatggtcaaacggaaacttttcatgcaaaacaaggagcggctcgttcatgtcctgaaggggattacggtcggaatagagaagtgccaagcgacaccactatctcagaggtgtgttgtgcaggaagtgttgattgtatggggagaccacaaccagttgttcctggtggaggcgtttgcagttcataggactctgaattggagcgctagactggaggtcatatagaagacaagccatgttcctcagctggaggattcgacttgcttcaacaaggtcatcctggactttctcaaaaagcctaatctgtcggttaatggtagctcgcaataaggtaccaagctgcattggtgattagtcaatgatagtcgacttgattgtttgtaataagatatctagacagttcagtccattcaacaaatggtaactttcaaaaagaaaaaaaatatttctactttatctaagaacgtcgcaacagatatgcatgtatattgtaagttttggtcgtatggtgttttgatcgtcacttctcctatata

SEQ ID NO: 7642 - DNA, 2114 bp, Zea Mays
gtggatctcgcgccagccatgctcgccaatctcggctatgcccgccaatttcggctagcccccgttgtaccctcgcttaccctcgcaccctctcacacatgcgcatggaagtagcctcctcgtgttggaataaaggcccccctcgctctggaaggaaggcccattcgtgctggaggaatcctcgcccaaaatccatagctgtcgcaccaccttccatccttggcagttggcacccccttcggcagcgccccccttctagcccccttccaactttgacgcccgcgtcagacggacaacgcacgatgcaagcccgagacccctccctccccacgccgccacccaccatgccctctccctcccctcacagccgtccctctccccaccccctggccccaccgcactaaacagcagcgacacacccgtccctaccccaaggaatcaagaggtcaatccccctgtgcttcgaccattctggaccgtatgagtaaagattccattgcgaaggaggtggcggaggcgcaatcggtactaacagtggacgccgtgtctgctgtattgtcaagttagctgctctctcgtgccctctgcaatgtttccctacctctttgttgtacgtgcctttgtagccctatgtactgccatgaaatgttgggctcgtcgtcgttgtagacatcgtgtgtggttttttgtgtgtttggaatcatctctggtgttcttcttgattcatgccccctgactgctttgtctggcagacgacaagcagggatggtgccttatcttctttacagcctaacgaatgatggttttgaggtcattgtctaattaggtttaatcttggactaatccagtaatatttgtttgccattgttgaatcgaatactgctctttccattccccatcgtttggtgtgtttagactgtatgtgttgggtgaatggtgcccaaagtttatgagacatggaatgagtacaaataatctggttgttgttttttccagggtaatttttcaataacacatcgggagattattttatgatggcatgtggtgcatggtcaaacgggtaatgcatggtgcagattccatcgggagttccacatctatgtgtgcaatctttttgacacaagacgtgtatatgtaaattaggtccaataataccatgattcagatttagttgtgtcaaggcgtttaggaaaaaaatgtccctgctcatccataggaccaaaaatcgtttccaggatactatttcgctttggttagatagctggtccatgtaatcttccttttcctttacctccttttccttgtccatgtttgtaaatactttcctttatttataatttaacctggtaggggtctatcttttatgcctaaacttgacacttccttcagttttaactgttttttaatcgaagtaaccccatttccattcacagaacggaaatacaagtgagaaagatattacatactaatttaaagtttcatgttcatcgcctcctgaaatgctgccatagatgttgcttgtccactggtccagccagttcagcattgaagtactcctagcactgatttttttctttacctgtcatatgtcagaaacttttcatgcaaaacaaggagcggctcgttcatgtcctgaaggggattacggtcggaatagagaagtgccaagcgacaccactatctcagaggtgtgttgtgcaggaagtgttgattgtatggggagaccacaaccagttgttcctggtggaggcgtttgcagttcataggactctgaattggagcgctagactggaggtcatatagaagacaagccatgttcctcagctggaggattcgacttgcttcaacaaggtcatcctggactttctcaaaaagcctaatctgtcggttaatggtagctcgcaataaggtaccaagctgcattggtgattagtcaatgatagtcgacttgattgtttgtaataagatatctagacagttcagtccattcaacaaatggtaactttcaaaaagaaaaaaaatatttctactttatctaagaacgtcgcaacagatatgcatgtatattgtaagttttggtcgtatggtgttttgatcgtcacttctcctatata

SEQ ID NO: 7643 - DNA, 2138 bp, Zea Mays
ctcgccccccgccgtggatctcgcgccagccatgctcgccaatctcggctatgcccgccaatttcggctagcccccgttgtaccctcgcttaccctcgcaccctctcacacatgcgcatggaagtagcctcctcgtgttggaataaaggcccccctcgctctggaaggaaggcccattcgtgctggaggaatcctcgcccaaaatccatagctgtcgcaccaccttccatccttggcagttggcacccccttcggcagcgccccccttctagcccccttccaactttgacgcccgcgtcagacggacaacgcacgatgcaagcccgagacccctccctccccacgccgccacccaccatgccctctccctcccctcacagccgtccctctccccaccccctggccccaccgcactaaacagcagcgacacacccgtccctaccccaaggaatcaagaggtcaatccccctgtgcttcgaccattctggaccgtatgagtaaagattccattgcgaaggaggtggcggaggcgcaatcggtactaacagtggacgccgtgtctgctgtattgtcaagttagctgctctctcgtgccctctgcaatgtttccctacctctttgttgtacgtgcctttgtagccctatgtactgccatgaaatgttgggctcgtcgtcgttgtagacatcgtgtgtggttttttgtgtgtttggaatcatctctggtgttcttcttgattcatgccccctgactgctttgtctggcagacgacaagcagggatggtgccttatcttctttacagcctaacgaatgatggttttgaggtcattgtctaattaggtttaatcttggactaatccagtaatatttgtttgccattgttgaatcgaatactgctctttccattccccatcgtttggtgtgtttagactgtatgtgttgggtgaatggtgcccaaagtttatgagacatggaatgagtacaaataatctggttgttgttttttccagggtaatttttcaataacacatcgggagattattttatgatggcatgtggtgcatggtcaaacgggtaatgcatggtgcagattccatcgggagttccacatctatgtgtgcaatctttttgacacaagacgtgtatatgtaaattaggtccaataataccatgattcagatttagttgtgtcaaggcgtttaggaaaaaaatgtccctgctcatccataggaccaaaaatcgtttccaggatactatttcgctttggttagatagctggtccatgtaatcttccttttcctttacctccttttccttgtccatgtttgtaaatactttcctttatttataatttaacctggtaggggtctatcttttatgcctaaacttgacacttccttcagttttaactgttttttaatcgaagtaaccccatttccattcacagaacggaaatacaagtgagaaagatattacatactaatttaaagtttcatgttcatcgcctcctgaaatgctgccatagatgttgcttgtccactggtccagccagttcagcattgaagtactcctagcactgatttttttctttacctgtcatatgtcagaaacttttcatgcaaaacaaggagcggctcgttcatgtcctgaaggggattacggtcggaatagagaagtgccaagcgacaccactatctcagaggtgtgttgtgcaggaagtgttgattgtatggggagaccacaaccagttgttcctggtggaggcgtttgcagttcataggtactcctcatgactctgaattggagcgctagactggaggtcatatagaagacaagccatgttcctcagctggaggattcgacttgcttcaacaaggtcatcctggactttctcaaaaagcctaatctgtcggttaatggtagctcgcaataaggtaccaagctgcattggtgattagtcaatgatagtcgacttgattgtttgtaataagatatctagacagttcagtccattcaacaaatggtaactttcaaaaagaaaaaaaatatttctactttatctaagaacgtcgcaacagatatgcatgtatattgtaagttttggtcgtatggtgttttgatcgtcacttctcctatata

SEQ ID NO: 7644 - DNA, 2323 bp, Zea Mays
tggagacaagctttgaagattgacgttggggctgataattgtctaggaattatcttgtttagtactgtaaagaggtctggagactaaggatgctaggataaatgctatgcgttcagctatatctgagacatttcctgagcccaatcggaggttgctgcagagaattttaaaaatgatgcacactgttgcatctcacacttctgaaaatcgaatgactgcatcggcagttgctgcctgcatggcgcctcttctgttgcgtccacttctggctggtgaatgtgagatggatgaggtatttgatatggatggtgacgattctgcgcagcttcttgctgcagcaaatgccgcaaacagtgctcaaggaattgtcgcaactctcttggaggaatatgagggcatttttcatgatgaacacctcagatgttccttgtcacctgaatctcaaattgaagatagtggtactgaagcatcaactgatgatggtaatttggaagccaagggcaatggatttcatgatgcagaaaatgatgtagatcaagaaatggatgatgacaatggcgtggaacgtatacttagtgggaaattgagtgagagcagtggatatgctggcagtgacctctatgactacaaggcagtcaatgctgaggagtcagatgctgaacgccctgtgaagatgttggaaggaaatttgaatttgagcaaagtacagaacagcctttcaactgaaaatggttcagcgaatgtggatagcttactaagcgaaaataatccttctaacccaacagttggtcacgagactttgtctatgggggagatcctttcttcttttgatcctggaatttctgtaccgacccatagtcctgaatattctgtagagagacagacaaacaaaactaatggatctcacccacatgtgaagcggagtaacttttgggggaggaataatgcaaggaagggccaaaactctgaatcagtcgattcatctggagaagaagagcttgctattcaaagactagagattgcgaagaatgatctgcaaaacagaattgcaaaagaggctagagggaatgcaattctacaggcgagtttggaaagaagaaaacaagcgctacatgaacgcagattggctttggaacaggatgtctccaggttgcaagaacaactgcaagctgaaagggatctgcgagctgcattggaggttggcttgagcatgtcttctggacagttttcaagtgctcgttcgatggacgtgaagacaaaggcagaacttgaggagattgctctcgctgaagctgatgttgcaaggttaaaacagaaggttgcagagcttcacctccaactcaatcaacaacgtcaacaccagtatggctctgtagtagatgcaaatgatcgtcatcaccgcctccctggtcatttctcacagcaaaactttgttcaacaaggatttgatatgaaccttgctttctgcaatcaagagaagcagagaaatgaggagagttcggtggagtcatcacaatggagaaacatcaagcagcatgtgctaccttatggttcttcgaggccactcacacgaaagctttcatttgatgcctcctcaagtgaatcaaggggcacagaaccctcaacaagtatgtcaacagagaacacctctgtgtccatcaacgtcccaaagctggcagagggcattgaatttgggaggcaaccaatggtcacatcctccactttggtagagctaacaactagactagatttcttcaaggagcgaaggtcgcaactgatggaacaacttcatagccttgatttgggacgtggatctgctccgcagggctttccattcaagccaccctctccttggaaccacccgaggtaggaggatgaccgtttgatttcatgattgtaaattcttcagtagtggttcttttctccccgcctggcgattgcagaaaactgcatatacgagtgtaaatgtattttgctcttcgatatggttttagctttcgtgttgtgcgaggatagctccttaagtgggatgtgtgatatagtcttttctgtataacacgttgtcatggagagatgccttttagacaagtttttccagtgttgtggcggtgtatatgtattttgtgcgacttggcgaagaaattgaataggttgactgcttgtatggccgtttgattcatgcctagggcaaaggacaggatgaggaaaactgggatcaaatgagaacccagcacgagtttataaataattcgggggtaggcttgaggctgtgttttattttatccttgcaattagttcccatcgccagtggcttgattccgct

SEQ ID NO: 7645 - DNA, 2356 bp, Zea Mays
tttctttcctcctttatattcatatcggctccgcctgccacttgtatggatttttggaggagagaaatggccgcacagcgggcttggtgctttaagaacttgttatcaggaaggactgagttttcagcagatgaagacgctcatgttgtcggtgactgtgtaaagcatgttctccgagagctgccatcatcccccgtgcctgcttcttgctgtacagcattattggaagcgtttcgtctggagactaaggatgctaggataaatgctatgcgttcagctatatctgagacatttcctgagcccaatcggaggttgctgcagagaattttaaaaatgatgcacactgttgcatctcacacttctgaaaatcgaatgactgcatcggcagttgctgcctgcatggcgcctcttctgttgcgtccacttctggctggtgaatgtgagatggatgaggtatttgatatggatggtgacgattctgcgcagcttcttgctgcagcaaatgccgcaaacagtgctcaaggaattgtcgcaactctcttggaggaatatgagggcatttttcatgatgaacacctcagatgttccttgtcacctgaatctcaaattgaagatagtggtactgaagcatcaactgatgatggtaatttggaagccaagggcaatggatttcatgatgcagaaaatgatgtagatcaagaaatggatgatgacaatggcgtggaacgtatacttagtgggaaattgagtgagagcagtggatatgctggcagtgacctctatgactacaaggcagtcaatgctgaggagtcagatgctgaacgccctgtgaagatgttggaaggaaatttgaatttgagcaaagtacagaacagcctttcaactgaaaatggttcagcgaatgtggatagcttactaagcgaaaataatccttctaacccaacagttggtcacgagactttgtctatgggggagatcctttcttcttttgatcctggaatttctgtaccgacccatagtcctgaatattctgtagagagacagacaaacaaaactaatggatctcacccacatgtgaagcggagtaacttttgggggaggaataatgcaaggaagggccaaaactctgaatcagtcgattcatctggagaagaagagcttgctattcaaagactagagattgcgaagaatgatctgcaaaacagaattgcaaaagaggctagagggaatgcaattctacaggcgagtttggaaagaagaaaacaagcgctacatgaacgcagattggctttggaacaggatgtctccaggttgcaagaacaactgcaagctgaaagggatctgcgagctgcattggaggttggcttgagcatgtcttctggacagttttcaagtgctcgttcgatggacgtgaagacaaaggcagaacttgaggagattgctctcgctgaagctgatgttgcaaggttaaaacagaaggttgcagagcttcacctccaactcaatcaacaacgtcaacaccagtatggctctgtagtagatgcaaatgatcgtcatcaccgcctccctggtcatttctcacagcaaaactttgttcaacaaggatttgatatgaaccttgctttctgcaatcaagagaagcagagaaatgaggagagttcggtggagtcatcacaatggagaaacatcaagcagcatgtgctaccttatggttcttcgaggccactcacacgaaagctttcatttgatgcctcctcaagtgaatcaaggggcacagaaccctcaacaagtatgtcaacagagaacacctctgtgtccatcaacgtcccaaagctggcagagggcattgaatttgggaggcaaccaatggtcacatcctccactttggaaccacccgaggtaggaggatgaccgtttgatttcatgattgtaaattcttcagtagtggttcttttctccccgcctggcgattgcagaaaactgcatatacgagtgtaaatgtattttgctcttcgatatggttttagctttcgtgttgtgcgaggatagctccttaagtgggatgtgtgatatagtcttttctgtataacacgttgtcatggagagatgccttttagacaagtttttccagtgttgtggcggtgtatatgtattttgtgcgacttggcgaagaaattgaataggttgactgcttgtatggccgtttgattcatgcctagggcaaaggacaggatgaggaaaactgggatcaaatgagaacccagcacgagtttataaataattcgggggtaggcttgaggctgtgttttattttatccttgcaattagttcccatcgccagtggcttgattccgct

SEQ ID NO: 7646 - DNA, 2968 bp, Zea Mays
cagcgccattgctgccatcgcattcacagcgctaccgtctgcgtcgctttcctttcctccctttccctcgccgtaccaccacccgctcctcttctccgcctctgcctcctcctgcagaagccgccgcacaaaacccaaaccctaaccgccgcccctccgaggcgcgccagatcggcggcggcgcccactgctgctgctccggatccaatgcagcggctgccgtagcgcgggagctgccgatctgaggcggcggcggcggcgctggcgcaggtgggacagggatgtcgtctgcgccggtggcgggggcggcgttcgagcggtaccagcagcgcggaggtggcggccccgcggcggccaacggcaacacggttttcaagagtgggcctcttttcatatcatccaaagggattggatggaaatcatggaagaaacgttggttcatcctcacaagaacatcattggttttcttcaagagtgatcctagtaccttgccccagagaggtggtgaagtgaatgttactctaggagggattgatttgaacaattctgggagtgtggtagtcagagaagacaagaagttattgactgtacttttcccagatggccgtgatggtcgtgcattcactcttaaggcagaaacttctgaagacttgtttgagtggaaaacagcattggaagaagctcttgcacaagctccaaatgcagctcttgtgatgggacataatgggatatttcgtaatgacacagctgacacatatgaaggagctattccaaattggagagagaagagaccgatcaagtcattggtgacaggcaggccaattctgcttgcacttgaggatattgatggcagcccttcttttttagaaaaagccctgcgctttcttgagaaacatggaataaaggtggaaggaattttgaggcagtctgcagataattttaaaaatgatgcacactgttgcatctcacacttctgaaaatcgaatgactgcatcggcagttgctgcctgcatggcgcctcttctgttgcgtccacttctggctggtgaatgtgagatggatgaggtatttgatatggatggtgacgattctgcgcagcttcttgctgcagcaaatgccgcaaacagtgctcaaggaattgtcgcaactctcttggaggaatatgagggcatttttcatgatgaacacctcagatgttccttgtcacctgaatctcaaattgaagatagtggtactgaagcatcaactgatgatggtaatttggaagccaagggcaatggatttcatgatgcagaaaatgatgtagatcaagaaatggatgatgacaatggcgtggaacgtatacttagtgggaaattgagtgagagcagtggatatgctggcagtgacctctatgactacaaggcagtcaatgctgaggagtcagatgctgaacgccctgtgaagatgttggaaggaaatttgaatttgagcaaagtacagaacagcctttcaactgaaaatggttcagcgaatgtggatagcttactaagcgaaaataatccttctaacccaacagttggtcacgagactttgtctatgggggagatcctttcttcttttgatcctggaatttctgtaccgacccatagtcctgaatattctgtagagagacagacaaacaaaactaatggatctcacccacatgtgaagcggagtaacttttgggggaggaataatgcaaggaagggccaaaactctgaatcagtcgattcatctggagaagaagagcttgctattcaaagactagagattgcgaagaatgatctgcaaaacagaattgcaaaagaggctagagggaatgcaattctacaggcgagtttggaaagaagaaaacaagcgctacatgaacgcagattggctttggaacaggatgtctccaggttgcaagaacaactgcaagctgaaagggatctgcgagctgcattggaggttggcttgagcatgtcttctggacagttttcaagtgctcgttcgatggacgtgaagacaaaggcagaacttgaggagattgctctcgctgaagctgatgttgcaaggttaaaacagaaggttgcagagcttcacctccaactcaatcaacaacgtcaacaccagtatggctctgtagtagatgcaaatgatcgtcatcaccgcctccctggtcatttctcacagcaaaactttgttcaacaaggatttgatatgaaccttgctttctgcaatcaagagaagcagagaaatgaggagagttcggtggagtcatcacaatggagaaacatcaagcagcatgtgctaccttatggttcttcgaggccactcacacgaaagctttcatttgatgcctcctcaagtgaatcaaggggcacagaaccctcaacaagtatgtcaacagagaacacctctgtgtccatcaacgtcccaaagctggcagagggcattgaatttgggaggcaaccaatggtcacatcctccactttggaaccacccgaggtaggaggatgaccgtttgatttcatgattgtaaattcttcagtagtggttcttttctccccgcctggcgattgcagaaaactgcatatacgagtgtaaatgtattttgctcttcgatatggttttagctttcgtgttgtgcgaggatagctccttaagtgggatgtgtgatatagtcttttctgtataacacgttgtcatggagagatgccttttagacaagtttttccagtgttgtggcggtgtatatgtattttgtgcgacttggcgaagaaattgaataggttgactgcttgtatggccgtttgattcatgcctagggcaaaggacaggatgaggaaaactgggatcaaatgagaacccagcacgagtttataaataattcgggggtaggcttgaggctgtgttttattttatccttgcaattagttcccatcgccagtggcttgattccgct

SEQ ID NO: 7647 - DNA, 3218 bp, Zea Mays
cggacagcgccattgctgccatcgcattcacagcgctaccgtctgcgtcgctttcctttcctccctttccctcgccgtaccaccacccgctcctcttctccgcctctgcctcctcctgcagaagccgccgcacaaaacccaaaccctaaccgccgcccctccgaggcgcgccagatcggcggcggcgcccactgctgctgctccggatccaatgcagcggctgccgtagcgcgggagctgccgatctgaggcggcggcggcggcgctggcgcaggtgggacagggatgtcgtctgcgccggtggcgggggcggcgttcgagcggtaccagcagcgcggaggtggcggccccgcggcggccaacggcaacacggttttcaagagtgggcctcttttcatatcatccaaagggattggatggaaatcatggaagaaacgttggttcatcctcacaagaacatcattggttttcttcaagagtgatcctagtaccttgccccagagaggtggtgaagtgaatgttactctaggagggattgatttgaacaattctgggagtgtggtagtcagagaagacaagaagttattgactgtacttttcccagatggccgtgatggtcgtgcattcactcttaaggcagaaacttctgaagacttgtttgagtggaaaacagcattggaagaagctcttgcacaagctccaaatgcagctcttgtgatgggacataatgggatatttcgtaatgacacagctgacacatatgaaggagctattccaaattggagagagaagagaccgatcaagtcattggtgacaggcaggccaattctgcttgcacttgaggatattgatggcagcccttcttttttagaaaaagccctgcgctttcttgagaaacatggaataaaggtggaaggaattttgaggcagtctgcagatgtggaagaagttgacaggagattgcaagaatatgaacaaggaaggactgagttttcagcagatgaagacgctcatgttgtcggtgactgtgtaaagcatgttctccgagagctgccatcatcccccgtgcctgcttcttgctgtacagcattattggaagcgtttcgtctggagactaaggatgctaggataaatgctatgcgttcagctatatctgagacatttcctgagcccaatcggaggttgctgcagagaattttaaaaatgatgcacactgttgcatctcacacttctgaaaatcgaatgactgcatcggcagttgctgcctgcatggcgcctcttctgttgcgtccacttctggctggtgaatgtgagatggatgaggtatttgatatggatggtgacgattctgcgcagcttcttgctgcagcaaatgccgcaaacagtgctcaaggaattgtcgcaactctcttggaggaatatgagggcatttttcatgatgaacacctcagatgttccttgtcacctgaatctcaaattgaagatagtggtactgaagcatcaactgatgatggtaatttggaagccaagggcaatggatttcatgatgcagaaaatgatgtagatcaagaaatggatgatgacaatggcgtggaacgtatacttagtgggaaattgagtgagagcagtggatatgctggcagtgacctctatgactacaaggcagtcaatgctgaggagtcagatgctgaacgccctgtgaagatgttggaaggaaatttgaatttgagcaaagtacagaacagcctttcaactgaaaatggttcagcgaatgtggatagcttactaagcgaaaataatccttctaacccaacagttggtcacgagactttgtctatgggggagatcctttcttcttttgatcctggaatttctgtaccgacccatagtcctgaatattctgtagagagacagacaaacaaaactaatggatctcacccacatgtgaagcggagtaacttttgggggaggaataatgcaaggaagggccaaaactctgaatcagtcgattcatctggagaagaagagcttgctattcaaagactagagattgcgaagaatgatctgcaaaacagaattgcaaaagaggctagagggaatgcaattctacaggcgagtttggaaagaagaaaacaagcgctacatgaacgcagattggctttggaacaggatgttgcaagaacaactgcaagctgaaagggatctgcgagctgcattggaggttggcttgagcatgtcttctggacagttttcaagtgctcgttcgatggacgtgaagacaaaggcagaacttgaggagattgctctcgctgaagctgatgttgcaaggttaaaacagaaggttgcagagcttcacctccaactcaatcaacaacgtcaacaccagtatggctctgtagtagatgcaaatgatcgtcatcaccgcctccctggtcatttctcacagcaaaactttgttcaacaaggatttgatatgaaccttgctttctgcaatcaagagaagcagagaaatgaggagagttcggtggagtcatcacaatggagaaacatcaagcagcatgtgctaccttatggttcttcgaggccactcacacgaaagctttcatttgatgcctcctcaagtgaatcaaggggcacagaaccctcaacaagtatgtcaacagagaacacctctgtgtccatcaacgtcccaaagctggcagagggcattgaatttgggaggcaaccaatggtcacatcctccactttggaaccacccgaggtaggaggatgaccgtttgatttcatgattgtaaattcttcagtagtggttcttttctccccgcctggcgattgcagaaaactgcatatacgagtgtaaatgtattttgctcttcgatatggttttagctttcgtgttgtgcgaggatagctccttaagtgggatgtgtgatatagtcttttctgtataacacgttgtcatggagagatgccttttagacaagtttttccagtgttgtggcggtgtatatgtattttgtgcgacttggcgaagaaattgaataggttgactgcttgtatggccgtttgattcatgcctagggcaaaggacaggatgaggaaaactgggatcaaatgagaacccagcacgagtttataaataattcgggggtaggcttgaggctgtgttttattttatccttgcaattagttcccatcgccagtggcttgattccgct

SEQ ID NO: 7648 - DNA, 3176 bp, Zea Mays
cggacagcgccattgctgccatcgcattcacagcgctaccgtctgcgtcgctttcctttcctccctttccctcgccgtaccaccacccgctcctcttctccgcctctgcctcctcctgcagaagccgccgcacaaaacccaaaccctaaccgccgcccctccgaggcgcgccagatcggcggcggcgcccactgctgctgctccggatccaatgcagcggctgccgtagcgcgggagctgccgatctgaggcggcggcggcggcgctggcgcaggtgggacagggatgtcgtctgcgccggtggcgggggcggcgttcgagcggtaccagcagcgcggaggtggcggccccgcggcggccaacggcaacacggttttcaagagtgggcctcttttcatatcatccaaagggattggatggaaatcatggaagaaacgttggttcatcctcacaagaacatcattggttttcttcaagagtgatcctagtaccttgccccagagaggtggtgaagtgaatgttactctaggagggattgatttgaacaattctgggagtgtggtagtcagagaagacaagaagttattgactgtacttttcccagatggccgtgatggtcgtgcattcactcttaaggcagaaacttctgaagacttgtttgagtggaaaacagcattggaagaagctcttgcacaagctccaaatgcagctcttgtgatgggacataatgggatatttcggagagagaagagaccgatcaagtcattggtgacaggcaggccaattctgcttgcacttgaggatattgatggcagcccttcttttttagaaaaagccctgcgctttcttgagaaacatggaataaaggtggaaggaattttgaggcagtctgcagatgtggaagaagttgacaggagattgcaagaatatgaacaaggaaggactgagttttcagcagatgaagacgctcatgttgtcggtgactgtgtaaagcatgttctccgagagctgccatcatcccccgtgcctgcttcttgctgtacagcattattggaagcgtttcgtctggagactaaggatgctaggataaatgctatgcgttcagctatatctgagacatttcctgagcccaatcggaggttgctgcagagaattttaaaaatgatgcacactgttgcatctcacacttctgaaaatcgaatgactgcatcggcagttgctgcctgcatggcgcctcttctgttgcgtccacttctggctggtgaatgtgagatggatgaggtatttgatatggatggtgacgattctgcgcagcttcttgctgcagcaaatgccgcaaacagtgctcaaggaattgtcgcaactctcttggaggaatatgagggcatttttcatgatgaacacctcagatgttccttgtcacctgaatctcaaattgaagatagtggtactgaagcatcaactgatgatggtaatttggaagccaagggcaatggatttcatgatgcagaaaatgatgtagatcaagaaatggatgatgacaatggcgtggaacgtatacttagtgggaaattgagtgagagcagtggatatgctggcagtgacctctatgactacaaggcagtcaatgctgaggagtcagatgctgaacgccctgtgaagatgttggaaggaaatttgaatttgagcaaagtacagaacagcctttcaactgaaaatggttcagcgaatgtggatagcttactaagcgaaaataatccttctaacccaacagttggtcacgagactttgtctatgggggagatcctttcttcttttgatcctggaatttctgtaccgacccatagtcctgaatattctgtagagagacagacaaacaaaactaatggatctcacccacatgtgaagcggagtaacttttgggggaggaataatgcaaggaagggccaaaactctgaatcagtcgattcatctggagaagaagagcttgctattcaaagactagagattgcgaagaatgatctgcaaaacagaattgcaaaagaggctagagggaatgcaattctacaggcgagtttggaaagaagaaaacaagcgctacatgaacgcagattggctttggaacaggatgttgcaagaacaactgcaagctgaaagggatctgcgagctgcattggaggttggcttgagcatgtcttctggacagttttcaagtgctcgttcgatggacgtgaagacaaaggcagaacttgaggagattgctctcgctgaagctgatgttgcaaggttaaaacagaaggttgcagagcttcacctccaactcaatcaacaacgtcaacaccagtatggctctgtagtagatgcaaatgatcgtcatcaccgcctccctggtcatttctcacagcaaaactttgttcaacaaggatttgatatgaaccttgctttctgcaatcaagagaagcagagaaatgaggagagttcggtggagtcatcacaatggagaaacatcaagcagcatgtgctaccttatggttcttcgaggccactcacacgaaagctttcatttgatgcctcctcaagtgaatcaaggggcacagaaccctcaacaagtatgtcaacagagaacacctctgtgtccatcaacgtcccaaagctggcagagggcattgaatttgggaggcaaccaatggtcacatcctccactttggaaccacccgaggtaggaggatgaccgtttgatttcatgattgtaaattcttcagtagtggttcttttctccccgcctggcgattgcagaaaactgcatatacgagtgtaaatgtattttgctcttcgatatggttttagctttcgtgttgtgcgaggatagctccttaagtgggatgtgtgatatagtcttttctgtataacacgttgtcatggagagatgccttttagacaagtttttccagtgttgtggcggtgtatatgtattttgtgcgacttggcgaagaaattgaataggttgactgcttgtatggccgtttgattcatgcctagggcaaaggacaggatgaggaaaactgggatcaaatgagaacccagcacgagtttataaataattcgggggtaggcttgaggctgtgttttattttatccttgcaattagttcccatcgccagtggcttgattccgct

SEQ ID NO: 7649 - DNA, 3177 bp, Zea Mays
ggagggaggggaaagacggacagcgccattgctgccatcgcattcacagcgctaccgtctgcgtcgctttcctttcctccctttccctcgccgtaccaccacccgctcctcttctccgcctctgcctcctcctgcagaagccgccgcacaaaacccaaaccctaaccgccgcccctccgaggcgcgccagatcggcggcggcgcccactgctgctgctccggatccaatgcagcggctgccgtagcgcgggagctgccgatctgaggcggcggcggcggcgctggcgcaggtgggacagggatgtcgtctgcgccggtggcgggggcggcgttcgagcggtaccagcagcgcggaggtggcggccccgcggcggccaacggcaacacggttttcaagagtgggcctcttttcatatcatccaaagggattggatggaaatcatggaagaaacgttggttcatcctcacaagaacatcattggttttcttcaagagtgatcctagtaccttgccccagagaggtggtgaagtgaatgttactctaggagggattgatttgaacaattctgggagtgtggtagtcagagaagacaagaagttattgactgtacttttcccagatggccgtgatggtcgtgcattcactcttaaggcagaaacttctgaagacttgtttgagtggaaaacagcattggaagaagctcttgcacaagctccaaatgcagctcttgtgatgggacataatgggatatttcgtaatgacacagctgacacatatgaaggagctattccaaattggagagagaagagaccgatcaagtcattggtgacaggcaggccaattctgcttgcacttgaggatattgatggcagcccttcttttttagaaaaagccctgcgctttcttgagaaacatggaataaaggtggaaggaattttgaggcagtctgcagatgtggaagaagttgacaggagattgcaagaatatgaacaaggaaggactgagttttcagcagatgaagacgctcatgttgtcggtgactgtgtaaagcatgttctccgagagctgccatcatcccccgtgcctgcttcttgctgtacagcattattggaagcgtttcgtctggagactaaggatgctaggataaatgctatgcgttcagctatatctgagacatttcctgagcccaatcggaggttgctgcagagttgctgcctgcatggcgcctcttctgttgcgtccacttctggctggtgaatgtgagatggatgaggtatttgatatggatggtgacgattctgcgcagcttcttgctgcagcaaatgccgcaaacagtgctcaaggaattgtcgcaactctcttggaggaatatgagggcatttttcatgatgaacacctcagatgttccttgtcacctgaatctcaaattgaagatagtggtactgaagcatcaactgatgatggtaatttggaagccaagggcaatggatttcatgatgcagaaaatgatgtagatcaagaaatggatgatgacaatggcgtggaacgtatacttagtgggaaattgagtgagagcagtggatatgctggcagtgacctctatgactacaaggcagtcaatgctgaggagtcagatgctgaacgccctgtgaagatgttggaaggaaatttgaatttgagcaaagtacagaacagcctttcaactgaaaatggttcagcgaatgtggatagcttactaagcgaaaataatccttctaacccaacagttggtcacgagactttgtctatgggggagatcctttcttcttttgatcctggaatttctgtaccgacccatagtcctgaatattctgtagagagacagacaaacaaaactaatggatctcacccacatgtgaagcggagtaacttttgggggaggaataatgcaaggaagggccaaaactctgaatcagtcgattcatctggagaagaagagcttgctattcaaagactagagattgcgaagaatgatctgcaaaacagaattgcaaaagaggctagagggaatgcaattctacaggcgagtttggaaagaagaaaacaagcgctacatgaacgcagattggctttggaacaggatgtctccaggttgcaagaacaactgcaagctgaaagggatctgcgagctgcattggaggttggcttgagcatgtcttctggacagttttcaagtgctcgttcgatggacgtgaagacaaaggcagaacttgaggagattgctctcgctgaagctgatgttgcaaggttaaaacagaaggttgcagagcttcacctccaactcaatcaacaacgtcaacaccagtatggctctgtagtagatgcaaatgatcgtcatcaccgcctccctggtcatttctcacagcaaaactttgttcaacaaggatttgatatgaaccttgctttctgcaatcaagagaagcagagaaatgaggagagttcggtggagtcatcacaatggagaaacatcaagcagcatgtgctaccttatggttcttcgaggccactcacacgaaagctttcatttgatgcctcctcaagtgaatcaaggggcacagaaccctcaacaagtatgtcaacagagaacacctctgtgtccatcaacgtcccaaagctggcagagggcattgaatttgggaggcaaccaatggtcacatcctccactttggaaccacccgaggtaggaggatgaccgtttgatttcatgattgtaaattcttcagtagtggttcttttctccccgcctggcgattgcagaaaactgcatatacgagtgtaaatgtattttgctcttcgatatggttttagctttcgtgttgtgcgaggatagctccttaagtgggatgtgtgatatagtcttttctgtataacacgttgtcatggagagatgccttttagacaagtttttccagtgttgtggcggtgtatatgtattttgtgcgacttggcgaagaaattgaataggttgactgcttgtatggccgtttgattcatgcctagggcaaaggacaggatgaggaaaactgggatcaaatgagaacccagcacgagtttataaataattcgggggtaggcttgaggctgtgttttattttatccttgcaattagttcccatcgccagtggcttgattccgct

SEQ ID NO: 7650 - DNA, 3218 bp, Zea Mays
gagagagagagaggggagggagggaggggaaagacggacagcgccattgctgccatcgcattcacagcgctaccgtctgcgtcgctttcctttcctccctttccctcgccgtaccaccacccgctcctcttctccgcctctgcctcctcctgcagaagccgccgcacaaaacccaaaccctaaccgccgcccctccgaggcgcgccagatcggcggcggcgcccactgctgctgctccggatccaatgcagcggctgccgtagcgcgggagctgccgatctgaggcggcggcggcggcgctggcgcaggtgggacagggatgtcgtctgcgccggtggcgggggcggcgttcgagcggtaccagcagcgcggaggtggcggccccgcggcggccaacggcaacacggttttcaagagtgggcctcttttcatatcatccaaagggattggatggaaatcatggaagaaacgttggttcatcctcacaagaacatcattggttttcttcaagagtgatcctagtaccttgccccagagaggtggtgaagtgaatgttactctaggagggattgatttgaacaattctgggagtgtggtagtcagagaagacaagaagttattgactgtacttttcccagatggccgtgatggtcgtgcattcactcttaaggcagaaacttctgaagacttgtttgagtggaaaacagcattggaagaagctcttgcacaagctccaaatgcagctcttgtgatgggacataatgggatatttcggagagagaagagaccgatcaagtcattggtgacaggcaggccaattctgcttgcacttgaggatattgatggcagcccttcttttttagaaaaagccctgcgctttcttgagaaacatggaataaaggtggaaggaattttgaggcagtctgcagatgtggaagaagttgacaggagattgcaagaatatgaacaaggaaggactgagttttcagcagatgaagacgctcatgttgtcggtgactgtgtaaagcatgttctccgagagctgccatcatcccccgtgcctgcttcttgctgtacagcattattggaagcgtttcgtctggagactaaggatgctaggataaatgctatgcgttcagctatatctgagacatttcctgagcccaatcggaggttgctgcagagaattttaaaaatgatgcacactgttgcatctcacacttctgaaaatcgaatgactgcatcggcagttgctgcctgcatggcgcctcttctgttgcgtccacttctggctggtgaatgtgagatggatgaggtatttgatatggatggtgacgattctgcgcagcttcttgctgcagcaaatgccgcaaacagtgctcaaggaattgtcgcaactctcttggaggaatatgagggcatttttcatgatgaacacctcagatgttccttgtcacctgaatctcaaattgaagatagtggtactgaagcatcaactgatgatggtaatttggaagccaagggcaatggatttcatgatgcagaaaatgatgtagatcaagaaatggatgatgacaatggcgtggaacgtatacttagtgggaaattgagtgagagcagtggatatgctggcagtgacctctatgactacaaggcagtcaatgctgaggagtcagatgctgaacgccctgtgaagatgttggaaggaaatttgaatttgagcaaagtacagaacagcctttcaactgaaaatggttcagcgaatgtggatagcttactaagcgaaaataatccttctaacccaacagttggtcacgagactttgtctatgggggagatcctttcttcttttgatcctggaatttctgtaccgacccatagtcctgaatattctgtagagagacagacaaacaaaactaatggatctcacccacatgtgaagcggagtaacttttgggggaggaataatgcaaggaagggccaaaactctgaatcagtcgattcatctggagaagaagagcttgctattcaaagactagagattgcgaagaatgatctgcaaaacagaattgcaaaagaggctagagggaatgcaattctacaggcgagtttggaaagaagaaaacaagcgctacatgaacgcagattggctttggaacaggatgtctccaggttgcaagaacaactgcaagctgaaagggatctgcgagctgcattggaggttggcttgagcatgtcttctggacagttttcaagtgctcgttcgatggacgtgaagacaaaggcagaacttgaggagattgctctcgctgaagctgatgttgcaaggttaaaacagaaggttgcagagcttcacctccaactcaatcaacaacgtcaacaccagtatggctctgtagtagatgcaaatgatcgtcatcaccgcctccctggtcatttctcacagcaaaactttgttcaacaaggatttgatatgaaccttgctttctgcaatcaagagaagcagagaaatgaggagagttcggtggagtcatcacaatggagaaacatcaagcagcatgtgctaccttatggttcttcgaggccactcacacgaaagctttcatttgatgcctcctcaagtgaatcaaggggcacagaaccctcaacaagtatgtcaacagagaacacctctgtgtccatcaacgtcccaaagctggcagagggcattgaatttgggaggcaaccaatggtcacatcctccactttggaaccacccgaggtaggaggatgaccgtttgatttcatgattgtaaattcttcagtagtggttcttttctccccgcctggcgattgcagaaaactgcatatacgagtgtaaatgtattttgctcttcgatatggttttagctttcgtgttgtgcgaggatagctccttaagtgggatgtgtgatatagtcttttctgtataacacgttgtcatggagagatgccttttagacaagtttttccagtgttgtggcggtgtatatgtattttgtgcgacttggcgaagaaattgaataggttgactgcttgtatggccgtttgattcatgcctagggcaaaggacaggatgaggaaaactgggatcaaatgagaacccagcacgagtttataaataattcgggggtaggcttgaggctgtgttttattttatccttgcaattagttcccatcgccagtggcttgattccgct

SEQ ID NO: 7651 - DNA, 2726 bp, Zea Mays
cgagaggctccaaagtggacagcccgcccgtgcagctggacctggacgagggagagagagagagagagagagagagagagagagaggggagggagggaggggaaagacggacagcgccattgctgccatcgcattcacagcgctaccgtctgcgtcgctttcctttcctccctttccctcgccgtaccaccacccgctcctcttctccgcctctgcctcctcctgcagaagccgccgcacaaaacccaaaccctaaccgccgcccctccgaggcgcgccagatcggcggcggcgcccactgctgctgctccggatccaatgcagcggctgccgtagcgcgggagctgccgatctgaggcggcggcggcggcgctggcgcaggtgggacagggatgtcgtctgcgccggtggcgggggcggcgttcgagcggtaccagcagcgcggaggtggcggccccgcggcggccaacggcaacacggaaggactgagttttcagcagatgaagacgctcatgttgtcggtgactgtgtaaagcatgttctccgagagctgccatcatcccccgtgcctgcttcttgctgtacagcattattggaagcgtttcgtctggagactaaggatgctaggataaatgctatgcgttcagctatatctgagacatttcctgagcccaatcggaggttgctgcagagaattttaaaaatgatgcacactgttgcatctcacacttctgaaaatcgaatgactgcatcggcagttgctgcctgcatggcgcctcttctgttgcgtccacttctggctggtgaatgtgagatggatgaggtatttgatatggatggtgacgattctgcgcagcttcttgctgcagcaaatgccgcaaacagtgctcaaggaattgtcgcaactctcttggaggaatatgagggcatttttcatgatgaacacctcagatgttccttgtcacctgaatctcaaattgaagatagtggtactgaagcatcaactgatgatggtaatttggaagccaagggcaatggatttcatgatgcagaaaatgatgtagatcaagaaatggatgatgacaatggcgtggaacgtatacttagtgggaaattgagtgagagcagtggatatgctggcagtgacctctatgactacaaggcagtcaatgctgaggagtcagatgctgaacgccctgtgaagatgttggaaggaaatttgaatttgagcaaagtacagaacagcctttcaactgaaaatggttcagcgaatgtggatagcttactaagcgaaaataatccttctaacccaacagttggtcacgagactttgtctatgggggagatcctttcttcttttgatcctggaatttctgtaccgacccatagtcctgaatattctgtagagagacagacaaacaaaactaatggatctcacccacatgtgaagcggagtaacttttgggggaggaataatgcaaggaagggccaaaactctgaatcagtcgattcatctggagaagaagagcttgctattcaaagactagagattgcgaagaatgatctgcaaaacagaattgcaaaagaggctagagggaatgcaattctacaggcgagtttggaaagaagaaaacaagcgctacatgaacgcagattggctttggaacaggatgtctccaggttgcaagaacaactgcaagctgaaagggatctgcgagctgcattggaggttggcttgagcatgtcttctggacagttttcaagtgctcgttcgatggacgtgaagacaaaggcagaacttgaggagattgctctcgctgaagctgatgttgcaaggttaaaacagaaggttgcagagcttcacctccaactcaatcaacaacgtcaacaccagtatggctctgtagtagatgcaaatgatcgtcatcaccgcctccctggtcatttctcacagcaaaactttgttcaacaaggatttgatatgaaccttgctttctgcaatcaagagaagcagagaaatgaggagagttcggtggagtcatcacaatggagaaacatcaagcagcatgtgctaccttatggttcttcgaggccactcacacgaaagctttcatttgatgcctcctcaagtgaatcaaggggcacagaaccctcaacaagtatgtcaacagagaacacctctgtgtccatcaacgtcccaaagctggcagagggcattgaatttgggaggcaaccaatggtcacatcctccactttggaaccacccgaggtaggaggatgaccgtttgatttcatgattgtaaattcttcagtagtggttcttttctccccgcctggcgattgcagaaaactgcatatacgagtgtaaatgtattttgctcttcgatatggttttagctttcgtgttgtgcgaggatagctccttaagtgggatgtgtgatatagtcttttctgtataacacgttgtcatggagagatgccttttagacaagtttttccagtgttgtggcggtgtatatgtattttgtgcgacttggcgaagaaattgaataggttgactgcttgtatggccgtttgattcatgcctagggcaaaggacaggatgaggaaaactgggatcaaatgagaacccagcacgagtttataaataattcgggggtaggcttgaggctgtgttttattttatccttgcaattagttcccatcgccagtggcttgattccgct

SEQ ID NO: 7652 - DNA, 971 bp, Zea Mays
atcctgtatctggtcgcctacaataacatgtcagcgagaaatcccatttttgaacatcgacttgcactctgtacattgcgcccgcaacctccaaaagtgccagcactgcggcgaaatgattcctaggaaacttatggatgaacattatgatgaaaaccatgccccgatcaattgctccctttgtaaagaaacaatagaacgtgagagctgggatcttcataaaggtgaaaagtgcccacaaagaattgtcgcttgtgaatattgcgagtttgaattgcctgcagttgatctccatgaacatcaggatgtatgtggaaaccgaacagagctttgccaaacatgcaggaagtatattagactgcgtgaatggacagggcacgaaatacagtgccatacaaactcaaatggttctgcagacacatcccgagcaattccagagagagaactacgaccgccgccgccgccagtgcgacaggcgcgaccagcacgtcctgcccacgcttcaccacacaagcggctcctcttcacaatcgccgtcactggaatagcagttatgatcggctccatactgttccagagggacgagggtttctagctccagtagccatggactcgctctgtcaaggtgcttcttgaccgggagagtcatgcggtcatgccacaggaaggtggtattaatgtataataactcgttcgaatcaattacaataactggagtttgttagggagtatagccccaggcatgcattcgtcaaaaggcgaagttatgttctgcccctggcagttctgagacttgtgtttgctttgacactgcacttgaatttgttcatctgtaagtcagagatgagttatacaatcggccagtgtcatatctggaattgcgacacggtgcagcagctgttaatactttggcttatatcctgtaatgatactttgctgttggaatgagtatagcgtatcaatttgtgggg

SEQ ID NO: 7653 - DNA, 1169 bp, Zea Mays
aagctacagccgggcaaaagcgaagaactgttgaagcatgccacgcctgaccgcccccctcctcgcctaatctacccaccacccggccacccgtctcgccctctcataaattctctctcgctgccccaccgatcaaccaccccgcttcccccgaccgcgtctcggagcacccttctcaaccgcatcctgcctctgctcggtgtcgccgtctcgactgcaggagaggggagcgccccgtcgccgatctgatcgggagccggaggccaagcgtcgaggtgagcccgtcaggaaccgccatggcagcggccgccgccgattccgacaccgccgcagctgtgggcgccatgtccacctgcgcccactgatcaattgctccctttgtaaagaaacaatagaacgtgagagctgggatcttcataaaggtgaaaagtgcccacaaagaattgtcgcttgtgaatattgcgagtttgaattgcctgcagttgatctccatgaacatcaggatgtatgtggaaaccgaacagagctttgccaaacatgcaggaagtatattagactgcgtgaatggacagggcacgaaatacagtgccatacaaactcaaatggttctgcagacacatcccgagcaattccagagagagaactacgaccgccgccgccgccagtgcgacaggcgcgaccagcacgtcctgcccacgcttcaccacacaagcggctcctcttcacaatcgccgtcactggaatagcagttatgatcggctccatactgttccagagggacgagggtttctagctccagtagccatggactcgctctgtcaaggtgcttcttgaccgggagagtcatgcggtcatgccacaggaaggtggtattaatgtataataactcgttcgaatcaattacaataactggagtttgttagggagtatagccccaggcatgcattcgtcaaaaggcgaagttatgttctgcccctggcagttctgagacttgtgtttgctttgacactgcacttgaatttgttcatctgtaagtcagagatgagttatacaatcggccagtgtcatatctggaattgcgacacggtgcagcagctgttaatactttggcttatatcctgtaatgatactttgctgttggaatgagtatagcgtatcaatttgtgggg

SEQ ID NO: 7654 - DNA, 1217 bp, Zea Mays
aagctacagccgggcaaaagcgaagaactgttgaagcatgccacgcctgaccgcccccctcctcgcctaatctacccaccacccggccacccgtctcgccctctcataaattctctctcgctgccccaccgatcaaccaccccgcttcccccgaccgcgtctcggagcacccttctcaaccgcatcctgcctctgctcggtgtcgccgtctcgactgcaggagaggggagcgccccgtcgccgatctgatcgggagccggaggccaagcgtcgaggtcagcgagaaatcccatttttgaacatcgacttgcactctgtacattgcgcccgcaacctccaaaagtgccagcactgcggcgaaatgattcctaggaaacttatggatgaacattatgatgaaaaccatgccccgatcaattgctccctttgtaaagaaacaatagaacgtgagagctgggatcttcataaaggtgaaaagtgcccacaaagaattgtcgcttgtgaatattgcgagtttgaattgcctgcagttgatctccatgaacatcaggatgtatgtggaaaccgaacagagctttgccaaacatgcaggaagtatattagactgcgtgaatggacagggcacgaaatacagtgccatacaaactcaaatggttctgcagacacatcccgagcaattccagagagagaactacgaccgccgccgccgccagtgcgacaggcgcgaccagcacgtcctgcccacgcttcaccacacaagcggctcctcttcacaatcgccgtcactggaatagcagttatgatcggctccatactgttccagagggacgagggtttctagctccagtagccatggactcgctctgtcaaggtgcttcttgaccgggagagtcatgcggtcatgccacaggaaggtggtattaatgtataataactcgttcgaatcaattacaataactggagtttgttagggagtatagccccaggcatgcattcgtcaaaaggcgaagttatgttctgcccctggcagttctgagacttgtgtttgctttgacactgcacttgaatttgttcatctgtaagtcagagatgagttatacaatcggccagtgtcatatctggaattgcgacacggtgcagcagctgttaatactttggcttatatcctgtaatgatactttgctgttggaatgagtatagcgtatcaatttgtgggg

SEQ ID NO: 7655 - DNA, 1302 bp, Zea Mays
aagctacagccgggcaaaagcgaagaactgttgaagcatgccacgcctgaccgcccccctcctcgcctaatctacccaccacccggccacccgtctcgccctctcataaattctctctcgctgccccaccgatcaaccaccccgcttcccccgaccgcgtctcggagcacccttctcaaccgcatcctgcctctgctcggtgtcgccgtctcgactgcaggagaggggagcgccccgtcgccgatctgatcgggagccggaggccaagcgtcgagtcagcgagaaatcccatttttgaacatcgacttgcactctgtacattgcgcccgcaacctccaaaagtgccagcactgcggcgaaatgattcctaggaaacttatggatgaacattatgatgaaaaccatgccccgatcaattgctccctttgtaaagaaacaatagaacgtgagagctgggatcttcataaaggtgaaaagtgcccacaaagaattgtcgcttgtgaatattgcgagtttgaattgcctgcagttgatctccatgaacatcaggtatacaatttattacttgctgcgggactttgtatattttgaaaaaaatattgtacatgatctgatcacactattttgccataaaggatgtatgtggaaaccgaacagagctttgccaaacatgcaggaagtatattagactgcgtgaatggacagggcacgaaatacagtgccatacaaactcaaatggttctgcagacacatcccgagcaattccagagagagaactacgaccgccgccgccgccagtgcgacaggcgcgaccagcacgtcctgcccacgcttcaccacacaagcggctcctcttcacaatcgccgtcactggaatagcagttatgatcggctccatactgttccagagggacgagggtttctagctccagtagccatggactcgctctgtcaaggtgcttcttgaccgggagagtcatgcggtcatgccacaggaaggtggtattaatgtataataactcgttcgaatcaattacaataactggagtttgttagggagtatagccccaggcatgcattcgtcaaaaggcgaagttatgttctgcccctggcagttctgagacttgtgtttgctttgacactgcacttgaatttgttcatctgtaagtcagagatgagttatacaatcggccagtgtcatatctggaattgcgacacggtgcagcagctgttaatactttggcttatatcctgtaatgatactttgctgttggaatgagtatagcgtatcaatttgtgggg

SEQ ID NO: 7656 - DNA, 904 bp, Zea Mays
cgggggtcgtcctgcaacgcggagcgaggaggctgcgaaagagaccacaacgccgcgcagccggcaggccggccgtcgcgtggctcgttgatacgcccgcgaaccgcgaccccgcgtacgccatggtccggcctgcgcttatccggcgacattactcacgaggcgatggcgatgcgaggaaggacagctaggacctatccttatttaaaccctgacgccaccttgtgctgttcaaggagtgaatactgaacagtccagtcagtcgtctctacctcatacgcctgacgaatcttgattcttgagcaagacgcggtcactccaatagaactatgcacaacctgttcgtcgcctcctcccagtgcctggccaaaagactgattggtttaagcttcaccaaaaaaaaaagagactgattgacttcccaacttatgtttcactagattttagttcattactaagcaagtgctcagctcttttgttggcaatgaagcaaccataacattgcttctatggccaattgaaatggctagttccattcactgtcatagtgcaatacaagcgccaggaagagtatctgtgatgtaaataacagctgttgattttaggacagtcgtattgattttgtgctgccgagcaggcttggaactggatgccttggttttccagatctgggagtttggtcgttttggcctactctgcaccgctattgagatcctctctttctattaagaaatttaactgatgggccaaagtttcagcagcacactacatattttttttctttgaagcaacatctcactaaagtcatctatctactcattggatgactttggagatctgttgatataatatcaattggtatgctgagaagaaactaaccatagtcctgtgttgttatgctcca

SEQ ID NO: 7657 - DNA, 1410 bp, Zea Mays
attgtgccagcatacgcaaacaaacttggcaggtatggatcatcacgtggtgaagacgacgcaccaagaagcactggttctctcccggtggctaacgtccaggcgctcgcggaggcttgcaatgacgacgggggcgacgtccaggtgcccgagagatatctcagcaaggatcccagcagcgcggaggaggtcgtcgtcgtagccggcgacgacagcgcctgcagggcgattcctgtcatcgatctccgtagcccgtaggttgctcgatccggagtcatcggaggaggagaccgccaagctggcgtctgcctgcctcgactggggcttcttccagctaatcaaccatggaattccggacgaggtgaccggaaacctgatgaacgacgtggctgggttcttcgggcagccgctggacgccaagaaggaatgcgcgcagcaggccgacagcctcgaaggatacgggcaggccttcgtggtgtcagaggaccagaagctggactgggccgacatgctcttcctcatcgtgcagccgagggaggccagggacacgcgcttctggccgacgcgccccgcgtccttcggggactccgtggactcctactccctggaagcttcgaggctagcgtaccgcctgctggagctcatggccaggggcgtcggggccgccgacccggcgtcgctaagacgcgtgttcgaggggcagacgcagggcatgcgggtgaactactacccgccgtgccggcgggcggcggaccgggtgctgggcctgtcgccacacaccgacgcgtccggcctgacgctgctgctgcaggccagcaacggcgtgcagggcctgcaggtcaggaaggacggcaggtggttcgccgtggacgccatcgacggcgccctcgtcgtcaacgtcggcgactttcttgagatcctgagtaatggaaaattcaccagcgttgagcacagggccgtggtacacccaaccagagagagaatgtcggcggcgctgttcctgtaccctcgccagaacatgagggttggcccattgccggagttcgtgaatggcggtaatgagcggtatggatcaacggattatgaggaatttatgaagcattactttgcaacgaagcttgacggaaggaagcacctagacagattgaagttggagcagtaggcagtagctatctctaccgtatctatctcgctggagggaccaataaataatttttctatgcgataaatacttcgtcctcaagcacctagagagcagatataaataatgttctccagctttgattcgcaaaaaatgcgcatgattcaaaatgtgttatgataggataggatcgactcggtccatgaccgagacggtcaagatcaaccctaacattctctccatttaatctcatactcattttcttatac

SEQ ID NO: 7658 - DNA, 1704 bp, Zea Mays
ctaaaccaaaaagcagcagttccggagacttccctagctgtttctacagtctacgaaattagcaagctcgctacgtcaactacgagaacggtcggcctcaccggccgttcttggcacaatcatcgtgtttgtgaatgcaagtagaccacgtaagtgtgtgtgggtgcatgagaagagagatatcacatacaatttattttgttttcctggactagattgtgccagcatacgcaaacaaacttggcaggtatggatcatcacgtggtgaagacgacgcaccctcatcacctggtggtgctggaaaagaagtccgaacggaggagcagagctcgatcccaattaacaatgtcgtccgcagcaagaagcactggttctctcccggtggctaacgtccaggcgctcgcggaggcttgcaatgacgacgggggcgacgtccaggtgcccgagagatatctcagcaaggatcccagcagcgcggaggaggtcgtcgtcgtagccggcgacgacagcgcctgcagggcgattcctgtcatcgatctccgtagcccgtaggttgctcgatccggagtcatcggaggaggagaccgccaagctggcgtctgcctgcctcgactggggcttcttccagctaatcaaccatggaattccggacgaggtgaccggaaacctgatgaacgacgtggctgggttcttcgggcagccgctggacgccaagaaggaatgcgcgcagcaggccgacagcctcgaaggatacgggcaggccttcgtggtgtcagaggaccagaagctggactgggccgacatgctcttcctcatcgtgcagccgagggaggccagggacacgcgcttctggccgacgcgccccgcgtccttcggggactccgtggactcctactccctggaagcttcgaggctagcgtaccgcctgctggagctcatggccaggggcgtcggggccgccgacccggcgtcgctaagacgcgtgttcgaggggcagacgcagggcatgcgggtgaactactacccgccgtgccggcgggcggcggaccgggtgctgggcctgtcgccacacaccgacgcgtccggcctgacgctgctgctgcaggccagcaacggcgtgcagggcctgcaggtcaggaaggacggcaggtggttcgccgtggacgccatcgacggcgccctcgtcgtcaacgtcggcgactttcttgagatcctgagtaatggaaaattcaccagcgttgagcacagggccgtggtacacccaaccagagagagaatgtcggcggcgctgttcctgtaccctcgccagaacatgagggttggcccattgccggagttcgtgaatggcggtaatgagcggtatggatcaacggattatgaggaatttatgaagcattactttgcaacgaagcttgacggaaggaagcacctagacagattgaagttggagcagtaggcagtagctatctctaccgtatctatctcgctggagggaccaataaataatttttctatgcgataaatacttcgtcctcaagcacctagagagcagatataaataatgttctccagctttgattcgcaaaaaatgcgcatgattcaaaatgtgttatgataggataggatcgactcggtccatgaccgagacggtcaagatcaaccctaacattctctccatttaatctcatactcattttcttatac

SEQ ID NO: 7659 - DNA, 2262 bp, Zea Mays
ctcaaatccaagtttttgaatatagataacgggtagtagttatctgaccctgagaatattcaccaagtcgaacattatccaaatattgtcatcgatcttgtcttggttcaaacagtttctacatcttttaaacattaaatcatgaaactgtgtttattcgtgtaaattggtttaaaaatgagaaggaaatttcattttcccttgctcacgtcacttccaccagcttccaaattccagatttttagcagatgtcttgtcctctctttagcttccaccgtttacggctttcttatcctttatcctctgtatgccgcaccgttggtaagatttttcctgcgcagcgtgtccctgcttgcttcttctctgcttgcttcttctagcgctcgagctcatcttctccagccttatcccgccgccgctctgcttctgaagaaagaaaaatcaggccgccgttccctcgtcctccttatctcctatgcgcacagggtccttatccggtggtcgtcgcccagttcccatcgtcttccccagcagcgctcgaccgccctccctgttcgcccatcatttcctcctctccagccgcctaaccgccctctggggtttttttagccgccgcccgctgttctttttatacgcacgtagccttcttcaacctccagcgctgtgtccggttccctacactgccgagcggctcgccagactgcgccgcaactccctctcctgcttctctcttgcggccctctccttctccccctactggaccgtgtcccccatggcgctcggtcgcccggccaccgattcctcctccctgcgcgcaggatcctcctcggcttcatctccctgcttccttttccagctcctgcgctcccagatttttctcctgcgcgtttctctctcgcgcggatctctctcctccccggcgtttctctctgttgctccacgccatggcatctccctgctcgctcgcgctctgccgagcttgcccctgcgcgcgctctgctcaccattccaagctcgccttgctccctgctgctcgcccggtcgagctccctgaccgccgcgccgtgaattttcctgcgggcgcatgtctccttgtgcacgtgtcgccgtcgagttctctagtgtttacgtaccatgaagttcctccagcgtcgtggcttcccaattccttctagtcgcacgcgcgaattttctttgctcggctttaactcccaatcgcgtcgtcgatctcgtcgtttgccgtcgagtcgtcaaacacgtcatccccggctcgatcctcacctcaccagcttatcccagacttcaatcgaaggtcgtcgtcgttcgtgcatccccaagaaaacctaagaatcgggtgaagacgaagttagcaacgcgatttttcccaagcgctcaaccaattgcctcgatcgaaaaatcgctactgatctcgcggattcgagttagctgttgaaacggtaagctgatgaattattcagaatagttcgatcgttgaataaattaaggtgctagtttgatgctcattaggtgctcgataaattgcgtaagtcacgaaactctcgtcgacttcgcagttcttgcgattatcgagccaagttcagttatagcgagttatttcgctattccagtcaattagctgaattagtgtaccgagtagaattttagtaggcatgtgtgttgttgaaatattttaatcacttataaagatgtagtataatttataaagcaagggataaatttagaatttaagtaattaagtagctgatgagttgtgtttaggctaatcatgtttaaagtgtatgatttattgttcgtaatgtttgcgttaggttcgtataatttaaaagaaagctagtgtaggacaagtgaatgctctacattaggctgtaacaccctgaatttgggggtataaaatttctttgctcatattcacaaattcaggtgttacttctcttttcacacccttcccaatctcctctttctcttttctatagaagaaaagtggctattttctttgtgtaattatagtctattagactaaaactccaaggaagtatgaattgtggcatcatgttaaaccctaagtttcacttttgtttggtgcataatacttggaagtgctaatttgaatttgtggcctatttagatttgaatcaaatagagtaaataaaaagaaaagggaaaacaattgctggaataaaagaaaaaaaaggaaagaagcccatacccctgcccccctcagcctttcggcccagccggccc

SEQ ID NO: 7660 - DNA, 1799 bp, Zea Mays
cagcgcgctatggtcaaaacataatatttcagaacaagtccgaacgaactgaaggagaggaggaggaggaggaatggcggacgcagccagaggcctcgggtcttcgtctctcccggtggctaacgtgcaggcgcttgcggagtcttgcaacgacaacggagccgatgcgccggtgcccgggaggtacctcatcaaggatcctagcgccgaggaggtcgtagccgccggcgacagcgcctgcacgattccggtcatcgatttccgcaagctgctcgatccggggtcgtacgaggaggagtgcgccaggctgggagccgcgtgccaccactggggattcttccagctcatcaaccatggcgttccggccgaggtgactgggaacctgatgaaggacgtagctgggttcttcaggcagccgctggaagccaagaaggagtgcgcgcagcaggccggcagcatcgaaggctacggccaggccttcgtcgtgtcggaggaccagaagctggactgggcggacatgctcttcctcatcgtgcggccgagggaggccagggacatgcgcttctggccgacgcgccctgagtccttcagggattccgtggacgcgtactccttggaagcttcgaagctagcgtaccgcctgctggagttcatggcaaggggcgtgggtgccgacccggcgtcgctgcagggcatgttccaagggcaggtgcagggcatgcgggtgaactactacccgccgtgccggcaggcggcggaccaagtgctgggcctgtcgccgcacagcgaccccaacgggctcaccctgctcctgcagatgagccacgacgtgcacgggcttcaggtcagcaaggacggcaggtggttccccgtgcaggctctccccggcgccttcgttgtcaacgactcaacgtcggtgacgcgctcgaggtacgtgtgtactttgaattgccccagttcgctaccatcactatcgaaattcggcgctttgccgagtgacggaagcactctataaaacctgaaaaacagttggcaaagtatttattgagtgcgacactcgataaagagaactcggtaaatagtatatcagcaacggcttatttaccgagtactttttatcggacagactttgccgactcttattcggtactcggtaaaaaaaaaccgtcatcacaactactagtagcggagacgacgcttttgtcttttccgttacaaagactttttttactaattaaccgaaaaaaaacacttaataaagaaccgaggactcgacaaagaatcgaatttaggtagtgcatatatatgcttgtttctctctctcgaatcccgacacgccaccacccttgcagatcgttagcaacggagcgttcaggagtgttgagcacagggccgtgatacacccgaccaaggagcggatttcggcggcgctgttccacttcccggaccaggatcggatgcttggtcctctgccggagctggtgaaggaaggcgacacagtgcggtacgcaacgacgacttaccaagagttcatgaagcgattcttcgctgcaaagctcgatggaaagaagctcatagagagattcaagctacagtagtagctacgacctctcagctcgaacaaaaaataaattcacttgtaattattaataatggccagttattgaacggtttgcttgtctaaaatgttaacgcgcgcaacctcgggttcgggcattactgtgttacatccgtttgcttcctgcatactgtcagagaattaccctgagcatagtggtactcgcatgagttatccaaat

SEQ ID NO: 7661 - DNA, 1740 bp, Zea Mays
  misc_feature (1)..(2): n is a, c, g, or t
nnaaagagacaccaattgtccacgacctgatcaacgcctttcagatgttggccctccacttcctgtggatcggcctccgtcacctccgccgttgccatcatctcctccacctgtgccacctccacctgcccatgttcatcagagtgcacatatgcagcctaaattacagacgacatctgatcacattgggccacatcctccaagagctacatataatgttcaaagtcaacaaccccattctattgcagaccacccaggtaacatgaattcttccgttgcaccattgccacccccaccttttaataactcaggatatggagggcaaccaaatcagataccgcctcccccaccatcggcaccactcaatcctcctggtccccaaggcagtttccctgctctcccagcaccatatcatgggaataactatcatcggcctccaaccacatcaatgcctaatgagggatataatctgcaaccagcaccccctccaccgcctccaaatcaattcccttctgtgccaccagaacaccaacataggccgcatcactggggtaataactgtccaccgtgtcctgagagatatcggtacaatggacatgatcgaggtcatcacagacatgatcgaaggcatcatgcgcacgacagacaacaccattatgatgatagaggataccgctatgatgatagaggatatcactatgatgatagaggccattactttgatgatagaagacatcagtttgatgacagagggcatcacttcgatgagagagctattagggggtcaatgcacaatgaggctgctgacaggtcaggatatccttttccaccaggacctcctccgattcctgaccattttgaagctccaccaggcccaatgcactatgggcgaccatcagatcctccaccagggcattgtgcaggctggtctaggccgcctaggatatctaataactattctccctcaagacattctgtggagcctccagtttcccatgcagctggagctggaggacatggtggatggagacctagataaccttttggaatattgaagtggccctgacgcttttcttaagtctgtgggggatttaacctgggagagtccggtggtctctgcttcggattgaaggcactcacggaccactccaggaaagcgggagctgctggtacctgcctccttgtacatatgtatctcaatgattctatggcggtcgcgctgcctgatttgcccttgtatccatcctaccacacggggagctgaattgtagggataggggtgtcttagattgtacttactatttgttggtgccagtctccgattccattgctgatgtccgttcctgaattcctcctggcctcagccgaaactgttgagagtacaccgtacatatatgccaaaaaagagtgaaatacaagtcattttgccctttgcacctctgctgtgctggtgacttgaccgattcgtaaaaagcccctgcatctgctaagacctgcgtgcattgcattgcttgtcaaggtacagagaacaaactgatgttccatctggacagtttcagctctgattgttcatttattttcaaccctattctcgtgtgtgtatgtatatatagagagcgagttcatacggtggaactaatgacttgcgattgatcattattgtttccctagaaaactaaaatctttcgttccgtttaatttatgaatggtgatatggctggtgtcgttccaaagattgac

SEQ ID NO: 7662 - DNA, 1750 bp, Zea Mays
  misc_feature (1)..(2): n is a, c, g, or t
nnaaagagacaccaattgtccacgacctgatcaacgcctttcagatgttggccctccacttcctgtggatcggcctccgtcacctccgccgttgccatcatctcctccacctgtgccacctccacctgcccatgttcatcagagtgcacatatgcagcctaaattacagacgacatctgatcacattgggccacatcctccaagagctacatataatgttcaaagtcaacaaccccattctattgcagaccacccaggtaacatgaattcttccgttgcaccattgccacccccaccttttaataactcaggatatggagggcaaccaaatcagataccgcctcccccaccatcggcaccactcaatcctcctggtccccaaggcagtttccctgctctcccagcaccatatcatgggaataactatcatcggcctccaaccacatcaatgcctaatgagggatataatctgcaaccagcaccccctccaccgcctccaaatcaattcccttctgtgccaccagaacaccaacataggccgcatcactggggtaataactgtccaccgtgtcctgagagatatcggtacaatggacatgatcgaggtcatcacagacatgatcgaaggcatcatgcgcacgacagacaacaccattatgatgatagaggataccgctatgatgatagaggatatcactatgatgatagaggccattactttgatgatagaagacatcagtttgatgacagagggcatcacttcgatgagagagctattagggggtcaatgcacaatgaggctgctgacaggtcaggatatccttttccaccagtcatatgcaggacctcctccgattcctgaccattttgaagctccaccaggcccaatgcactatgggcgaccatcagatcctccaccagggcattgtgcaggctggtctaggccgcctaggatatctaataactattctccctcaagacattctgtggagcctccagtttcccatgcagctggagctggaggacatggtggatggagacctagataaccttttggaatattgaagtggccctgacgcttttcttaagtctgtgggggatttaacctgggagagtccggtggtctctgcttcggattgaaggcactcacggaccactccaggaaagcgggagctgctggtacctgcctccttgtacatatgtatctcaatgattctatggcggtcgcgctgcctgatttgcccttgtatccatcctaccacacggggagctgaattgtagggataggggtgtcttagattgtacttactatttgttggtgccagtctccgattccattgctgatgtccgttcctgaattcctcctggcctcagccgaaactgttgagagtacaccgtacatatatgccaaaaaagagtgaaatacaagtcattttgccctttgcacctctgctgtgctggtgacttgaccgattcgtaaaaagcccctgcatctgctaagacctgcgtgcattgcattgcttgtcaaggtacagagaacaaactgatgttccatctggacagtttcagctctgattgttcatttattttcaaccctattctcgtgtgtgtatgtatatatagagagcgagttcatacggtggaactaatgacttgcgattgatcattattgtttccctagaaaactaaaatctttcgttccgtttaatttatgaatggtgatatggctggtgtcgttccaaagattgac

SEQ ID NO: 7663 - DNA, 1717 bp, Zea Mays
  misc_feature (1)..(2): n is a, c, g, or t
nnaaagagacaccaattgtccacgacctgatcaacgcctttcagatgttggccctccacttcctgtggatcggcctccgtcacctccgccgttgccatcatctcctccacctgtgccacctccacctgcccatgttcatcagagtgcacatatgcagcctaaattacagacgacatctgatcacattgggccacatcctccaagagctacatataatgttcaaagtcaacaaccccattctattgcagaccacccaggtaacatgaattcttccgttgcaccattgccacccccaccttttaataactcaggatatggagggcaaccaaatcagataccgcctcccccaccatcggcaccactcaatcctcctggtccccaaggcagtttccctgctctcccagcaccatatcatgggaataactatcatcggcctccaaccacatcaatgcctaatgagggatataatctgcaaccagcaccccctccaccgcctccaaatcaattcccttctgtgccaccagaacaccaacataggccgcatcactggggtaataactgtccaccgtgtcctgagagatatcggtacaatggacatgatcgaggtcatcacagacatgatcgaaggcatcatgcgcacgacagacaacaccattatgatgatagaggataccgctatgatgatagaggatatcactatgatgatagaggccattactttgatgatagaagacatcagtttgatgacagagggcatcacttcgatgagagagctattagggggtcaatgcacaatgaggctgctgacaggacctcctccgattcctgaccattttgaagctccaccaggcccaatgcactatgggcgaccatcagatcctccaccagggcattgtgcaggctggtctaggccgcctaggatatctaataactattctccctcaagacattctgtggagcctccagtttcccatgcagctggagctggaggacatggtggatggagacctagataaccttttggaatattgaagtggccctgacgcttttcttaagtctgtgggggatttaacctgggagagtccggtggtctctgcttcggattgaaggcactcacggaccactccaggaaagcgggagctgctggtacctgcctccttgtacatatgtatctcaatgattctatggcggtcgcgctgcctgatttgcccttgtatccatcctaccacacggggagctgaattgtagggataggggtgtcttagattgtacttactatttgttggtgccagtctccgattccattgctgatgtccgttcctgaattcctcctggcctcagccgaaactgttgagagtacaccgtacatatatgccaaaaaagagtgaaatacaagtcattttgccctttgcacctctgctgtgctggtgacttgaccgattcgtaaaaagcccctgcatctgctaagacctgcgtgcattgcattgcttgtcaaggtacagagaacaaactgatgttccatctggacagtttcagctctgattgttcatttattttcaaccctattctcgtgtgtgtatgtatatatagagagcgagttcatacggtggaactaatgacttgcgattgatcattattgtttccctagaaaactaaaatctttcgttccgtttaatttatgaatggtgatatggctggtgtcgttccaaagattgac

SEQ ID NO: 7664 - DNA, 2768 bp, Zea Mays
attaaactcaaaagtcataggcaatataagacatgcagtgctttctgcaattatgctgatctcgaggcattcaccgaagagaaaaaaagatctctacttgctaagcgacatggtaaaggggctgattttttaagagcagttgatgagataattgaagtttatgattctctaaaggagaaaggtagtaacaaggatgacttggctgctgaagtaaagccaggtgtagaaaagtttgctgataataatgtttgcatggatactgaaaatatggtcagtagctcctatatacaaaatcatcaagagatagatgatcattatgtcactaccaagggtcatgacatgatcaagtctgacaggctttcagtcactataatgagtgacgaacgctgtgttataaattctgctcctgatgagcctactgaaaatgtatctgtacttgatgaaatgagggagatttctttgcgtactaactcattttcaaataagcaaagggatgcacagccacaaaattgctacacacgtagtagggttccatctctgcgaaagtcaaggagttcaataagtgttgaatcaaggaaggctcaaggttctgataatgtctggttgcattctggcagaggcacttccaaccaacctgtaactttggggactacttgtaacggcagcaaaatgttgaatcctcctgttaaggcggatagtacttgtaacagtgaagcatctgaaaatggaacttcagagacagaattgaaatcaaatggcacatctaatctacccatgaatacagaagtaattttcaggagaataagaaaatcagatagaaaacctgttcctcattatgaagattgtacaacaccaaataaagatgaattacgtgctgagtacagtgaaatcctttcagattctccaaattcaaagaatgaagtatgcaagtcagatggagatgagcacttgccattggtcaaaagagcaagggtccgaatgggaaggtctcatttggaggattcaccagttgatgaagttgatgtttctaataagaagccagagcttacaacaacctcagaccaatgcgataggaatggtaaacctgcaagtcctgtcaatgattattcagctgatcaggtgtccacagttgtaagttctgcttctaatccgtcctgcaaatcagacatgcctatcctgtcaaaggaaggtcatcttccttggaagaataaagaataccacccaaaaattttagcattagatgtggaagctgctttgcctccttcaaaacgccttcatcgtgccttagaagcgatgtctgctaatgtcgctgagaatgtcaagaatatacctgaagtgacaggaccaaatgaaatggctctaaatggctctctgttgacagcaaacaaccattctaataaatctgctgatgcagtagtcacagtatccaataaacctgtaatagttcaatgctctgaaccttctctagacacacagtttaagcatacccaatcaggtaaatgtacgtcagaatcaactttacaaaataataccatccctgattctgcttcagttccatcaaaagaaaatgatatcatgttaaaagaaaatgataccaatggttcctgggtttgtagtgaactagataatggttcctgtgggaaaacttcagccctttgtatgatattgaatcgacccggacttgatgttacacaaaccacatctgtacctgaccggttatcttcgtcttttgagaaagaaagtgaaaatgtggcaacaagcagtgtcaaagagacaaaaccttttggctcagctgtttgtgaggttgacagaagtgcagaagcagaacaaattgaccattcaaacaacaatgtgattagcaacactatacggcatagtgagactattgtagtggattcagtgaacaatgtgggagatacggcaagcaactcttcaatggctactaaatcatccagtatacaatccgatgcagacacccggacttctgaagtgcatacattctcatctctggcgttgaaagaactgaaccatagaaaaattaaggacagaagcacttctccagattcaatgccgatgaaagaacttatagctgtggcacaagctagaaggttttctcgactgacttcctttccagatatcttcctaaatgccaagtatattcctgaaagagccacaaatacacctcccaaggaaggctcacacaggcagttgtcaccctcaaatcggatattcaggtccacctctggaaatgataatgttcattctaggagtccttttgatattatccaacagaagaaattagcagggcatgttgaagccaatgcagcacgaaggtctttcaaagatttcctcagtacattgacaagaaccaaagaaagtatatcacgcgcgacgcgtcttgctattgagtgtgctaagtttggcattgctggcaattgacattatcgttgaacacttggaaaaggaatcaaatttatataagagggtggatctcttctttcttgtagattcaataacacaatgctctcgcaaccagaaaggtggagctggagatgtatatccctctctcattcaggcagttctacctcgaatactctatgctgctgcacctcctgggaactcagcatgggagaatcgaaagcaatgcctaaaggttttgaaactttggcttgaaaggagaacactttcagaatatattatccgtcaccatattaaagaaattgagactatcatgaggcatcatttggaagttctcgccgtccttcatg

SEQ ID NO: 7665 - DNA, 3247 bp, Zea Mays
ctcgactctggggtctggaactctggactcttccaccgaactgccccgctctctcttgactagcgcagtcgcacgctcgacggctcgagtaaacaataaactactaaaaaaatgcgcacaaaataaaaccgctggcgaaccaaaaaataagaatccccaaagctacctctcctgccgctcctcccctctcatgcctcctcccctcgctgccgccgccgccgccgccgttgagagaactaggaccacgggcgggtggagcactggcatcctgcggactcgccgccgctccacgggcgcaggcgctagccgtcgcggggtcgctctgtgagccctggtcggtgctggggggttcggcggcggtctggtagacgggcggtggcgggcgatggcgccggcgaagaggaagcgcgcagcggctgcggcggccgcggcggcggctgccgcggccaagtggaaggtaggggacctcgtgctcgctaagatgaagggcttcccggcctggccggctatgtgaaccagaacagtggaagatgccttctactaaaaagaaaccgctggtctatttctatggtactaaacagattgctttctgcaattatgctgatctcgaggcattcaccgaagagaaaaaaagatctctacttgctaagcgacatggtaaaggggctgattttttaagagcagttgatgagataattgaagtttatgattctctaaaggagaaaggtagtaacaaggatgacttggctgctgaagtaaagccaggtgtagaaaagtttgctgataataatgtttgcatggatactgaaaatatggtcagtagctcctatatacaaaatcatcaagagatagatgatcattatgtcactaccaagggtcatgacatgatcaagtctgacaggctttcagtcactataatgagtgacgaacgctgtgttataaattctgctcctgatgagcctactgaaaatgtatctgtacttgatgaaatgagggagatttctttgcgtactaactcattttcaaataagcaaagggatgcacagccacaaaattgctacacacgtagtagggttccatctctgcgaaagtcaaggagttcaataagtgttgaatcaaggaaggctcaaggttctgataatgtctggttgcattctggcagaggcacttccaaccaacctgtaactttggggactacttgtaacggcagcaaaatgttgaatcctcctgttaaggcggatagtacttgtaacagtgaagcatctgaaaatggaacttcagagacagaattgaaatcaaatggcacatctaatctacccatgaatacagaagtaattttcaggagaataagaaaatcagatagaaaacctgttcctcattatgaagattgtacaacaccaaataaagatgaattacgtgctgagtacagtgaaatcctttcagattctccaaattcaaagaatgaagtatgcaagtcagatggagatgagcacttgccattggtcaaaagagcaagggtccgaatgggaaggtctcatttggaggattcaccagttgatgaagttgatgtttctaataagaagccagagcttacaacaacctcagaccaatgcgataggaatggtaaacctgcaagtcctgtcaatgattattcagctgatcaggtgtccacagttgtaagttctgcttctaatccgtcctgcaaatcagacatgcctatcctgtcaaaggaaggtcatcttccttggaagaataaagaataccacccaaaaattttagcattagatgtggaagctgctttgcctccttcaaaacgccttcatcgtgccttagaagcgatgtctgctaatgtcgctgagaatgtcaagaatatacctgaagtgacaggaccaaatgaaatggctctaaatggctctctgttgacagcaaacaaccattctaataaatctgctgatgcagtagtcacagtatccaataaacctgtaatagttcaatgctctgaaccttctctagacacacagtttaagcatacccaatcaggtaaatgtacgtcagaatcaactttacaaaataataccatccctgattctgcttcagttccatcaaaagaaaatgatatcatgttaaaagaaaatgataccaatggttcctgggtttgtagtgaactagataatggttcctgtgggaaaacttcagccctttgtatgatattgaatcgacccggacttgatgttacacaaaccacatctgtacctgaccggttatcttcgtcttttgagaaagaaagtgaaaatgtggcaacaagcagtgtcaaagagacaaaaccttttggctcagctgtttgtgaggttgacagaagtgcagaagcagaacaaattgaccattcaaacaacaatgtgattagcaacactatacggcatagtgagactattgtagtggattcagtgaacaatgtgggagatacggcaagcaactcttcaatggctactaaatcatccagtatacaatccgatgcagacacccggacttctgaagtgcatacattctcatctctggcgttgaaagaactgaaccatagaaaaattaaggacagaagcacttctccagattcaatgccgatgaaagaacttatagctgtggcacaagctagaaggttttctcgactgacttcctttccagatatcttcctaaatgccaagtatattcctgaaagagccacaaatacacctcccaaggaaggctcacacaggcagttgtcaccctcaaatcggatattcagggcatgttgaagccaatgcagcacgaaggtctttcaaagatttcctcagtacattgacaagaaccaaagaaagtatatcacgcgcgacgcgtcttgctattgagtgtgctaagtttggcattgctggtgaggcaattgacattatcgttgaacacttggaaaaggaatcaaatttatataagagggtggatctcttctttcttgtagattcaataacacaatgctctcgcaaccagaaaggtggagctggagatgtatatccctctctcattcaggcagttctacctcgaatactctatgctgctgcacctcctgggaactcagcatgggagaatcgaaagcaatgcctaaaggttttgaaactttggcttgaaaggagaacactttcagaatatattatccgtcaccatattaaagaaattgagactatcatgaggcatcatttggaagttctcgccgtccttcatg

SEQ ID NO: 7666 - DNA, 3413 bp, Zea Mays
ctcgactctggggtctggaactctggactcttccaccgaactgccccgctctctcttgactagcgcagtcgcacgctcgacggctcgagtaaacaataaactactaaaaaaatgcgcacaaaataaaaccgctggcgaaccaaaaaataagaatccccaaagctacctctcctgccgctcctcccctctcatgcctcctcccctcgctgccgccgccgccgccgccgttgagagaactaggaccacgggcgggtggagcactggcatcctgcggactcgccgccgctccacgggcgcaggcgctagccgtcgcggggtcgctctgtgagccctggtcggtgctggggggttcggcggcggtctggtagacgggcggtggcgggcgatggcgccggcgaagaggaagcgcgcagcggctgcggcggccgcggcggcggctgccgcggccaagtggaaggtaggggacctcgtgctcgctaagatgaagggcttcccggcctggccggctatgattagtgaaccagaacagtggaagatgccttctactaaaaagaaaccgctggtctatttctatggtactaaacagattgctttctgcaattatgctgatctcgaggcattcaccgaagagaaaaaaagatctctacttgctaagcgacatggtaaaggggctgattttttaagagcagttgatgagataattgaagtttatgattctctaaaggagaaaggtagtaacaaggatgacttggctgctgaagtaaagccaggtgtagaaaagtttgctgataataatgtttgcatggatactgaaaatatggtcagtagctcctatatacaaaatcatcaagagatagatgatcattatgtcactaccaagggtcatgacatgatcaagtctgacaggctttcagtcactataatgagtgacgaacgctgtgttataaattctgctcctgatgagcctactgaaaatgtatctgtacttgatgaaatgagggagatttctttgcgtactaactcattttcaaataagcaaagggatgcacagccacaaaattgctacacacgtagtagggttccatctctgcgaaagtcaaggagttcaataagtgttgaatcaaggaaggctcaaggttctggtaatttttttgatcataccaatttgtcttctattgggtcagttcctaatgaaaataaggaacgctccagtcgtcataggcatgcggatgacaaagctaactcaggttctgtttctatattagataatgtctggttgcattctggcagaggcacttccaaccaacctgtaactttggggactacttgtaacggcagcaaaatgttgaatcctcctgttaaggcggatagtacttgtaacagtgaagcatctgaaaatggaacttcagagacagaattgaaatcaaatggcacatctaatctacccatgaatacagaagtaattttcaggagaataagaaaatcagatagaaaacctgttcctcattatgaagattgtacaacaccaaataaagatgaattacgtgctgagtacagtgaaatcctttcagattctccaaattcaaagaatgaagtatgcaagtcagatggagatgagcacttgccattggtcaaaagagcaagggtccgaatgggaaggtctcatttggaggattcaccagttgatgaagttgatgtttctaataagaagccagagcttacaacaacctcagaccaatgcgataggaatggtaaacctgcaagtcctgtcaatgattattcagctgatcaggtgtccacagttgtaagttctgcttctaatccgtcctgcaaatcagacatgcctatcctgtcaaaggaaggtcatcttccttggaagaataaagaataccacccaaaaattttagcattagatgtggaagctgctttgcctccttcaaaacgccttcatcgtgccttagaagcgatgtctgctaatgtcgctgagaatgtcaagaatatacctgaagtgacaggaccaaatgaaatggctctaaatggctctctgttgacagcaaacaaccattctaataaatctgctgatgcagtagtcacagtatccaataaacctgtaatagttcaatgctctgaaccttctctagacacacagtttaagcatacccaatcaggtaaatgtacgtcagaatcaactttacaaaataataccatccctgattctgcttcagttccatcaaaagaaaatgatatcatgttaaaagaaaatgataccaatggttcctgggtttgtagtgaactagataatggttcctgtgggaaaacttcagccctttgtatgatattgaatcgacccggacttgatgttacacaaaccacatctgtacctgaccggttatcttcgtcttttgagaaagaaagtgaaaatgtggcaacaagcagtgtcaaagagacaaaaccttttggctcagctgtttgtgaggttgacagaagtgcagaagcagaacaaattgaccattcaaacaacaatgtgattagcaacactatacggcatagtgagactattgtagtggattcagtgaacaatgtgggagatacggcaagcaactcttcaatggctactaaatcatccagtatacaatccgatgcagacacccggacttctgaagtgcatacattctcatctctggcgttgaaagaactgaaccatagaaaaattaaggacagaagcacttctccagattcaatgccgatgaaagaacttatagctgtggcacaagctagaaggttttctcgactgacttcctttccagatatcttcctaaatgccaagtatattcctgaaagagccacaaatacacctcccaaggaaggctcacacaggcagttgtcaccctcaaatcggatattcaggtccacctctggaaatgataatgttcattctaggagtccttttgatattatccaacagaagaaattagcagggcatgttgaagccaatgcagcacgaaggtctttcaaagatttcctcagtacattgacaagaaccaaagaaagtatatcacgcgcgacgcgtcttgctattgagtgtgctaagtttggcattgctggtgaggaatcaaatttatataagagggtggatctcttctttcttgtagattcaataacacaatgctctcgcaaccagaaaggtggagctggagatgtatatccctctctcattcaggcagttctacctcgaatactctatgctgctgcacctcctgggaactcagcatgggagaatcgaaagcaatgcctaaaggttttgaaactttggcttgaaaggagaacactttcagaatatattatccgtcaccatattaaagaaattgagactatcatgaggcatcatttggaagttctcgccgtccttcatg

SEQ ID NO: 7667 - DNA, 3481 bp, Zea Mays
cgccctcctccgtcctcctcctccccctcccctcgactctggggtctggaactctggactcttccaccgaactgccccgctctctcttgactagcgcagtcgcacgctcgacggctcgagtaaacaataaactactaaaaaaatgcgcacaaaataaaaccgctggcgaaccaaaaaataagaatccccaaagctacctctcctgccgctcctcccctctcatgcctcctcccctcgctgccgccgccgccgccgccgttgagagaactaggaccacgggcgggtggagcactggcatcctgcggactcgccgccgctccacgggcgcaggcgctagccgtcgcggggtcgctctgtgagccctggtcggtgctggggggttcggcggcggtctggtagacgggcggtggcgggcgatggcgccggcgaagaggaagcgcgcagcggctgcggcggccgcggcggcggctgccgcggccaagtggaaggtaggggacctcgtgctcgctaagatgaagggcttcccggcctggccggctatgattagtgaaccagaacagtggaagatgccttctactaaaaagaaaccgctggtctatttctatggtactaaacagattgctttctgcaattatgctgatctcgaggcattcaccgaagagaaaaaaagatctctacttgctaagcgacatggtaaaggggctgattttttaagagcagttgatgagataattgaagtttatgattctctaaaggagaaaggtagtaacaaggatgacttggctgctgaagtaaagccaggtgtagaaaagtttgctgataataatgtttgcatggatactgaaaatatggtcagtagctcctatatacaaaatcatcaagagatagatgatcattatgtcactaccaagggtcatgacatgatcaagtctgacaggctttcagtcactataatgagtgacgaacgctgtgttataaattctgctcctgatgagcctactgaaaatgtatctgtacttgatgaaatgagggagatttctttgcgtactaactcattttcaaataagcaaagggatgcacagccacaaaattgctacacacgtagtagggttccatctctgcgaaagtcaaggagttcaataagtgttgaatcaaggaaggctcaaggttctggtaatttttttgatcataccaatttgtcttctattgggtcagttcctaatgaaaataaggaacgctccagtcgtcataggcatgcggatgacaaagctaactcaggttctgtttctatattagataatgtctggttgcattctggcagaggcacttccaaccaacctgtaactttggggactacttgtaacggcagcaaaatgttgaatcctcctgttaaggcggatagtacttgtaacagtgaagcatctgaaaatggaacttcagagacagaattgaaatcaaatggcacatctaatctacccatgaatacagaagtaattttcaggagaataagaaaatcagatagaaaacctgttcctcattatgaagattgtacaacaccaaataaagatgaattacgtgctgagtacagtgaaatcctttcagattctccaaattcaaagaatgaagtatgcaagtcagatggagatgagcacttgccattggtcaaaagagcaagggtccgaatgggaaggtctcatttggaggattcaccagttgatgaagttgatgtttctaataagaagccagagcttacaacaacctcagaccaatgcgataggaatggtaaacctgcaagtcctgtcaatgattattcagctgatcaggtgtccacagttgtaagttctgcttctaatccgtcctgcaaatcagacatgcctatcctgtcaaaggaaggtcatcttccttggaagaataaagaataccacccaaaaattttagcattagatgtggaagctgctttgcctccttcaaaacgccttcatcgtgccttagaagcgatgtctgctaatgtcgctgagaatgtcaagaatatacctgaagtgacaggaccaaatgaaatggctctaaatggctctctgttgacagcaaacaaccattctaataaatctgctgatgcagtagtcacagtatccaataaacctgtaatagttcaatgctctgaaccttctctagacacacagtttaagcatacccaatcaggtaaatgtacgtcagaatcaactttacaaaataataccatccctgattctgcttcagttccatcaaaagaaaatgatatcatgttaaaagaaaatgataccaatggttcctgggtttgtagtgaactagataatggttcctgtgggaaaacttcagccctttgtatgatattgaatcgacccggacttgatgttacacaaaccacatctgtacctgaccggttatcttcgtcttttgagaaagaaagtgaaaatgtggcaacaagcagtgtcaaagagacaaaaccttttggctcagctgtttgtgaggttgacagaagtgcagaagcagaacaaattgaccattcaaacaacaatgtgattagcaacactatacggcatagtgagactattgtagtggattcagtgaacaatgtgggagatacggcaagcaactcttcaatggctactaaatcatccagtatacaatccgatgcagacacccggacttctgaagtgcaggcatacattctcatctctggcgttgaaagaactgaaccatagaaaaattaaggacagaagcacttctccagattcaatgccgatgaaagaacttatagctgtggcacaagctagaaggttttctcgactgacttcctttccagatatcttcctaaatgccaagtatattcctgaaagagccacaaatacacctcccaaggaaggctcacacaggcagttgtcaccctcaaatcggatattcaggtccacctctggaaatgataatgttcattctaggagtccttttgatattatccaacagaagaaattagcagggcatgttgaagccaatgcagcacgaaggtctttcaaagatttcctcagtacattgacaagaaccaaagaaagtatatcacgcgcgacgcgtcttgctattgagtgtgctaagtttggcattgctggtgaggcaattgacattatcgttgaacacttggaaaaggaatcaaatttatataagagggtggatctcttctttcttgtagattcaataacacaatgctctcgcaaccagaaaggtggagctggagatgtatatccctctctcattcaggcagttctacctcgaatactctatgctgctgcacctcctgggaactcagcatgggagaatcgaaagcaatgcctaaaggttttgaaactttggcttgaaaggagaacactttcagaatatattatccgtcaccatattaaagaaattgagactatcatgaggcatcatttggaagttctcgccgtccttcatg

SEQ ID NO: 7668 - DNA, 3324 bp, Zea Mays
cccaatgccaccgctttcacgcctccagccctccaccatctttcccacgccctcctccgtcctcctcctccccctcccctcgactctggggtctggaactctggactcttccaccgaactgccccgctctctcttgactagcgcagtcgcacgctcgacggctcgagtaaacaataaactactaaaaaaatgcgcacaaaataaaaccgctggcgaaccaaaaaataagaatccccaaagctacctctcctgccgctcctcccctctcatgcctcctcccctcgctgccgccgccgccgccgccgttgagagaactaggaccacgggcgggtggagcactggcatcctgcggactcgccgccgctccacgggcgcaggcgctagccgtcgcggggtcgctctgtgagccctggtcggtgctggggggttcggcggcggtctggtagacgggcggtggcgggcgatggcgccggcgaagaggaagcgcgcagcggctgcggcggccgcggcggcggctgccgcggccaagtggaaggtaggggacctcgtgctcgctaagatgaagggcttcccggcctggccggctatgattagtgaaccagaacagtggaagatgccttctactaaaaagaaaccgctggtctatttctatggtactaaacagattgctttctgcaattatgctgatctcgaggcattcaccgaagagaaaaaaagatctctacttgctaagcgacatggtaaaggggctgattttttaagagcagttgatgagataattgaagtttatgattctctaaaggagaaaggtagtaacaaggatgacttggctgctgaagtaaagccaggtgtagaaaagtttgctgataataatgtttgcatggatactgaaaatatggtcagtagctcctatatacaaaatcatcaagagatagatgatcattatgtcactaccaagggtcatgacatgatcaagtctgacaggctttcagtcactataatgagtgacgaacgctgtgttataaattctgctcctgatgagcctactgaaaatgtatctgtacttgatgaaatgagggagatttctttgcgtactaactcattttcaaataagcaaagggatgcacagccacaaaattgctacacacgtagtagggttccatctctgcgaaagtcaaggagttcaataagtgttgaatcaaggaaggctcaagataatgtctggttgcattctggcagaggcacttccaaccaacctgtaactttggggactacttgtaacggcagcaaaatgttgaatcctcctgttaaggcggatagtacttgtaacagtgaagcatctgaaaatggaacttcagagacagaattgaaatcaaatggcacatctaatctacccatgaatacagaagtaattttcaggagaataagaaaatcagatagaaaacctgttcctcattatgaagattgtacaacaccaaataaagatgaattacgtgctgagtacagtgaaatcctttcagattctccaaattcaaagaatgaagtatgcaagtcagatggagatgagcacttgccattggtcaaaagagcaagggtccgaatgggaaggtctcatttggaggattcaccagttgatgaagttgatgtttctaataagaagccagagcttacaacaacctcagaccaatgcgataggaatggtaaacctgcaagtcctgtcaatgattattcagctgatcaggtgtccacagttgtaagttctgcttctaatccgtcctgcaaatcagacatgcctatcctgtcaaaggaaggtcatcttccttggaagaataaagaataccacccaaaaattttagcattagatgtggaagctgctttgcctccttcaaaacgccttcatcgtgccttagaagcgatgtctgctaatgtcgctgagaatgtcaagaatatacctgaagtgacaggaccaaatgaaatggctctaaatggctctctgttgacagcaaacaaccattctaataaatctgctgatgcagtagtcacagtatccaataaacctgtaatagttcaatgctctgaaccttctctagacacacagtttaagcatacccaatcaggtaaatgtacgtcagaatcaactttacaaaataataccatccctgattctgcttcagttccatcaaaagaaaatgatatcatgttaaaagaaaatgataccaatggttcctgggtttgtagtgaactagataatggttcctgtgggaaaacttcagccctttgtatgatattgaatcgacccggacttgatgttacacaaaccacatctgtacctgaccggttatcttcgtcttttgagaaagaaagtgaaaatgtggcaacaagcagtgtcaaagagacaaaaccttttggctcagctgtttgtgaggttgacagaagtgcagaagcagaacaaattgaccattcaaacaacaatgtgattagcaacactatacggcatagtgagactattgtagtggattcagtgaacaatgtgggagatacggcaagcaactcttcaatggctactaaatcatccagtatacaatccgatgcagacacccggacttctgaagtgcatacattctcatctctggcgttgaaagaactgaaccatagaaaaattaaggacagaagcacttctccagattcaatgccgatgaaagaacttatagctgtggcacaagctagaaggttttctcgactgacttcctttccagatatcttcctaaatgccaagtatattcctgaaagagccacaaatacacctcccaaggaaggctcacacaggcagttgtcaccctcaaatcggatattcagggcatgttgaagccaatgcagcacgaaggtctttcaaagatttcctcagtacattgacaagaaccaaagaaagtatatcacgcgcgacgcgtcttgctattgagtgtgctaagtttggcattgctggtgaggcaattgacattatcgttgaacacttggaaaaggaatcaaatttatataagagggtggatctcttctttcttgtagattcaataacacaatgctctcgcaaccagaaaggtggagctggagatgtatatccctctctcattcaggcagttctacctcgaatactctatgctgctgcacctcctgggaactcagcatgggagaatcgaaagcaatgcctaaaggttttgaaactttggcttgaaaggagaacactttcagaatatattatccgtcaccatattaaagaaattgagactatcatgaggcatcatttggaagttctcgccgtccttcatg

SEQ ID NO: 7669 - DNA, 996 bp, Zea Mays
cgagtggatgggaccggcccatgcccacccagactagctgagtcgcacccgtccatctccctcgccgcgtaaaccccccccggctcgttcgactgccgactcggccgcgctcgcctctgttcaatcaccggcgacggaggacgccgaggaggctcttcgccgccgagtccatttctgcgagatccccgccgagcaagaagcgcagcaccgcgtctgcctgcaccagcgggtggccggccgcgtctccttccgagtcccgagcgcctgccgccaaacttctgacgagtgtcagtgacatcgggtcgggttcgctggagaactgaggggggcttgccgccgacgcgatgaacgcctccgcaatcccgtcccccgcagggggaggccggttcttcacgggcttcaccaaactgtgcaagggcctcgccgtcatcatcttcctcgtccacattttggtccacctcttcccttcagccgccacctatctcacgctgataccagccaggtgataatgagcatagttggtcttcttctactcgggaaggtgttggagcctttatggggagctaaagagttgctcaagtttatttttattgttaatctctcaacttcagcttgtgtcttcgtaactactattgtgctgtactacataacacaggaggagacctacctttacacacctgtttctggattttatggagttctttcaggactactggtgggcatcaagcaaattttacccgatcaggagcttaacctttttgtgctcaagattagtgcaaagtggattccatctattgttgcatttacctctgttgttgtgagcttcttcgtaaaggaatcgatatcatacctccccatcatattatttggcatctacatgagctggatttacctgcgttacttccaaaggagtttggaagtaggccttaaaggggacccaagtgatgaattctcattttcaagcttcttccctgtatttttaagagaaaggggaga

SEQ ID NO: 7670 - DNA, 1978 bp, Zea Mays
cgagtggatgggaccggcccatgcccacccagactagctgagtcgcacccgtccatctccctcgccgcgtaaaccccccccggctcgttcgactgccgactcggccgcgctcgcctctgttcaatcaccggcgacggaggacgccgaggaggctcttcgccgccgagtccatttctgcgagatccccgccgagcaagaagcgcagcaccgcgtctgcctgcaccagcgggtggccggccgcgtctccttccgagtcccgagcgcctgccgccaaacttctgacgagtgtcagtgacatcgggtcgggttcgctggagaactgaggggggcttgccgccgacgcgatgaacgcctccgcaatcccgtcccccgcagggggaggccggttcttcacgggcttcaccaaactgtgcaagggcctcgccgtcatcatcttcctcgtccacattttggtccacctcttcccttcagccgccacctatctcacgctgataccagccaggacaatcccttttgcttggaacctgattaccgcttgttatattgagcaaacaattccaggggtatatttccttaacacatctccagtggtccaatataccaattcaccattctgtggttatgtttgctcttcctgctgaccaaacatcaaaacaaaaggtcaactctaagcgcgtaaacaattgtgaggaatgctatagtatttcatatgttttatgtttcccattgtattgtctcctatgcctgtgaaatacccgaaatgtggtgcttgatgtgtactttaatttgaaatcatgttattctgttatctgttgctcttcagttttctagtaaacctttttatcccttgctcattattctctcttacctaggatactgcatcacacccttatcttacaaggcttctgtgtttccaccaggtgataatgagcatagttggtcttcttctactcgggaaggtgttggagcctttatggggagctaaagagttgctcaagtttatttttattgttaatctctcaacttcagcttgtgtcttcgtaactactattgtgctgtactacataacacaggaggagacctacctttacacacctgtttctggattttatggagttctttcaggactactggtgggcatcaagcaaattttacccgatcaggagcttaacctttttgtgctcaagattagtgcaaagtggattccatctattgttgcatttacctctgttgttgtgagcttcttcgtaaaggaatcgatatcatacctccccatcatattatttggcatctacatgagctggatttacctgcgttacttccaaaggagtttggaagtaggccttaaaggggacccaagtgatgaattctcattttcaagcttcttccctgtatttttaaggccagttttggaccctattgcttctatattccacaaacttttctgtggacgatctgcaaaacctgaaggcacaggccagacactggatgggtcacagttccctggtttaggctccattgaggcaaacaggaggagagaaaggggtcagagggcactagagcagaggctggcagagaagccggccgcggtcaggaatactgagggcacgcctccgccgaagcagcagctggaggacgcggaggatgatgcttctgacgaagtctgagcccttctgttttcagttggtggaattcgctggcaggagatccttgtcaagttttcgacccgcagtacacagtagctcatggcatggagattgtaacgaagcagtgcaaccgggcaagaaggcaaatgcgacacgcatgctcgaaccagttcttgcaagacagcgagtagtgtttttttttttgttgttaatgggtgtttcgtgtcgtgctcagtacccaactcttgccaaatgctttacattgtttcatgtgctacctgaccgaaacgctacgctgctagtgctacgcgccaaacctacgctatctaaga

SEQ ID NO: 7671 - DNA, 1983 bp, Zea Mays
cgagtggatgggaccggcccatgcccacccagactagctgagtcgcacccgtccatctccctcgccgcgtaaaccccccccggctcgttcgactgccgactcggccgcgctcgcctctgttcaatcaccggcgacggaggacgccgaggaggctcttcgccgccgagtccatttctgcgagatccccgccgagcaagaagcgcagcaccgcgtctgcctgcaccagcgggtggccggccgcgtctccttccgagtcccgagcgcctgccgccaaacttctgacgagtgtcagtgacatcgggtcgggttcgctggagaactgaggggggcttgccgccgacgcgatgaacgcctccgcaatcccgtcccccgcaggggtacgggaggccggttcttcacgggcttcaccaaactgtgcaagggcctcgccgtcatcatcttcctcgtccacattttggtccacctcttcccttcagccgccacctatctcacgctgataccagccaggacaatcccttttgcttggaacctgattaccgcttgttatattgagcaaacaattccaggggtatatttccttaacacatctccagtggtccaatataccaattcaccattctgtggttatgtttgctcttcctgctgaccaaacatcaaaacaaaaggtcaactctaagcgcgtaaacaattgtgaggaatgctatagtatttcatatgttttatgtttcccattgtattgtctcctatgcctgtgaaatacccgaaatgtggtgcttgatgtgtactttaatttgaaatcatgttattctgttatctgttgctcttcagttttctagtaaacctttttatcccttgctcattattctctcttacctaggatactgcatcacacccttatcttacaaggcttctgtgtttccaccaggtgataatgagcatagttggtcttcttctactcgggaaggtgttggagcctttatggggagctaaagagttgctcaagtttatttttattgttaatctctcaacttcagcttgtgtcttcgtaactactattgtgctgtactacataacacaggaggagacctacctttacacacctgtttctggattttatggagttctttcaggactactggtgggcatcaagcaaattttacccgatcaggagcttaacctttttgtgctcaagattagtgcaaagtggattccatctattgttgcatttacctctgttgttgtgagcttcttcgtaaaggaatcgatatcatacctccccatcatattatttggcatctacatgagctggatttacctgcgttacttccaaaggagtttggaagtaggccttaaaggggacccaagtgatgaattctcattttcaagcttcttccctgtatttttaaggccagttttggaccctattgcttctatattccacaaacttttctgtggacgatctgcaaaacctgaaggcacaggccagacactggatgggtcacagttccctggtttaggctccattgaggcaaacaggaggagagaaaggggtcagagggcactagagcagaggctggcagagaagccggccgcggtcaggaatactgagggcacgcctccgccgaagcagcagctggaggacgcggaggatgatgcttctgacgaagtctgagcccttctgttttcagttggtggaattcgctggcaggagatccttgtcaagttttcgacccgcagtacacagtagctcatggcatggagattgtaacgaagcagtgcaaccgggcaagaaggcaaatgcgacacgcatgctcgaaccagttcttgcaagacagcgagtagtgtttttttttttgttgttaatgggtgtttcgtgtcgtgctcagtacccaactcttgccaaatgctttacattgtttcatgtgctacctgaccgaaacgctacgctgctagtgctacgcgccaaacctacgctatctaaga

SEQ ID NO: 7672 - DNA, 1626 bp, Zea Mays
cgagtggatgggaccggcccatgcccacccagactagctgagtcgcacccgtccatctccctcgccgcgtaaaccccccccggctcgttcgactgccgactcggccgcgctcgcctctgttcaatcaccggcgacggaggacgccgaggaggctcttcgccgccgagtccatttctgcgagatccccgccgagcaagaagcgcagcaccgcgtctgcctgcaccagcgggtggccggccgcgtctccttccgagtcccgagcgcctgccgccaaacttctgacgagtgtcagtgacatcgggtcgggttcgctggagaactgaggggggcttgccgccgacgcgatgaacgcctccgcaatcccgtcccccgcaggggtacgggaggccggttcttcacgggcttcaccaaactgtgcaagggcctcgccgtcatcatcttcctcgtccacattttggtccacctcttcccttcagccgccacctatctcacgctgataccagccaggacaatcccttttgcttggaacctgattaccgcttgttatattgagcaaacaattccaggggtgataatgagcatagttggtcttcttctactcgggaaggtgttggagcctttatggggagctaaagagttgctcaagtttatttttattgttaatctctcaacttcagcttgtgtcttcgtaactactattgtgctgtactacataacacaggaggagacctacctttacacacctgtttctggattttatggagttctttcaggactactggtgggcatcaagcaaattttacccgatcaggagcttaacctttttgtgctcaagattagtgcaaagtggattccatctattgttgcatttacctctgttgttgtgagcttcttcgtaaaggaatcgatatcatacctccccatcatattatttggcatctacatgagctggatttacctgcgttacttccaaaggagtttggaagtaggccttaaaggggacccaagtgatgaattctcattttcaagcttcttccctgtatttttaaggccagttttggaccctattgcttctatattccacaaacttttctgtggacgatctgcaaaacctgaaggcacaggccagacactggatgggtcacagttccctggtttaggctccattgaggcaaacaggaggagagaaaggggtcagagggcactagagcagaggctggcagagaagccggccgcggtcaggaatactgagggcacgcctccgccgaagcagcagctggaggacgcggaggatgatgcttctgacgaagtctgagcccttctgttttcagttggtggaattcgctggcaggagatccttgtcaagttttcgacccgcagtacacagtagctcatggcatggagattgtaacgaagcagtgcaaccgggcaagaaggcaaatgcgacacgcatgctcgaaccagttcttgcaagacagcgagtagtgtttttttttttgttgttaatgggtgtttcgtgtcgtgctcagtacccaactcttgccaaatgctttacattgtttcatgtgctacctgaccgaaacgctacgctgctagtgctacgcgccaaacctacgctatctaaga

SEQ ID NO: 7673 - DNA, 1660 bp, Zea Mays
ccgcgcggctgtgcatttgccagtgttgtccctgcgattcgagtggatgggaccggcccatgcccacccagactagctgagtcgcacccgtccatctccctcgccgcgtaaaccccccccggctcgttcgactgccgactcggccgcgctcgcctctgttcaatcaccggcgacggaggacgccgaggaggctcttcgccgccgagtccatttctgcgagatccccgccgagcaagaagcgcagcaccgcgtctgcctgcaccagcgggtggccggccgcgtctccttccgagtcccgagcgcctgccgccaaacttctgacgagtgtcagtgacatcgggtcgggttcgctggagaactgaggggggcttgccgccgacgcgatgaacgcctccgcaatcccgtcccccgcagggggaggccggttcttcacgggcttcaccaaactgtgcaagggcctcgccgtcatcatcttcctcgtccacattttggtccacctcttcccttcagccgccacctatctcacgctgataccagccaggacaatcccttttgcttggaacctgattaccgcttgttatattgagcaaacaattccaggggtgataatgagcatagttggtcttcttctactcgggaaggtgttggagcctttatggggagctaaagagttgctcaagtttatttttattgttaatctctcaacttcagcttgtgtcttcgtaactactattgtgctgtactacataacacaggaggagacctacctttacacacctgtttctggattttatggagttctttcaggactactggtgggcatcaagcaaattttacccgatcaggagcttaacctttttgtgctcaagattagtgcaaagtggattccatctattgttgcatttacctctgttgttgtgagcttcttcgtaaaggaatcgatatcatacctccccatcatattatttggcatctacatgagctggatttacctgcgttacttccaaaggagtttggaagtaggccttaaaggggacccaagtgatgaattctcattttcaagcttcttccctgtatttttaaggccagttttggaccctattgcttctatattccacaaacttttctgtggacgatctgcaaaacctgaaggcacaggccagacactggatgggtcacagttccctggtttaggctccattgaggcaaacaggaggagagaaaggggtcagagggcactagagcagaggctggcagagaagccggccgcggtcaggaatactgagggcacgcctccgccgaagcagcagctggaggacgcggaggatgatgcttctgacgaagtctgagcccttctgttttcagttggtggaattcgctggcaggagatccttgtcaagttttcgacccgcagtacacagtagctcatggcatggagattgtaacgaagcagtgcaaccgggcaagaaggcaaatgcgacacgcatgctcgaaccagttcttgcaagacagcgagtagtgtttttttttttgttgttaatgggtgtttcgtgtcgtgctcagtacccaactcttgccaaatgctttacattgtttcatgtgctacctgaccgaaacgctacgctgctagtgctacgcgccaaacctacgctatctaaga

SEQ ID NO: 7674 - DNA, 950 bp, Zea Mays
tcatgttccttttccatgtgagggagattgattgttgtgctggatttgatttggctgagagttgaatgatgaagcgatggtgtttctcatggcctgtgagagaagatgctaatgcaagcaattcttgaatcactgaaagactatgaacagtcgaatacaaaaaatgtgcaatccactgcatctgatcctgcatctaaagccaatggtactgtaaaagactgcaatggtgttgctgcagcagcattggagcaagatgcatcctcatttgatgctcctgacaagcatacgaatgtccccaacagtggagaaaaagtcagcgaagggcaaagtacagattgcaacgccggaaagagcagtgcttcggtctctgcttctggttcctcagagcccctggcaccaacacagatggtgaatggacaacctgcttcggtagactcccagaaagtgacccagaatgccaatggagaggatggcacaagagcaactttggtagttcagaagagccggacaggcggcctgatagaaaaatggggttccttcttcaagaacaacgactaaggcgaggaaagatagacgatgacacctttgacaatacgtgttccgttgtgttcatagtcatagaatcgccgttggctgatgtccagcttgattggttttacgtgtaaaatggaaaggaaacaggtgatttcaggacgttcgtgtgtatatagaaggaattgtagcgcccccattgatttataccatctctcaacttccactactttcggttgcggtgaattggcaagacctttgttcttactaatgtgctgtagacttgtagcataatttgaaagctgattattttgtagttttttaaatagtaaagggtaatgtgcctcttaacgtagagttgaattcttacacgagcaatagggtcaattttttaaattgtatttaatgtccaaaaaaaa

SEQ ID NO: 7675 - DNA, 1043 bp, Zea Mays
atcaattactggcatactgggtctgacaagggtttcgatagtgatcttggtccctcttcatctagtgtatcaacagcaactcctcccaatggtcgcaacggaaggctgctgactccaacctctgatgatggcgagtatgtggagtactcatttgatagcttgtcagatatgcctcacaccgtggaagatgaagatagaatgctaatgcaagcaattcttgaatcactgaaagactatgaacagtcgaatacaaaaaatgtgcaatccactgcatctgatcctgcatctaaagccaatggtactgtaaaagactgcaatggtgttgctgcagcagcattggagcaagatgcatcctcatttgatgctcctgacaagcatacgaatgtccccaacagtggagaaaaagtcagcgaagggcaaagtacagattgcaacgccggaaagagcagtgcttcggtctctgcttctggttcctcagagcccctggcaccaacacagatggtgaatggacaacctgcttcggtagactcccagaaagtgacccagaatgccaatggagaggatggcacaagagcaactttggtagttcagaagagccggacaggcggcctgatagaaaaatggggttccttcttcaagaacaacgactaaggcgaggaaagatagacgatgacacctttgacaatacgtgttccgttgtgttcatagtcatagaatcgccgttggctgatgtccagcttgattggttttacgtgtaaaatggaaaggaaacaggtgatttcaggacgttcgtgtgtatatagaaggaattgtagcgcccccattgatttataccatctctcaacttccactactttcggttgcggtgaattggcaagacctttgttcttactaatgtgctgtagacttgtagcataatttgaaagctgattattttgtagttttttaaatagtaaagggtaatgtgcctcttaacgtagagttgaattcttacacgagcaatagggtcaattttttaaattgtatttaatgtccaaaaaaaa

SEQ ID NO: 7676 - DNA, 2038 bp, Zea Mays
agaagcactagcgtatagtgcaatcgtaaatagcaatgggaagagaggaaggggaagatcaaagttgacatagaaagaggtaaaaaatggtcagggcaagaagttacaatgtagtcactacatgcctgttgtgattcctgaaggaaaagctcttccttgtgtcatatattgtcatggaaacagtgggtgcagggctgatgctagtgaagccgctattattcttctaccgtcaaacattacagtctttacactggacttttcagggtctggactctctgaaggagagcatgtcactttaggctggaatgaaagagaagatctcaaagctgtggttaactatttgcgaacagatgggaatgtatcttgcattggtttgtggggtcgctcaatgggtgcagtcacaagtctaatgtatggagcggaggatccatcgattgcgggaatggttcttgatagcccattctccaacttggttgacttaatgatggagctagtggacacatacaaatatccactgccaaaattcactgtcaaacttgcaatacagcatatgcgaaaaattgtcaagaggaaagctagtttcgacatcatggatcttgataccattcaggtagcaaaacaatgttttgttcctgctttgtttggacatgcaactgaggatgattttatacttccccatcattcagacaagatatatgaatcatatattggcgacaaaaacattataaaatttgatggggatcacaattcaccacgtcctcaattctactttgactcaatcactatatttttccataatgtgctaaaccctcctgaagtggcagaggatcattatttcatgacaccacatgggtcattgggatacagaacaagacatagagtatcggttctctcaatcacctacagggacagccaatgctactacaacagaagatgccattgcacagttgcgctctagaaggctcatgagtagaatggaggtcccatctggtgccaccaccgaagacaggactgatcgaactgagggtttcgatagtgatcttggtccctcttcatctagtgtatcaacagcaactcctcccaatggtcgcaacggaaggctgctgactccaacctctgatgatggcgagtatgtggagtactcatttgatagcttgtcagatatgcctcacaccgtggaagatgaagatagaatgctaatgcaagcaattcttgaatcactgaaagactatgaacagtcgaatacaaaaaatgtgcaatccactgcatctgatcctgcatctaaagccaatggtactgtaaaagactgcaatggtgttgctgcagcagcattggagcaagatgcatcctcatttgatgctcctgacaagcatacgaatgtccccaacagtggagaaaaagtcagcgaagggcaaagtacagattgcaacgccggaaagagcagtgcttcggtctctgcttctggttcctcagagcccctggcaccaacacagatggtgaatggacaacctgcttcggtagactcccagaaagtgacccagaatgccaatggagaggatggcacaagagcaactttggtagttcagaagagccggacaggcggcctgatagaaaaatggggttccttcttcaagaacaacgactaaggcgaggaaagatagacgatgacacctttgacaatacgtgttccgttgtgttcatagtcatagaatcgccgttggctgatgtccagcttgattggttttacgtgtaaaatggaaaggaaacaggtgatttcaggacgttcgtgtgtatatagaaggaattgtagcgcccccattgatttataccatctctcaacttccactactttcggttgcggtgaattggcaagacctttgttcttactaatgtgctgtagacttgtagcataatttgaaagctgattattttgtagttttttaaatagtaaagggtaatgtgcctcttaacgtagagttgaattcttacacgagcaatagggtcaattttttaaattgtatttaatgtccaaaaaaaa

SEQ ID NO: 7677 - DNA, 2677 bp, Zea Mays
ctcacacacttggaatcgtcgtcgtcgcctcccaactttggggagacactgtgggacgatgtcgtcaccccgatttcgacgtcggtccggaggagagcatgtgggtggtcgaggccgtctgcagtggtggtcttgctgctcccagatcccatcacgggagggggagcggggttgtggatgacgacgaggggagggggcgcgcgacgggggttgacaacgggcgcggggacgacgacgcgtcggaggtagcggcaggcatattgacgagggatgtgaaggagaggaggaagggaaggagtccggtaccgacgatggaggcgaggagagggagggtggagcagaggaaggtgggaggagaacaacaaaagggtcccagacgtgaaaactgtcatccgttttctttgcgcgtctcccttcccgagtcgcaggctcgcagccctgcgctgtcgccgtctgccgagcccgagcccggaaaaggggaaggcggctacgcaaacgcaaggcaccccaccccgttcaccgcagccgaatcaattaaaaagccggcggcgagaaggtgggttggggaatctgaagcgatcagagaaggcaagcttgcttgcttgcttctccaccgaatcccccatctcgcgccctccgtctctcgccgcggagactcgcccccccgctgatggaccagctcgtcaatttcatcatccgcccgcccagagctgactacagtccaaatgatgatctattagagcaggagtttatgctgaagggaagatggttcctgaggaaggatttggaggtaaaaaatggtcagggcaagaagttacaatgtagtcactacatgcctgttgtgattcctgaaggaaaagctcttccttgtgtcatatattgtcatggaaacagggtctggactctctgaaggagagcatgtcactttaggctggaatgaaagagaagatctcaaagctgtggttaactatttgcgaacagatgggaatgtatcttgcattggtttgtggggtcgctcaatgggtgcagtcacaagtctaatgtatggagcggaggatccatcgattgcgggaatggttcttgatagcccattctccaacttggttgacttaatgatggagctagtggacacatacaaatatccactgccaaaattcactgtcaaacttgcaatacagcatatgcgaaaaattgtcaagaggaaagctagtttcgacatcatggatcttgataccattcaggtagcaaaacaatgttttgttcctgctttgtttggacatgcaactgaggatgattttatacttccccatcattcagacaagatatatgaatcatatattggcgacaaaaacattataaaatttgatggggatcacaattcaccacgtcctcaattctactttgactcaatcactatatttttccataatgtgctaaaccctcctgaagtggcagaggatcattatttcatgacaccacatggtagccttggtcagggtcattgggatacagaacaagacatagagtatcggttctctcaatcacctacagccaatgctactacaacagaagatgccattgcacagttgcgctctagaaggctcatgagtagaatggaggtcccatctggtgccaccaccgaagacaggactgatcgaactgagggtttcgatagtgatcttggtccctcttcatctagtgtatcaacagcaactcctcccaatggtcgcaacggaaggctgctgactccaacctctgatgatggcgagtatgtggagtactcatttgatagcttgtcagatatgcctcacaccgtggaagatgaagatagaatgctaatgcaagcaattcttgaatcactgaaagactatgaacagtcgaatacaaaaaatgtgcaatccactgcatctgatcctgcatctaaagccaatggtactgtaaaagactgcaatggtgttgctgcagcagcattggagcaagatgcatcctcatttgatgctcctgacaagcatacgaatgtccccaacagtggagaaaaagtcagcgaagggcaaagtacagattgcaacgccggaaagagcagtgcttcggtctctgcttctggttcctcagagcccctggcaccaacacagatggtgaatggacaacctgcttcggtagactcccagaaagtgacccagaatgccaatggagaggatggcacaagagcaactttggtagttcagaagagccggacaggcggcctgatagaaaaatggggttccttcttcaagaacaacgactaaggcgaggaaagatagacgatgacacctttgacaatacgtgttccgttgtgttcatagtcatagaatcgccgttggctgatgtccagcttgattggttttacgtgtaaaatggaaaggaaacaggtgatttcaggacgttcgtgtgtatatagaaggaattgtagcgcccccattgatttataccatctctcaacttccactactttcggttgcggtgaattggcaagacctttgttcttactaatgtgctgtagacttgtagcataatttgaaagctgattattttgtagttttttaaatagtaaagggtaatgtgcctcttaacgtagagttgaattcttacacgagcaatagggtcaattttttaaattgtatttaatgtccaaaaaaaa

SEQ ID NO: 7678 - DNA, 1883 bp, Zea Mays
cgggacctggcagtcgcgtcgacctccccgccgcgcccacggcactcgccactccacccaccaggccaagcacgcggcggcgacgccaaagcatcagggcaccaatggttgtgctccccgcggccccgcggcccctactcctacagtcctaaataatagccttccattccaatctgttcccacagttcagtcgcacactcgggcgggtcaaattcgactcgggaggaaccaaccacccggaaattcccccctcctccagtctccacttgatcggcgaggcgctgcggccgcgggcgaatggcgtcggaggcggagtcgcccgtggtgatccacgcgtggtcggcgccgcgctccctcagcaccagcctcatgtactccttcgcccagagggacgacatggaggtgcttgacgagcctctctacgcaaatttcctgcgtgccacaggcgtcgacaggccctaccggcaggagctcctgtccaaaatggaccctgatggaaataaggttgtcaaggaggtgatttttggcccaggggacaaaaagtatcgttactgcaagcacatctcaaagcaacatctcccaaatctgtcaagcgacctcatgaagaagggaaaacatttcatattgatacggaaccctctagatatactgccatcttttgataaagtcgttccaccatccttcatggagcttggcataggcgaacttgtctcaatatacagtgaattatgtggacttgggagcccaccccctgtgatagatgcagatgatctgcaacaggatcctgaggccgtcctaagtggtctctgtgaggatctgggcattcctttccagccacaaatgttgaaatgggaagctggccccaaggaatttgatggtatatgggcaccctggtggtatgggagtgtgcacaagtcttcaggtttctctaagcctcgccaatatcctctgactttcccattcgtgttttatgacctgcttgagcaaagcttgcctttctacaacatgctgaagcgccaaataaggaagataagaggaccgcagcaaccaccattatcggaccctcctctgcctgtccctgcaaataaaaacattcttgtttgggttggagatgaacttttgccccgtaacagtgcaaaggtttcagtgtttgattcagttgtacaaggaggagatgctgtttgggaaggtttacgtatatatgatggaaaagtattcaaattagatgaacatttggacagattgtttgattctgcaaaagctatggccttcagcaatgtgcctactcgtgattggattaaggatgccatctttaagactctgattgcaaatggaatgttcaacaatgctcatataaggctcacgctcacccgtgggaaaaaggtgacatctggaatgagtccagctttcaatctttatgggtgtgccttgattgtgcttgcagagtggaaaccaccagtttatgataactctcatgggataaaattggttactgccaccacacgtcgaaattctccaaatagtatagattccaagattcatcacaacaatcttatcaacaatattctggcaaagatagaaggtaatcttgcccaggctgaggatgccattatgctagataaggatggctttgtatcagaaacaaacgcaacaaatatttttatggtcaaaaagggaattgtattgacacctcatgctgactattgccttccaggcattacgcgagcaactgtcatggatcttgtggtgaaagaaaactttgtgttacatgaacgacgcattagtctgtcagaattccatgctgcagatgaggtatggacaaccggaacaatgggtgaaatcacaccgagtctccaaggagctcagtgcagcgtggtaataag

SEQ ID NO: 7679 - DNA, 1626 bp, Zea Mays
caaactgaagcaccaagaagaaattgatttgactttcccattcgtgttttatgacctgcttgagcaaagcttgcctttctacaacatgctgaagcgccaaataaggaagataagaggaccgcagcaaccaccattatcggaccctcctctgcctgtccctgcaaataaaaacattcttgtttgggttggagatgaacttttgccccgtaacagtgcaaaggtttcagtgtttgattcagttgtacaaggaggagatgctgtttgggaaggtttacgtatatatgatggaaaagtattcaaattagatgaacatttggacagattgtttgattctgcaaaagctatggccttcagcaatgtgcctactcgtgattggattaaggatgccatctttaagactctgattgcaaatggaatgttcaacaatgctcatataaggctcacgctcacccgtgggaaaaaggtgacatctggaatgagtccagctttcaatctttatgggtgtgccttgattgtgcttgcagagtggaaaccaccagtttatgataactctcatgggataaaattggttactgccaccacacgtcgaaattctccaaatagtatagattccaagattcatcacaacaatcttatcaacaatattctggcaaagatagaaggtaatcttgcccaggctgaggatgccattatgctagataaggatggctttgtatcagaaacaaacgcaacaaatatttttatggtcaaaaagggaattgtattgacacctcatgctgactattgccttccaggcattacgcgagcaactgtcatggatcttgtggtgaaagaaaactttgtgttacatgaacgacgcattagtctgtcagaattccatgctgcagatgaggtatggacaaccggaacaatgggtgaaatcacaccggttgtaatgattgatggacgtgaaatcggcgacgggaaaattggtccagtcactagacaaatccagaaggcatacaagatcctgacagcagggcaaggagtaccgataccgggggttgctgaggtgtaattgtctaagatgcatccctttatctagttaggatcagtcccccaaggagctcaatgatatcaggctagcgcaacaataaattaataatctgcattgatcactgatgttcaaagacaccatggtgccgtttggttcacatatttgtaacgtaatgggtaagtgataacgttaaattatgtttgttttagtccaaccgtaatcagatatcatactaaaaattgataccgaactattcaaacttgttacggccagtaatcgagtgtaaaccattaccctttacgttacatttcgcgaaccaaacaacactcagtcattgttattcgaaacaggatactgctggagattataaacgcaataagccattgcgctggcatgcgctcgtatgcgtctaagttggctaatactctaatccccgtgcccgtgcatacgattccagtgcattttgtcgaatctgacttgtttttttttcctgtgaaacaaagagagaatatgtagacgcgaattgcccacctctaataaatttccttgcagcatgcattatatatctttgcagccttacaggaaagcac

SEQ ID NO: 7680 - DNA, 2402 bp, Zea Mays
ctggcagtcgcgtcgacctccccgccgcgcccacggcactcgccactccacccaccaggccaagcacgcggcggcgacgccaaagcatcagggcaccaatggttgtgctccccgcggccccgcggcccctactcctacagtcctaaataatagccttccattccaatctgttcccacagttcagtcgcacactcgggcgggtcaaattcgactcgggaggaaccaaccacccggaaattcccccctcctccagtctccacttgatcggcgaggcgctgcggccgcgggcgaatggcgtcggaggcggagtcgcccgtggtgatccacgcgtggtcggcgccgcgctccctcagcaccagcctcatgtactccttcgcccagagggacgacatggaggtgcttgacgagcctctctacgcaaatttcctgcgtgccacaggcgtcgacaggccctaccggcaggagctcctgtccaaaatggaccctgatggaaataaggttgtcaaggaggtgatttttggcccaggggacaaaaagtatcgttactgcaagcacatctcaaagcaacatctcccaaatctgtcaagcgacctcatgaagaagggaaaacatttcatattgatacggaaccctctagatatactggccgtcctaagtggtctctgtgaggatctgggcattcctttccagccacaaatgttgaaatgggaagctggccccaaggaatttgatggtatatgggcaccctggtggtatgggagtgtgcacaagtcttcaggtttctctaagcctcgccaatatcctctgactttcccattcgtgttttatgacctgcttgagcaaagcttgcctttctacaacatgctgaagcgccaaataaggaagataagaggaccgcagcaaccaccattatcggaccctcctctgcctgtccctgcaaataaaaacattcttgtttgggttggagatgaacttttgccccgtaacagtgcaaaggtttcagtgtttgattcagttgtacaaggaggagatgctgtttgggaaggtttacgtatatatgatggaaaagtattcaaattagatgaacatttggacagattgtttgattctgcaaaagctatggccttcagcaatgtgcctactcgtgattggattaaggatgccatctttaagactctgattgcaaatggaatgttcaacaatgctcatataaggctcacgctcacccgtgggaaaaaggtgacatctggaatgagtccagctttcaatctttatgggtgtgccttgattgtgcttgcagagtggaaaccaccagtttatgataactctcatgggataaaattggttactgccaccacacgtcgaaattctccaaatagtatagattccaagattcatcacaacaatcttatcaacaatattctggcaaagatagaaggtaatcttgcccaggctgaggatgccattatgctagataaggatggctttgtatcagaaacaaacgcaacaaatatttttatggtcaaaaagggaattgtattgacacctcatgctgactattgccttccaggcattacgcgagcaactgtcatggatcttgtggtgaaagaaaactttgtgttacatgaacgacgcattagtctgtcagaattccatgctgcagatgaggtatggacaaccggaacaatgggtgaaatcacaccggttgtaatgattgatggacgtgaaatcggcgacgggaaaattggtccagtcactagacaaatccagaaggcatacaagatcctgacagcagggcaaggagtaccgataccgggggttgctgaggtgtaattgtctaagatgcatccctttatctagttaggatcagtcccccaaggagctcaatgatatcaggctagcgcaacaataaattaataatctgcattgatcactgatgttcaaagacaccatggtgccgtttggttcacatatttgtaacgtaatgggtaagtgataacgttaaattatgtttgttttagtccaaccgtaatcagatatcatactaaaaattgataccgaactattcaaacttgttacggccagtaatcgagtgtaaaccattaccctttacgttacatttcgcgaaccaaacaacactcagtcattgttattcgaaacaggatactgctggagattataaacgcaataagccattgcgctggcatgcgctcgtatgcgtctaagttggctaatactctaatccccgtgcccgtgcatacgattccagtgcattttgtcgaatctgacttgtttttttttcctgtgaaacaaagagagaatatgtagacgcgaattgcccacctctaataaatttccttgcagcatgcattatatatctttgcagccttacaggaaagcac

SEQ ID NO: 7681 - DNA, 2402 bp, Zea Mays
ctggcagtcgcgtcgacctccccgccgcgcccacggcactcgccactccacccaccaggccaagcacgcggcggcgacgccaaagcatcagggcaccaatggttgtgctccccgcggccccgcggcccctactcctacagtcctaaataatagccttccattccaatctgttcccacagttcagtcgcacactcgggcgggtcaaattcgactcgggaggaaccaaccacccggaaattcccccctcctccagtctccacttgatcggcgaggcgctgcggccgcgggcgaatggcgtcggaggcggagtcgcccgtggtgatccacgcgtggtcggcgccgcgctccctcagcaccagcctcatgtactccttcgcccagagggacgacatggaggtgcttgacgagcctctctacgcaaatttcctgcgtgccacaggcgtcgacaggccctaccggcaggagctcctgtccaaaatggaccctgatggaaataaggttgtcaaggaggtgatttttggcccaggggacaaaaagtatcgttactgcaagcacatctcaaagcaacatctcccaaatctgtcaagcgacctcatgaagaagggaaaacatttcatattgatacggaaccctctagatatactgccatcttttgataaagtcgttccaccatccttcatggagcttggcataggcgaacttgtctcaatatacagtgaattatgtggacttgggagcccaccccctgtgatagatgcagatgatctgcaacaggatcctgaggccgtcctaagtggtctctgtgaggatctgggcattcctttccagccacaaatgttgaaatgggaagctggccccaaggaatttgatggtatatgggcaccctggtggtatgggagtgtgcacaagtcttcaggtttctctaagcctcgccaatatcctctgactttcccattcgtgttttatgacctgcttgagcaaagcttgcctttctacaacatgctgaagcgccaaataaggaagataagaggaccgcagcaaccaccattatcggaccctcctctgcctgtccctgcaaataaaaacattcttgtttgggttggagatgaacttttgccccgtaacagtgcaaaggtttcagtgtttgattcagttgtacaaggaggagatgctgtttgggaaggtttacgtatatatgatggaaaagtattcaaattagatgaacatttggacagattgtttgattctgcaaaagctatggccttcagcaatgtgcctactcgtgattggattaaggatgccatctttaagactctgattgcaaatggaatgttcaacaatgctcatataaggctcacgctcacccgtgggaaaaagagtatagattccaagattcatcacaacaatcttatcaacaatattctggcaaagatagaaggtaatcttgcccaggctgaggatgccattatgctagataaggatggctttgtatcagaaacaaacgcaacaaatatttttatggtcaaaaagggaattgtattgacacctcatgctgactattgccttccaggcattacgcgagcaactgtcatggatcttgtggtgaaagaaaactttgtgttacatgaacgacgcattagtctgtcagaattccatgctgcagatgaggtatggacaaccggaacaatgggtgaaatcacaccggttgtaatgattgatggacgtgaaatcggcgacgggaaaattggtccagtcactagacaaatccagaaggcatacaagatcctgacagcagggcaaggagtaccgataccgggggttgctgaggtgtaattgtctaagatgcatccctttatctagttaggatcagtcccccaaggagctcaatgatatcaggctagcgcaacaataaattaataatctgcattgatcactgatgttcaaagacaccatggtgccgtttggttcacatatttgtaacgtaatgggtaagtgataacgttaaattatgtttgttttagtccaaccgtaatcagatatcatactaaaaattgataccgaactattcaaacttgttacggccagtaatcgagtgtaaaccattaccctttacgttacatttcgcgaaccaaacaacactcagtcattgttattcgaaacaggatactgctggagattataaacgcaataagccattgcgctggcatgcgctcgtatgcgtctaagttggctaatactctaatccccgtgcccgtgcatacgattccagtgcattttgtcgaatctgacttgtttttttttcctgtgaaacaaagagagaatatgtagacgcgaattgcccacctctaataaatttccttgcagcatgcattatatatctttgcagccttacaggaaagcac

SEQ ID NO: 7682 - DNA, 2489 bp, Zea Mays
gtcgggacctggcagtcgcgtcgacctccccgccgcgcccacggcactcgccactccacccaccaggccaagcacgcggcggcgacgccaaagcatcagggcaccaatggttgtgctccccgcggccccgcggcccctactcctacagtcctaaataatagccttccattccaatctgttcccacagttcagtcgcacactcgggcgggtcaaattcgactcgggaggaaccaaccacccggaaattcccccctcctccagtctccacttgatcggcgaggcgctgcggccgcgggcgaatggcgtcggaggcggagtcgcccgtggtgatccacgcgtggtcggcgccgcgctccctcagcaccagcctcatgtactccttcgcccagagggacgacatggaggtgcttgacgagcctctctacgcaaatttcctgcgtgccacaggcgtcgacaggccctaccggcaggagctcctgtccaaaatggaccctgatggaaataaggttgtcaaggaggtgatttttggcccaggggacaaaaagtatcgttactgcaagcacatctcaaagcaacatctcccaaatctgtcaagcgacctcatgaagaagggaaaacatttcatattgatacggaaccctctagatatactgccatcttttgataaagtcgttccaccatccttcatggagcttggcataggcgaacttgtctcaatatacagtgaattatgtggacttgggagcccaccccctgtgatagatgcagatgatctgcaacaggatcctgagatgggaagctggccccaaggaatttgatggtatatgggcaccctggtggtatgggagtgtgcacaagtcttcaggtttctctaagcctcgccaatatcctctgactttcccattcgtgttttatgacctgcttgagcaaagcttgcctttctacaacatgctgaagcgccaaataaggaagataagaggaccgcagcaaccaccattatcggaccctcctctgcctgtccctgcaaataaaaacattcttgtttgggttggagatgaacttttgccccgtaacagtgcaaaggtttcagtgtttgattcagttgtacaaggaggagatgctgtttgggaaggtttacgtatatatgatggaaaagtattcaaattagatgaacatttggacagattgtttgattctgcaaaagctatggccttcagcaatgtgcctactcgtgattggattaaggatgccatctttaagactctgattgcaaatggaatgttcaacaatgctcatataaggctcacgctcacccgtgggaaaaaggtgacatctggaatgagtccagctttcaatctttatgggtgtgccttgattgtgcttgcagagtggaaaccaccagtttatgataactctcatgggataaaattggttactgccaccacacgtcgaaattctccaaatagtatagattccaagattcatcacaacaatcttatcaacaatattctggcaaagatagaaggtaatcttgcccaggctgaggatgccattatgctagataaggatggctttgtatcagaaacaaacgcaacaaatatttttatggtcaaaaagggaattgtattgacacctcatgctgactattgccttccaggcattacgcgagcaactgtcatggatcttgtggtgaaagaaaactttgtgttacatgaacgacgcattagtctgtcagaattccatgctgcagatgaggtatggacaaccggaacaatgggtgaaatcacaccggttgtaatgattgatggacgtgaaatcggcgacgggaaaattggtccagtcactagacaaatccagaaggcatacaagatcctgacagcagggcaaggagtaccgataccgggggttgctgaggtgtaattgtctaagatgcatccctttatctagttaggatcagtcccccaaggagctcaatgatatcaggctagcgcaacaataaattaataatctgcattgatcactgatgttcaaagacaccatggtgccgtttggttcacatatttgtaacgtaatgggtaagtgataacgttaaattatgtttgttttagtccaaccgtaatcagatatcatactaaaaattgataccgaactattcaaacttgttacggccagtaatcgagtgtaaaccattaccctttacgttacatttcgcgaaccaaacaacactcagtcattgttattcgaaacaggatactgctggagattataaacgcaataagccattgcgctggcatgcgctcgtatgcgtctaagttggctaatactctaatccccgtgcccgtgcatacgattccagtgcattttgtcgaatctgacttgtttttttttcctgtgaaacaaagagagaatatgtagacgcgaattgcccacctctaataaatttccttgcagcatgcattatatatctttgcagccttacaggaaagcac

SEQ ID NO: 7683 - DNA, 2540 bp, Zea Mays
cgggtcgggacctggcagtcgcgtcgacctccccgccgcgcccacggcactcgccactccacccaccaggccaagcacgcggcggcgacgccaaagcatcagggcaccaatggttgtgctccccgcggccccgcggcccctactcctacagtcctaaataatagccttccattccaatctgttcccacagttcagtcgcacactcgggcgggtcaaattcgactcgggaggaaccaaccacccggaaattcccccctcctccagtctccacttgatcggcgaggcgctgcggccgcgggcgaatggcgtcggaggcggagtcgcccgtggtgatccacgcgtggtcggcgccgcgctccctcagcaccagcctcatgtactccttcgcccagagggacgacatggaggtgcttgacgagcctctctacgcaaatttcctgcgtgccacaggcgtcgacaggccctaccggcaggagctcctgtccaaaatggaccctgatggaaataaggttgtcaaggaggtgatttttggcccaggggacaaaaagtatcgttactgcaagcacatctcaaagcaacatctcccaaatctgtcaagcgacctcatgaagaagggaaaacatttcatattgatacggaaccctctagatatactgccatcttttgataaagtcgttccaccatccttcatggagcttggcataggcgaacttgtctcaatatacagtgaattatgtggacttgggagcccaccccctgtgatagatgcagatgatctgcaacaggatcctgaggccgtcctaagtggtctctgtgaggatctgggcattcctttccagccacaaatgttgaaatgggaagctggccccaaggaatttgatggtatatgggcaccctggtggtatgggagtgtgcacaagtcttcaggtttctctaagcctcgccaatatcctctgactttcccattcgtgttttatgacctgcttgagcaaagcttgcctttctacaacatgctgaagcgccaaataaggaagataagaggaccgcagcaaccaccattatcggaccctcctctgcctgtccctgcaaataaaaacattcttgtttgggttggagatgaacttttgccccgtaacagtgcaaagtgtttgattcagttgtacaaggaggagatgctgtttgggaaggtttacgtatatatgatggaaaagtattcaaattagatgaacatttggacagattgtttgattctgcaaaagctatggccttcagcaatgtgcctactcgtgattggattaaggatgccatctttaagactctgattgcaaatggaatgttcaacaatgctcatataaggctcacgctcacccgtgggaaaaaggtgacatctggaatgagtccagctttcaatctttatgggtgtgccttgattgtgcttgcagagtggaaaccaccagtttatgataactctcatgggataaaattggttactgccaccacacgtcgaaattctccaaatagtatagattccaagattcatcacaacaatcttatcaacaatattctggcaaagaaggtaatcttgcccaggctgaggatgccattatgctagataaggatggctttgtatcagaaacaaacgcaacaaatatttttatggtcaaaaagggaattgtattgacacctcatgctgactattgccttccaggcattacgcgagcaactgtcatggatcttgtggtgaaagaaaactttgtgttacatgaacgacgcattagtctgtcagaattccatgctgcagatgaggtatggacaaccggaacaatgggtgaaatcacaccggttgtaatgattgatggacgtgaaatcggcgacgggaaaattggtccagtcactagacaaatccagaaggcatacaagatcctgacagcagggcaaggagtaccgataccgggggttgctgaggtgtaattgtctaagatgcatccctttatctagttaggatcagtcccccaaggagctcaatgatatcaggctagcgcaacaataaattaataatctgcattgatcactgatgttcaaagacaccatggtgccgtttggttcacatatttgtaacgtaatgggtaagtgataacgttaaattatgtttgttttagtccaaccgtaatcagatatcatactaaaaattgataccgaactattcaaacttgttacggccagtaatcgagtgtaaaccattaccctttacgttacatttcgcgaaccaaacaacactcagtcattgttattcgaaacaggatactgctggagattataaacgcaataagccattgcgctggcatgcgctcgtatgcgtctaagttggctaatactctaatccccgtgcccgtgcatacgattccagtgcattttgtcgaatctgacttgtttttttttcctgtgaaacaaagagagaatatgtagacgcgaattgcccacctctaataaatttccttgcagcatgcattatatatctttgcagccttacaggaaagcac

SEQ ID NO: 7684 - DNA, 2619 bp, Zea Mays
gtgaccttttgctagctggggaagtggggagtagggaggcgggtcgggacctggcagtcgcgtcgacctccccgccgcgcccacggcactcgccactccacccaccaggccaagcacgcggcggcgacgccaaagcatcagggcaccaatggttgtgctccccgcggccccgcggcccctactcctacagtcctaaataatagccttccattccaatctgttcccacagttcagtcgcacactcgggcgggtcaaattcgactcgggaggaaccaaccacccggaaattcccccctcctccagtctccacttgatcggcgaggcgctgcggccgcgggcgaatggcgtcggaggcggagtcgcccgtggtgatccacgcgtggtcggcgccgcgctccctcagcaccagcctcatgtactccttcgcccagagggacgacatggaggtgcttgacgagcctctctacgcaaatttcctgcgtgccacaggcgtcgacaggccctaccggcaggagctcctgtccaaaatggaccctgatggaaataaggttgtcaaggaggtgatttttggcccaggggacaaaaagtatcgttactgcaagcacatctcaaagcaacatctcccaaatctgtcaagcgacctcatgaagaagggaaaacatttcatattgatacggaaccctctagatatactgccatcttttgataaagtcgttccaccatccttcatggagcttggcataggcgaacttgtctcaatatacagtgaattatgtggacttgggagcccaccccctgtgatagatgcagatgatctgcaacaggatcctgaggccgtcctaagtggtctctgtgaggatctgggcattcctttccagccacaaatgttgaaatgggaagctggccccaaggaatttgatggtatatgggcaccctggtggtatgggagtgtgcacaagtcttcaggtttctctaagcctcgccaatatcctctgactttcccattcgtgttttatgacctgcttgagcaaagcttgcctttctacaacatgctgaagcgccaaataaggaagataagaggaccgcagcaaccaccattatcggaccctcctctgcctgtccctgcaaataaaaacattcttgtttgggttggagatgaacttttgccccgtaacagtgcaaaggtttcagtgtttgattcagttgtacaaggaggagatgctgtttgggaaggtttacgtatatatgatggaaaagtattcaaattagatgaacatttggacagattgtttgattctgcaaaagctatggccttcagcaatgtgcctactcgtgattggagctgtcatttgcacatgctttggtacagattaaggatgccatctttaagactctgattgcaaatggaatgttcaacaatgctcatataaggctcacgctcacccgtgggaaaaaggtgacatctggaatgagtccagctttcaatctttatgggtgtgccttgattgtgcttgcagagtggaaaccaccagtttatgataactctcatgggataaaattggttactgccaccacacgtcgaaattctccaaatagtatagattccaagattcatcacaacaatcttatcaacaatattctggcaaagatagaaggtaatcttgcccaggctgaggatgccattatgctagataaggatggctttgtatcagaaacaaacgcaacaaatatttttatggtcaaaaagggaattgtattgacacctcatgctgactattgccttccaggcattacgcgagcaactgtcatggatcttgtggtgaaagaaaactttgtgttacatgaacgacgcattagtctgtcagaattccatgctgcagatgaggtatggacaaccggaacaatgggtgaaatcacaccggttgtaatgattgatggacgtgaaatcggcgacgggaaaattggtccagtcactagacaaatccagaaggcatacaagatcctgacagcagggcaaggagtaccgataccgggggttgctgaggtgtaattgtctaagatgcatccctttatctagttaggatcagtcccccaaggagctcaatgatatcaggctagcgcaacaataaattaataatctgcattgatcactgatgttcaaagacaccatggtgccgtttggttcacatatttgtaacgtaatgggtaagtgataacgttaaattatgtttgttttagtccaaccgtaatcagatatcatactaaaaattgataccgaactattcaaacttgttacggccagtaatcgagtgtaaaccattaccctttacgttacatttcgcgaaccaaacaacactcagtcattgttattcgaaacaggatactgctggagattataaacgcaataagccattgcgctggcatgcgctcgtatgcgtctaagttggctaatactctaatccccgtgcccgtgcatacgattccagtgcattttgtcgaatctgacttgtttttttttcctgtgaaacaaagagagaatatgtagacgcgaattgcccacctctaataaatttccttgcagcatgcattatatatctttgcagccttacaggaaagcac

SEQ ID NO: 7685 - DNA, 2602 bp, Zea Mays
cgccgtagtgaccttttgctagctggggaagtggggagtagggaggcgggtcgggacctggcagtcgcgtcgacctccccgccgcgcccacggcactcgccactccacccaccaggccaagcacgcggcggcgacgccaaagcatcagggcaccaatggttgtgctccccgcggccccgcggcccctactcctacagtcctaaataatagccttccattccaatctgttcccacagttcagtcgcacactcgggcgggtcaaattcgactcgggaggaaccaaccacccggaaattcccccctcctccagtctccacttgatcggcgaggcgctgcggccgcgggcgaatggcgtcggaggcggagtcgcccgtggtgatccacgcgtggtcggcgccgcgctccctcagcaccagcctcatgtactccttcgcccagagggacgacatggaggtgcttgacgagcctctctacgcaaatttcctgcgtgccacaggcgtcgacaggccctaccggcaggagctcctgtccaaaatggaccctgatggaaataaggttgtcaaggaggtgatttttggcccaggggacaaaaagtatcgttactgcaagcacatctcaaagcaacatctcccaaatctgtcaagcgacctcatgaagaagggaaaacatttcatattgatacggaaccctctagatatactgccatcttttgataaagtcgttccaccatccttcatggagcttggcataggcgaacttgtctcaatatacagtgaattatgtggacttgggagcccaccccctgtgatagatgcagatgatctgcaacaggatcctgaggccgtcctaagtggtctctgtgaggatctgggcattcctttccagccacaaatgttgaaatgggaagctggccccaaggaatttgatggtatatgggcaccctggtggtatgggagtgtgcacaagtcttcaggtttctctaagcctcgccaatatcctctgactttcccattcgtgttttatgacctgcttgagcaaagcttgcctttctacaacatgctgaagcgccaaataaggaagataagaggaccgcagcaaccaccattatcggaccctcctctgcctgtccctgcaaataaaaacattcttgtttgggttggagatgaacttttgccccgtaacagtgcaaaggtttcagtgtttgattcagttgtacaaggaggagatgctgtttgggaaggtttacgtatatatgatggaaaagtattcaaattagatgaacatttggacagattgtttgattctgcaaaagctatggccttcagcaatgtgcctactcgtgattggattaaggatgccatctttaagactctgattgcaaatggaatgttcaacaatgctcatataaggctcacgctcacccgtgggaaaaagtgaaggtgacatctggaatgagtccagctttcaatctttatgggtgtgccttgattgtgcttgcagagtggaaaccaccagtttatgataactctcatgggataaaattggttactgccaccacacgtcgaaattctccaaatagtatagattccaagattcatcacaacaatcttatcaacaatattctggcaaagatagaaggtaatcttgcccaggctgaggatgccattatgctagataaggatggctttgtatcagaaacaaacgcaacaaatatttttatggtcaaaaagggaattgtattgacacctcatgctgactattgccttccaggcattacgcgagcaactgtcatggatcttgtggtgaaagaaaactttgtgttacatgaacgacgcattagtctgtcagaattccatgctgcagatgaggtatggacaaccggaacaatgggtgaaatcacaccggttgtaatgattgatggacgtgaaatcggcgacgggaaaattggtccagtcactagacaaatccagaaggcatacaagatcctgacagcagggcaaggagtaccgataccgggggttgctgaggtgtaattgtctaagatgcatccctttatctagttaggatcagtcccccaaggagctcaatgatatcaggctagcgcaacaataaattaataatctgcattgatcactgatgttcaaagacaccatggtgccgtttggttcacatatttgtaacgtaatgggtaagtgataacgttaaattatgtttgttttagtccaaccgtaatcagatatcatactaaaaattgataccgaactattcaaacttgttacggccagtaatcgagtgtaaaccattaccctttacgttacatttcgcgaaccaaacaacactcagtcattgttattcgaaacaggatactgctggagattataaacgcaataagccattgcgctggcatgcgctcgtatgcgtctaagttggctaatactctaatccccgtgcccgtgcatacgattccagtgcattttgtcgaatctgacttgtttttttttcctgtgaaacaaagagagaatatgtagacgcgaattgcccacctctaataaatttccttgcagcatgcattatatatctttgcagccttacaggaaagcac

SEQ ID NO: 7686 - DNA, 1890 bp, Zea Mays
cttttgctagctggggaagtggggagtagggaggcgggtcgggacctggcagtcgcgtcgacctccccgccgcgcccacggcactcgccactccacccaccaggccaagcacgcggcggcgacgccaaagcatcagggcaccaatggttgtgctccccgcggccccgcggcccctactcctacagtcctaaataatagccttccattccaatctgttcccacagttcagtcgcacactcgggcgggtcaaattcgactcgggaggaaccaaccacccggaaattcccccctcctccagtctccacttgatcggcgaggcgctgcggccgcgggcgaatggcgtcggaggcggagtcgcccgtggtgatccacgcgtggtcggcgccgcgctccctcagcaccagcctcatgtactccttcgcccagagggacgacatggaggtgcttgacgagcctctctacgcaaatttcctgcgtgccacaggcgtcgacaggccctaccggcaggagctcctgtccaaaatggaccctgatggaaataaggttgtcaaggaggtgatttttggcccaggggacaaaaagtatcgttactgcaagcacatctcaaagcaacatctcccaaatctgtcaagcgacctcatgaagaagggaaaacatttcatattgatacggaaccctctagatatactgccatcttttgataaagtcgttccaccatccttcatggagcttggcataggcgaacttgtctcaatatacagtgaattatgtggacttgggagcccaccccctgtgatagatgcagatgatctgcaacaggatcctgaggccgtcctaagtggtctctgtgaggatctgggcattcctttccagccacaaatgttgaaatgggaagctggccccaaggaatttgatggtatatgggcaccctggtggtatgggagtgtgcacaagtcttcaggtttctctaagcctcgccaatatcctctgactttcccattcgtgttttatgacctgcttgagcaaagcttgcctttctacaacatgctgaagcgccaaataaggaagataagaggaccgcagcaaccaccattatcggaccctcctctgcctgtccctgcaaataaaaacattcttgtttgggttggagatgaacttttgccccgtaacagtgcaaaggtttcagtgtttgattcagttgtacaaggaggagatgctgtttgggaaggtttacgtatatatgatggaaaagtattcaaattagatgaacatttggacagattgtttgattctgcaaaagctatggccttcagcaatgtgcctactcgtgattggattaaggatgccatctttaagactctgattgcaaatggaatgttcaacaatgctcatataaggctcacgctcacccgtgggaaaaaggtgacatctggaatgagtccagctttcaatctttatgggtgtgccttgattgtgcttgcagagtggaaaccaccagtttatgataactctcatgggataaaattggttactgccaccacacgtcgaaattctccaaatagtatagattccaagattcatcacaacaatcttatcaacaatattctggcaaagatagaaggtaatcttgcccaggctgaggatgccattatgctagataaggatggctttgtatcagaaacaaacgcaacaaatatttttatggtcaaaaagggaattgtattgacacctcatgctgactattgccttccaggcattacgcgagcaactgtcatggatcttgtggtgaaagaaaactttgtgttacatgaacgacgcattagtctgtcagaattccatgctgcagatgagatgaactaatatgacaagatgaagctcacttgatcaaag

SEQ ID NO: 7687 - DNA, 1901 bp, Zea Mays
ctggcagtcgcgtcgacctccccgccgcgcccacggcactcgccactccacccaccaggccaagcacgcggcggcgacgccaaagcatcagggcaccaatggttgtgctccccgcggccccgcggcccctactcctacagtcctaaataatagccttccattccaatctgttcccacagttcagtcgcacactcgggcgggtcaaattcgactcgggaggaaccaaccacccggaaattcccccctcctccagtctccacttgatcggcgaggcgctgcggccgcgggcgaatggcgtcggaggcggagtcgcccgtggtgatccacgcgtggtcggcgccgcgctccctcagcaccagcctcatgtactccttcgcccagagggacgacatggaggtgcttgacgagcctctctacgcaaatttcctgcgtgccacaggcgtcgacaggccctaccggcaggagctcctgtccaaaatggaccctgatggaaataaggttgtcaaggaggtgatttttggcccaggggacaaaaagtatcgttactgcaagcacatctcaaagcaacatctcccaaatctgtcaagcgacctcatgaagaagggaaaacatttcatattgatacggaaccctctagatatactgccatcttttgataaagtcgttccaccatccttcatggagcttggcataggcgaacttgtctcaatatacagtgaattatgtggacttgggagcccaccccctgtgatagatgcagatgatctgcaacaggatcctgagatgggaagctggccccaaggaatttgatggtatatgggcaccctggtggtatgggagtgtgcacaagtcttcaggtttctctaagcctcgccaatatcctctgactttcccattcgtgttttatgacctgcttgagcaaagcttgcctttctacaacatgctgaagcgccaaataaggaagataagaggaccgcagcaaccaccattatcggaccctcctctgcctgtccctgcaaataaaaacattcttgtttgggttggagatgaacttttgccccgtaacagtgcaaaggtttcagtgtttgattcagttgtacaaggaggagatgctgtttgggaaggtttacgtatatatgatggaaaagtattcaaattagatgaacatttggacagattgtttgattctgcaaaagctatggccttcagcaatgtgcctactcgtgattggattaaggatgccatctttaagactctgattgcaaatggaatgttcaacaatgctcatataaggctcacgctcacccgtgggaaaaaggtgacatctggaatgagtccagctttcaatctttatgggtgtgccttgattgtgcttgcagagtggaaaccaccagtttatgataactctcatgggataaaattggttactgccaccacacgtcgaaattctccaaatagtatagattccaagattcatcacaacaatcttatcaacaatattctggcaaagatagaaggtaatcttgcccaggctgaggatgccattatgctagataaggatggctttgtatcagaaacaaacgcaacaaatatttttatggtcaaaaagggaattgtattgacacctcatgctgactattgccttccaggcattacgcgagcaactgtcatggatcttgtggtgaaagaaaactttgtgttacatgaacgacgcattagtctgtcagaattccatgctgcagatgaggcgcggacgcgcatggccaaggtgtgtgttgctgctgccgcggcacagatgccactgcagcacatgtcgctgctgccgcagaagctgccctggacgctaccgctgcaggcacagtcggcttgggcatgggttctttccccacactcctgtcgca

SEQ ID NO: 7688 - DNA, 1874 bp, Zea Mays
ctggcagtcgcgtcgacctccccgccgcgcccacggcactcgccactccacccaccaggccaagcacgcggcggcgacgccaaagcatcagggcaccaatggttgtgctccccgcggccccgcggcccctactcctacagtcctaaataatagccttccattccaatctgttcccacagttcagtcgcacactcgggcgggtcaaattcgactcgggaggaaccaaccacccggaaattcccccctcctccagtctccacttgatcggcgaggcgctgcggccgcgggcgaatggcgtcggaggcggagtcgcccgtggtgatccacgcgtggtcggcgccgcgctccctcagcaccagcctcatgtactccttcgcccagagggacgacatggaggtgcttgacgagcctctctacgcaaatttcctgcgtgccacaggcgtcgacaggccctaccggcaggagctcctgtccaaaatggaccctgatggaaataaggttgtcaaggaggtgatttttggcccaggggacaaaaagtatcgttactgcaagcacatctcaaagcaacatctcccaaatctgtcaagcgacctcatgaagaagggaaaacatttcatattgatacggaaccctctagatatactgccatcttttgataaagtcgttccaccatccttcatggagcttggcataggcgaacttgtctcaatatacagtgaattatgtggacttgggagcccaccccctgtgatagatgcagatgatctgcaacaggatcctgaggccgtcctaagtggtctctgtgaggatctgggcattcctttccagccacaaatgttgaaatgggaagctggccccaaggaatttgatggtatatgggcaccctggtggtatgggagtgtgcacaagtcttcaggtttctctaagcctcgccaatatcctctgactttcccattcgtgttttatgacctgcttgagcaaagcttgcctttctacaacatgctgaagcgccaaataaggaagataagaggaccgcagcaaccaccattatcggaccctcctctgcctgtccctgcaaataaaaacattcttgtttgggttggagatgaacttttgccccgtaacagtgcaaaggtttcagtgtttgattcagttgtacaaggaggagatgctgtttgggaaggtttacgtatatatgatggaaaagtattcaaattagatgaacatttggacagattgtttgattctgcaaaagctatggccttcagcaatgtgcctactcgtgattggattaaggatgccatctttaagactctgattgcaaatggaatgttcaacaatgctcatataaggctcacgctcacccgtgggaaaaaggtgacatctggaatgagtccagctttcaatctttatgggtgtgccttgattgagtatagattccaagattcatcacaacaatcttatcaacaatattctggcaaagatagaaggtaatcttgcccaggctgaggatgccattatgctagataaggatggctttgtatcagaaacaaacgcaacaaatatttttatggtcaaaaagggaattgtattgacacctcatgctgactattgccttccaggcattacgcgagcaactgtcatggatcttgtggtgaaagaaaactttgtgttacatgaacgacgcattagtctgtcagaattccatgctgcagatgaggcgcggacgcgcatggccaaggtgtgtgttgctgctgccgcggcacagatgccactgcagcacatgtcgctgctgccgcagaagctgccctggacgctaccgctgcaggcacagtcggcttgggcatgggttctttccccacactcctgtcgca

SEQ ID NO: 7689 - DNA, 1971 bp, Zea Mays
cgggacctggcagtcgcgtcgacctccccgccgcgcccacggcactcgccactccacccaccaggccaagcacgcggcggcgacgccaaagcatcagggcaccaatggttgtgctccccgcggccccgcggcccctactcctacagtcctaaataatagccttccattccaatctgttcccacagttcagtcgcacactcgggcgggtcaaattcgactcgggaggaaccaaccacccggaaattcccccctcctccagtctccacttgatcggcgaggcgctgcggccgcgggcgaatggcgtcggaggcggagtcgcccgtggtgatccacgcgtggtcggcgccgcgctccctcagcaccagcctcatgtactccttcgcccagagggacgacatggaggtgcttgacgagcctctctacgcaaatttcctgcgtgccacaggcgtcgacaggccctaccggcaggagctcctgtccaaaatggaccctgatggaaataaggttgtcaaggaggtgatttttggcccaggggacaaaaagtatcgttactgcaagcacatctcaaagcaacatctcccaaatctgtcaagcgacctcatgaagaagggaaaacatttcatattgatacggaaccctctagatatactgccatcttttgataaagtcgttccaccatccttcatggagcttggcataggcgaacttgtctcaatatacagtgaattatgtggacttgggagcccaccccctgtgatagatgcagatgatctgcaacaggatcctgaggccgtcctaagtggtctctgtgaggatctgggcattcctttccagccacaaatgttgaaatgggaagctggccccaaggaatttgatggtatatgggcaccctggtggtatgggagtgtgcacaagtcttcaggtttctctaagcctcgccaatatcctctgactttcccattcgtgttttatgacctgcttgagcaaagcttgcctttctacaacatgctgaagcgccaaataaggaagataagaggaccgcagcaaccaccattatcggaccctcctctgcctgtccctgcaaataaaaacattcttgtttgggttggagatgaacttttgccccgtaacagtgcaaaggtttcagtgtttgattcagttgtacaaggaggagatgctgtttgggaaggtttacgtatatatgatggaaaagtattcaaattagatgaacatttggacagattgtttgattctgcaaaagctatggccttcagcaatgtgcctactcgtgattggattaaggatgccatctttaagactctgattgcaaatggaatgttcaacaatgctcatataaggctcacgctcacccgtgggaaaaagtgaaggtgacatctggaatgagtccagctttcaatctttatgggtgtgccttgattgtgcttgcagagtggaaaccaccagtttatgataactctcatgggataaaattggttactgccaccacacgtcgaaattctccaaatagtatagattccaagattcatcacaacaatcttatcaacaatattctggcaaagatagaaggtaatcttgcccaggctgaggatgccattatgctagataaggatggctttgtatcagaaacaaacgcaacaaatatttttatggtcaaaaagggaattgtattgacacctcatgctgactattgccttccaggcattacgcgagcaactgtcatggatcttgtggtgaaagaaaactttgtgttacatgaacgacgcattagtctgtcagaattccatgctgcagatgaggcgcggacgcgcatggccaaggtgtgtgttgctgctgccgcggcacagatgccactgcagcacatgtcgctgctgccgcagaagctgccctggacgctaccgctgcaggcacagtcggcttgggcatgggttctttccccacactcctgtcgca

SEQ ID NO: 7690 - DNA, 1907 bp, Zea Mays
gtcgggacctggcagtcgcgtcgacctccccgccgcgcccacggcactcgccactccacccaccaggccaagcacgcggcggcgacgccaaagcatcagggcaccaatggttgtgctccccgcggccccgcggcccctactcctacagtcctaaataatagccttccattccaatctgttcccacagttcagtcgcacactcgggcgggtcaaattcgactcgggaggaaccaaccacccggaaattcccccctcctccagtctccacttgatcggcgaggcgctgcggccgcgggcgaatggcgtcggaggcggagtcgcccgtggtgatccacgcgtggtcggcgccgcgctccctcagcaccagcctcatgtactccttcgcccagagggacgacatggaggtgcttgacgagcctctctacgcaaatttcctgcgtgccacaggcgtcgacaggccctaccggcaggagctcctgtccaaaatggaccctgatggaaataaggttgtcaaggaggtgatttttggcccaggggacaaaaagtatcgttactgcaagcacatctcaaagcaacatctcccaaatctgtcaagcgacctcatgaagaagggaaaacatttcatattgatacggaaccctctagatatactgccatcttttgataaagtcgttccaccatccttcatggagcttggcataggcgaacttgtctcaatatacagtgaattatgtggacttgggagcccaccccctgtgatagatgcagatgatctgcaacaggatcctgaggccgtcctaagtggtctctgtgaggatctgggcattcctttccagccacaaatgttgaaatgggaagctggccccaaggaatttgatggtatatgggcaccctggtggtatgggagtgtgcacaagtcttcaggtttctctaagcctcgccaatatcctctgactttcccattcgtgttttatgacctgcttgagcaaagcttgcctttctacaacatgctgaagcgccaaataaggaagataagaggaccgcagcaaccaccattatcggaccctcctctgcctgtccctgcaaataaaaacattcttgtttgggttggagatgaacttttgccccgtaacagtgcaaaggtttcagtgtttgattcagttgtacaaggaggagatgctgtttgggaaggtttacgtatatatgatggaaaagtattcaaattagatgaacatttggacagattgtttgattctgcaaaagctatggccttcagcaatgtgcctactcgtgattggattaaggatgccatctttaagactctgattgcaaatggaatgttcaacaatgctcatataaggctcacgctcacccgtgggaaaaagagtggaaaccaccagtttatgataactctcatgggataaaattggttactgccaccacacgtcgaaattctccaaatagtatagattccaagattcatcacaacaatcttatcaacaatattctggcaaagatagaaggtaatcttgcccaggctgaggatgccattatgctagataaggatggctttgtatcagaaacaaacgcaacaaatatttttatggtcaaaaagggaattgtattgacacctcatgctgactattgccttccaggcattacgcgagcaactgtcatggatcttgtggtgaaagaaaactttgtgttacatgaacgacgcattagtctgtcagaattccatgctgcagatgaggcgcggacgcgcatggccaaggtgtgtgttgctgctgccgcggcacagatgccactgcagcacatgtcgctgctgccgcagaagctgccctggacgctaccgctgcaggcacagtcggcttgggcatgggttctttccccacactcctgtcgca

SEQ ID NO: 7691 - DNA, 1978 bp, Zea Mays
agggaggcgggtcgggacctggcagtcgcgtcgacctccccgccgcgcccacggcactcgccactccacccaccaggccaagcacgcggcggcgacgccaaagcatcagggcaccaatggttgtgctccccgcggccccgcggcccctactcctacagtcctaaataatagccttccattccaatctgttcccacagttcagtcgcacactcgggcgggtcaaattcgactcgggaggaaccaaccacccggaaattcccccctcctccagtctccacttgatcggcgaggcgctgcggccgcgggcgaatggcgtcggaggcggagtcgcccgtggtgatccacgcgtggtcggcgccgcgctccctcagcaccagcctcatgtactccttcgcccagagggacgacatggaggtgcttgacgagcctctctacgcaaatttcctgcgtgccacaggcgtcgacaggccctaccggcaggagctcctgtccaaaatggaccctgatggaaataaggttgtcaaggaggtgatttttggcccaggggacaaaaagtatcgttactgcaagcacatctcaaagcaacatctcccaaatctgtcaagcgacctcatgaagaagggaaaacatttcatattgatacggaaccctctagatatactgccatcttttgataaagtcgttccaccatccttcatggagcttggcataggcgaacttgtctcaatatacagtgaattatgtggacttgggagcccaccccctgtgatagatgcagatgatctgcaacaggatcctgaggccgtcctaagtggtctctgtgaggatctgggcattcctttccagccacaaatgttgaaatgggaagctggccccaaggaatttgatggtatatgggcaccctggtggtatgggagtgtgcacaagtcttcaggtttctctaagcctcgccaatatcctctgactttcccattcgtgttttatgacctgcttgagcaaagcttgcctttctacaacatgctgaagcgccaaataaggaagataagaggaccgcagcaaccaccattatcggaccctcctctgcctgtccctgcaaataaaaacattcttgtttgggttggagatgaacttttgccccgtaacagtgcaaaggtttcagtgtttgattcagttgtacaaggaggagatgctgtttgggaaggtttacgtatatatgatggaaaagtattcaaattagatgaacatttggacagattgtttgattctgcaaaagctatggccttcagcaatgtgcctactcgtgattggattaaggatgccatctttaagactctgattgcaaatggaatgttcaacaatgctcatataaggctcacgctcacccgtgggaaaaaggtgacatctggaatgagtccagctttcaatctttatgggtgtgccttgattgtgcttgcagagtggaaaccaccagtttatgataactctcatgggataaaattggttactgccaccacacgtcgaaattctccaaatagtatagattccaagattcatcacaacaatcttatcaacaatattctggcaaagatagaaggtaatcttgcccaggctgaggatgccattatgctagataaggatggctttgtatcagaaacaaacgcaacaaatatttttatggtcaaaaagggaattgtattgacacctcatgctgactattgccttccaggcattacgcgagcaactgtcatggatcttgtggtgaaagaaaactttgtgttacatgaacgacgcattagtctgtcagaattccatgctgcagatgaggcgcggacgcgcatggccaaggtgtgtgttgctgctgccgcggcacagatgccactgcagcacatgtcgctgctgccgcagaagctgccctggacgctaccgctgcaggcacagtcggcttgggcatgggttctttccccacactcctgtcgca

SEQ ID NO: 7692 - DNA, 1545 bp, Zea Mays
gccaaatacagaggagacagagagagggcgtcgcgatcgcaaccgcccgagcccggccggtcccatcatcgacgccagtgtgcattattacgccccgccatcagccggccggcaactcgacagggaaaaggaagacgcaccgctagagctgagatgtccttcttcttccgcatggcgtcgcggctgcggccgtcgacgccggaggaggtggtgcgctccatcaaggactccttcctcgcgctccacacgcgcacccacgccaaggctctggaagaggtcgagaaaaatatgtcatccttgagattgttgatctttggtgatggagaagtcgaaccaaatgaagagcaggtcctgcaaataacccttgagatttgcaaggaggacgtcatttccctgatcgtccaggatctgccttccttgggctggggagtaagaaaagatctggctatctgctggtgcatcttgcttaggcagaaggtcgatgaaacttattgctgtgtgcagtatcttgaaaatcatctggagcttttagatttccttgttggttgctacaagaacttggatattgcattgaactgtggaaatatgttaagagaatgcataaagtaccctacacttgcaaaatacatattggaatctggtagctttgagctgttctttgagtatgttgagcttccaaactttgatattgcttcagatgctctgaacaccttcaaggatctgcttaccaagcacgaagttgtagtcgcagagttcttgagttcccactacgagcagttttttgaactctactcaaggctcttgtcatcaactaattatgtaacaagaaggcaggcaatcaagttcctttcagagttcctgctagagactcataactctcaaataatgaagagatacattgtggaagttcgttttttaaatattatgatcaatctactaaaggattcaagcaaaaatatcagaatatgtgccttccatgtttttaaggtatttgttgccaatccgaacaagcctcgatgtatcgttgtagctttgctagacaatcgtagagaagttctgaagctactccacaatcttccttcaagtaaaggcgacgatgaactcgatgaggagaaagacctaatcattcaggaaatccagaagttggcataacacaaaagcatcaagttatcgtttagcaatgcaagactctccttatagaggacatattgccaaggccagaaccatgtatatcacattgcacatgtagccttcaagagttgtatttttggaggttttttcttttcttttggtctcagaaaaccatagcaaagtattctctttttgaaggaattatatacatgattttggtgaccaaggaccgttggattaattgagctagacccataactaatctagcaatgaattaaagaattctaaggaccatgttgaaaatagcaaagcatacttgagaagcttctagatgattggagaagaggatgcatgagtcatggatgccatgatttgtagtgaagtatctagtacactagaagcatgatattttac

SEQ ID NO: 7693 - DNA, 1680 bp, Zea Mays
agagggcgtcgcgatcgcaaccgcccgagcccggccggtcccatcatcgacgccagtgtgcattattacgccccgccatcagccggccggcaactcgacagggaaaaggaagacgcaccgctagagctgagatgtccttcttcttccgcatggcgtcgcggctgcggccgtcgacgccggaggaggtggtgcgctccatcaaggactccttcctcgcgctccacacgcgcacccacgccaaggctctggaagaggtcgagaaaaatatgtcatccttgagattgttgatctttggtgatggagaagtcgaaccaaatgaagagcaggtcctgcaaataacccttgagatttgcaaggaggacgtcatttccctgatcgtccaggatctgccttccttgggctggggagtaagaaaagatctggctatctgctggtgcatcttgcttaggcagaaggtcgatgaaacttattgctgtgtgcagtatcttgaaaatcatctggagcttttagatttccttgttggttgctacaagaacttggatattgcattgaactgtggaaatatgttaagagaatgcataaagtaccctacacttgcaaaatacatattggaatctggtagctttgagctgttctttgagtatgttgagcttccaaactttgatattgcttcagatgctctgaacaccttcaagattgttgcaggatctgcttaccaagcacgaagttgtagtcgcagagttcttgagttcccactacgagcaggtcactacttgttctgaaatacacctttggttatgtcaacaaaagaaaggcatcagaaaacttttttagataaagtttcattaaagcatatactccttgaatctatattattcatggcatactcacgtatgcattatatgttgttgcttcgctaatgtcttattcaaaaaatgtattgcaattgtgtcaatacctgcatgccagatatattctgtttgtttctgtttatcactctgattatgtaaactttatagttttttgaactctactcaaggctcttgtcatcaactaattatgtaacaagaaggcaggcaatcaagttcctttcagagttcctgctagagactcataactctcaaataatgaagagatacattgtggaagttcgttttttaaatattatgatcaatctactaaaggttattgtgcatgcatcatcacaggtgaaaatcttttgggattcaagcaaaaatatcagaatatgtgccttccatgtttttaaggtatttgttgccaatccgaacaagcctcgatgtatcgttgtagctttgctagacaatcgtagagaagttctgaagctactccacaatcttccttcaagtaaaggcgacgatgaactcgatgaggagaaagacctaatcattcaggaaatccagaagttggcataacacaaaagcatcaagttatcgtttagcaatgcaagactctccttatagaggacatattgccaaggccagaaccatgtatatcacattgcacatgtagccttcaagagttgtatttttggaggttttttcttttcttttggtctcagaaaaccatagcaaagtattctctttttgaaggaattatatacatgattttggtgaccaaggaccaaaaaaaatcaaactgaaataaagaaaatatgaaaaa

SEQ ID NO: 7694 - DNA, 1167 bp, Zea Mays
agagggcgtcgcgatcgcaaccgcccgagcccggccggtcccatcatcgacgccagtgtgcattattacgccccgccatcagccggccggcaactcgacagggaaaaggaagacgcaccgctagagctgagatgtccttcttcttccgcatggcgtcgcggctgcggccgtcgacgccggaggaggtggtgcgctccatcaaggactccttcctcgcgctccacacgcgcacccacgccaaggctctggaagaggtcgagaaaaatatgtcatccttgagattgttgatctttggtgatggagaagtcgaaccaaatgaagagcaggtcctgcaaataacccttgagatttgcaaggaggacgtcatttccctgatcgtccaggatctgccttccttgggctggggagtaagaaaagatctggctatctgctggtgcatcttgcttaggcagaaggtcgatgaaacttattgctgtgtgcagtatcttgaaaatcatctggagcttttagatttccttgttggttgctacaagaacttggatattgcattgaactgtggaaatatgttaagagaatgcataaagtaccctacacttgcaaaatacatattggaatctggtagctttgagctgttctttgagtatgttgagcttccaaactttgatattgcttcagatgctctgaacaccttcaaggatctgcttaccaagcacgaagttgtagtcgcagagttcttgagttcccactacgagcaggtatttgttgccaatccgaacaagcctcgatgtatcgttgtagctttgctagacaatcgtagagaagttctgaagctactccacaatcttccttcaagtaaaggcgacgatgaactcgatgaggagaaagacctaatcattcaggaaatccagaagttggcataacacaaaagcatcaagttatcgtttagcaatgcaagactctccttatagaggacatattgccaaggccagaaccatgtatatcacattgcacatgtagccttcaagagttgtatttttggaggttttttcttttcttttggtctcagaaaaccatagcaaagtattctctttttgaaggaattatatacatgattttggtgaccaaggaccaaaaaaaatcaaactgaaataaagaaaatatgaaaaa

SEQ ID NO: 7695 - DNA, 1684 bp, Zea Mays
agagggcgtcgcgatcgcaaccgcccgagcccggccggtcccatcatcgacgccagtgtgcattattacgccccgccatcagccggccggcaactcgacagggaaaaggaagacgcaccgctagagctgagatgtccttcttcttccgcatggcgtcgcggctgcggccgtcgacgccggaggaggtggtgcgctccatcaaggactccttcctcgcgctccacacgcgcacccacgccaaggctctggaagaggtcgagaaaaatatgtcatccttgagattgttgatctttggtgatggagaagtcgaaccaaatgaagagcaggtcctgcaaataacccttgagatttgcaaggaggacgtcatttccctgatcgtccaggatctgccttccttgggctggggagtaagaaaagatctggctatctgctggtgcatcttgcttaggcagaaggtcgatgaaacttattgctgtgtgcagtatcttgaaaatcatctggagcttttagatttccttgttggttgatacatattggaatctggtagctttgagctgttctttgagtatgttgagcttccaaactttgatattgcttcagatgctctgaacaccttcaaggtaaatccatatgtgcatgttttttgtgtaatttaaactggaggtcgaagaatcaatattgatgatcatccttgataagattgttgcaggatctgcttaccaagcacgaagttgtagtcgcagagttcttgagttcccactacgagcaggtcactacttgttctgaaatacacctttggttatgtcaacaaaagaaaggcatcagaaaacttttttagataaagtttcattaaagcatatactccttgaatctatattattcatggcatactcacgtatgcattatatgttgttgcttcgctaatgtcttattcaaaaaatgtattgcaattgtgtcaatacctgcatgccagatatattctgtttgtttctgtttatcactctgattatgtaaactttatagttttttgaactctactcaaggctcttgtcatcaactaattatgtaacaagaaggcaggcaatcaagttcctttcagagttcctgctagagactcataactctcaaataatgaagagatacattgtggaagttcgttttttaaatattatgatcaatctactaaaggttattgtgcatgcatcatcacaggtgaaaatcttttgggattcaagcaaaaatatcagaatatgtgccttccatgtttttaaggtatttgttgccaatccgaacaagcctcgatgtatcgttgtagctttgctagacaatcgtagagaagttctgaagctactccacaatcttccttcaagtaaaggcgacgatgaactcgatgaggagaaagacctaatcattcaggaaatccagaagttggcataacacaaaagcatcaagttatcgtttagcaatgcaagactctccttatagaggacatattgccaaggccagaaccatgtatatcacattgcacatgtagccttcaagagttgtatttttggaggttttttcttttcttttggtctcagaaaaccatagcaaagtattctctttttgaaggaattatatacatgattttggtgaccaaggaccaaaaaaaatcaaactgaaataaagaaaatatgaaaaa

SEQ ID NO: 7696 - DNA, 1387 bp, Zea Mays
agagggcgtcgcgatcgcaaccgcccgagcccggccggtcccatcatcgacgccagtgtgcattattacgccccgccatcagccggccggcaactcgacagggaaaaggaagacgcaccgctagagctgagatgtccttcttcttccgcatggcgtcgcggctgcggccgtcgacgccggaggaggtggtgcgctccatcaaggactccttcctcgcgctccacacgcgcacccacgccaaggctctggaagaggtcgagaaaaatatgtcatccttgagattgttgatctttggtgatggagaagtcgaaccaaatgaagagcaggtcctgcaaataacccttgagatttgcaaggaggacgtcatttccctgatcgtccaggatctgccttccttgggctggggagtaagaaaagatctggctatctgctggtgcatcttgcttaggcagaaggtcgatgaaacttattgctgtgtgcagtatcttgaaaatcatctggagcttttagatttccttgttggttgctacaagaacttggatattgcattgaactgtggaaatatgttaagagaatgcataaagtaccctacacttgcaaaatacatattggaatctggtagctttgagctgttctttgagtatgttgagcttccaaactttgatattgcttcagatgctctgaacaccttcaagattgttgcaggatctgcttaccaagcacgaagttgtagtcgcagagttcttgagttcccactacgagcagttttttgaactctactcaaggctcttgtcatcaactaattatgtaacaagaaggcaggcaatcaagttcctttcagagttcctgctagagactcataactctcaaataatgaagagatacattgtggaagttcgttttttaaatattatgatcaatctactaaaggattcaagcaaaaatatcagaatatgtgccttccatgtttttaaggtatttgttgccaatccgaacaagcctcgatgtatcgttgtagctttgctagacaatcgtagagaagttctgaagctactccacaatcttccttcaagtaaaggcgacgatgaactcgatgaggagaaagacctaatcattcaggaaatccagaagttggcataacacaaaagcatcaagttatcgtttagcaatgcaagactctccttatagaggacatattgccaaggccagaaccatgtatatcacattgcacatgtagccttcaagagttgtatttttggaggttttttcttttcttttggtctcagaaaaccatagcaaagtattctctttttgaaggaattatatacatgattttggtgaccaaggaccaaaaaaaatcaaactgaaataaagaaaatatgaaaaa

SEQ ID NO: 7697 - DNA, 1341 bp, Zea Mays
agagggcgtcgcgatcgcaaccgcccgagcccggccggtcccatcatcgacgccagtgtgcattattacgccccgccatcagccggccggcaactcgacagggaaaaggaagacgcaccgctagagctgagatgtccttcttcttccgcatggcgtcgcggctgcggccgtcgacgccggaggaggtggtgcgctccatcaaggactccttcctcgcgctccacacgcgcacccacgccaaggctctggaagaggtcgagaaaaatatgtcatccttgagattgttgatctttggtgatggagaagtcgaaccaaatgaagagcaggtcctgcaaataacccttgagatttgcaaggaggacgtcatttccctgatcgtccaggatctgccttccttgggctggggagtaagaaaagatctggctatctgctggtgcatcttgcttaggcagaaggtcgatgaaacttattgctgtgtgcagtatcttgaaaatcatctggagcttttagatttccttgttggttgatacatattggaatctggtagctttgagctgttctttgagtatgttgagcttccaaactttgatattgcttcagatgctctgaacaccttcaaggatctgcttaccaagcacgaagttgtagtcgcagagttcttgagttcccactacgagcagttttttgaactctactcaaggctcttgtcatcaactaattatgtaacaagaaggcaggcaatcaagttcctttcagagttcctgctagagactcataactctcaaataatgaagagatacattgtggaagttcgttttttaaatattatgatcaatctactaaaggttattgtgcatgcatcatcacaggtgaaaatcttttgggattcaagcaaaaatatcagaatatgtgccttccatgtttttaaggtatttgttgccaatccgaacaagcctcgatgtatcgttgtagctttgctagacaatcgtagagaagttctgaagctactccacaatcttccttcaagtaaaggcgacgatgaactcgatgaggagaaagacctaatcattcaggaaatccagaagttggcataacacaaaagcatcaagttatcgtttagcaatgcaagactctccttatagaggacatattgccaaggccagaaccatgtatatcacattgcacatgtagccttcaagagttgtatttttggaggttttttcttttcttttggtctcagaaaaccatagcaaagtattctctttttgaaggaattatatacatgattttggtgaccaaggaccaaaaaaaatcaaactgaaataaagaaaatatgaaaaa

SEQ ID NO: 7698 - DNA, 1419 bp, Zea Mays
gagagagggcgtcgcgatcgcaaccgcccgagcccggccggtcccatcatcgacgccagtgtgcattattacgccccgccatcagccggccggcaactcgacagggaaaaggaagacgcaccgctagagctgagatgtccttcttcttccgcatggcgtcgcggctgcggccgtcgacgccggaggaggtggtgcgctccatcaaggactccttcctcgcgctccacacgcgcacccacgccaaggctctggaagaggtcgagaaaaatatgtcatccttgagattgttgatctttggtgatggagaagtcgaaccaaatgaagagcaggtcctgcaaataacccttgagatttgcaaggaggacgtcatttccctgatcgtccaggatctgccttccttgggctggggagtaagaaaagatctggctatctgctggtgcatcttgcttaggcagaaggtcgatgaaacttattgctgtgtgcagtatcttgaaaatcatctggagcttttagatttccttgttggttgctacaagaacttggatattgcattgaactgtggaaatatgttaagagaatgcataaagtaccctacacttgcaaaatacatattggaatctggtagctttgagctgttctttgagtatgttgagcttccaaactttgatattgcttcagatgctctgaacaccttcaaggatctgcttaccaagcacgaagttgtagtcgcagagttcttgagttcccactacgagcagttttttgaactctactcaaggctcttgtcatcaactaattatgtaacaagaaggcaggcaatcaagttcctttcagagttcctgctagagactcataactctcaaataatgaagagatacattgtggaagttcgttttttaaatattatgatcaatctactaaaggttattgtgcatgcatcatcacaggtgaaaatcttttgggattcaagcaaaaatatcagaatatgtgccttccatgtttttaaggtatttgttgccaatccgaacaagcctcgatgtatcgttgtagctttgctagacaatcgtagagaagttctgaagctactccacaatcttccttcaagtaaaggcgacgatgaactcgatgaggagaaagacctaatcattcaggaaatccagaagttggcataacacaaaagcatcaagttatcgtttagcaatgcaagactctccttatagaggacatattgccaaggccagaaccatgtatatcacattgcacatgtagccttcaagagttgtatttttggaggttttttcttttcttttggtctcagaaaaccatagcaaagtattctctttttgaaggaattatatacatgattttggtgaccaaggaccaaaaaaaatcaaactgaaataaagaaaatatgaaaaa

SEQ ID NO: 7699 - DNA, 1624 bp, Zea Mays
agagggcgtcgcgatcgcaaccgcccgagcccggccggtcccatcatcgacgccagtgtgcattattacgccccgccatcagccggccggcaactcgacagggaaaaggaagacgcaccgctagagctgagatgtccttcttcttccgcatggcgtcgcggctgcggccgtcgacgccggaggaggtggtgcgctccatcaaggactccttcctcgcgctccacacgcgcacccacgccaaggctctggaagaggtcgagaaaaatatgtcatccttgagattgttgatctttggtgatggagaagtcgaaccaaatgaagagcaggtcctgcaaataacccttgagatttgcaaggaggacgtcatttccctgatcgtccaggatctgccttccttgggctggggagtaagaaaagatctggctatctgctggtgcatcttgcttaggcagaaggtcgatgaaacttattgctgtgtgcagtatcttgaaaatcatctggagcttttagatttccttgttggttgctacaagaacttggatattgcattgaactgtggaaatatgttaagagaatgcataaagtaccctacacttgcaaaatacatattggaatctggtagctttgagctgttctttgagtatgttgagcttccaaactttgatattgcttcagatgctctgaacaccttcaaggatctgcttaccaagcacgaagttgtagtcgcagagttcttgagttcccactacgagcagttttttgaactctactcaaggctcttgtcatcaactaattatgtaacaagaaggcaggcaatcaagagttcctgctagagactcataactctcaaataatgaagagatacattgtggaagttcgttttttaaatattatgatcaatctactaaaggattcaagcaaaaatatcagaatatgtgccttccatgtttttaaggtatttgttgccaatccgaacaagcctcgatgtatcgttgtagctttgctagacaatcgtagagaagttctgaagctactccacaatcttccttcaagtaaaggcgacgatgaactcgatgaggagaaagacctaatcattcaggaaatccagaagttggcataacacaaaagcatcaagttatcgtttagcaatgcaagactctccttatagaggacatattgccaaggccagaaccatgtatatcacattgcacatgtagccttcaagagttgtatttttggaggttttttcttttcttttggtctcagaaaaccatagcaaagtattctctttttgaaggaattatatacatgattttggtgaccaaggaccgttggattaattgagctagacccataactaatctagcaatgaattaaagaattctaaggaccatgttgaaaatagcaaagcatacttgagaagcttctagatgattggagaagaggatgcatgagtcatggatgccatgatttgtagtgaagtatgtaatctactacttattaagttagcaatagtagcctgcctttttgtgtcctgccattctgcgatctcaggcgtccaattctatcattctacaatctcagctgtccaatcccgcacaccagtttttcgcgcgcagaaaaa

SEQ ID NO: 7700 - DNA, 1073 bp, Zea Mays
aaagaaagtacgtcatcttccttctgcccatgcgcgtacatatatcattaggattagaattggcacgccgatcaagaagaccataagtgcccttagatcacatattcacatcccccgagcgcacacttcagccttgacatggtcagcgctgcctttgacacaggctgcaatggattcaccaaacccatacaatataagaagagacaacgcacgagcatggaacagcaacggccggcctccatgactagagcagtcccagaatccaacaacaaccagcatcattccccattggaaggccgaatgcgccacacgcccgcggcagataagcgtctcgacgggccaaagaacctaccccctctcgccatgcagcgcagatctgacgggaagggaacgcgggtgaatcgcagatgccgtcggtcttcttgtgcccgtagtgcttcacctttcttcacgttctacaggggagcaaaaggtggtcccaagtacgtgcccgttgcagtgccttcagatctactaggcaaagaaattaaggaggcccttgcagctgaaagcaataacagtttcgtgatctggtacttgtctttgatgtgccatctgacttccattggcctctagatagtcgacttgtgtcttagtgcttcagcatatatataaggtcctatggtccaatatttatcgttaatggctaccagttgatttaacttatacaattggtaactgttgtatgcagattgagaagttcagagatacacttgcgaagcacagacttctgacaccaacgacaccattggcaaggcagggatctgatgatatgtccttggtgtcatccgtgatataaaccacttcctttagtcatgtgttattcttcattgttattcatgtgtacaatttgttcctttccattgtcacagagttcaggttttcagatttttttgcctgtgaagtctacccacgctgcctcgctcttgttctttataatgagatgaaattgtatggtggctttcgagtgagatgaaatgtatggtggctttgggagtgactcattgtggtttactaagtatggtggctttgcg

SEQ ID NO: 7701 - DNA, 1799 bp, Zea Mays
ctcccccatcccagtgatacggtagcccgccagcctcgcgtcccgccgtcacccgttcacttcctctccctgccgccacagctcgcgcaacccccatctcaccctcttccttcctgccacaccatcgctaccaccgcccgccctgagagggcccggcgtcatggaccccctcaagaagatgatggcgcggggagtgttctcggacctacagaacttctccggccatatggagcacctggtcagcgccgacgacctcaatcgcatggctcgacggtaggttgctggctcattctttggatcgtcttcgattcattcgtcgccttcgcggctctggtccgtgcccccgccgcccccaccaccaagcccccagcggctgccggtgcggtccgccgtccagtgccacgcggtcttggcgaagtcgctgatgcggcggaagcagaagctgctgcagtgccacgcggagttggcgaggagcggcgcgtccgtctgccgggagtgcgcgtacctcgtctctccggcccagtacctgtgcatcgacgccctccagctcctgtcatccacccgtgtagcctgcagaggttctccatggtgacgttctcgtggtagtagtggggggattattgtcctcaagggcttgggaggagattcccagatcggccaaagaaagctgcaatggattcaccaaacccatacaatataagaagagacaacgcacgagcatggaacagcaacggccggcctccatgactagagcagtcccagaatccaacaacaaccagcatcattccccattggaaggccgaatgcgccacacgcccgcggcagataagcgtctcgacgggccaaagaacctaccccctctcgccatgcagcgcagatctgacgggaagggaacgcgggtgaatcgcagatgccgtcggtcttcttgtgcccgtagtgcttcacctttcttcacgttctacaggggagcaaaaggtcaactctgcaacttcagttgtatcaatgcaaccgtgagatcctatgttctactgtcattaattttgtgccccctattctaattgttgttaaagtaaggccgagtatagttattttggaagatgtttctatggccaatgagcaattatattaattaagtcggtgaaatgaaaagttttgagggttttgttattatttacaaatgaaaaaatggaattagtaggtggtcccaagtacgtgcccgttgcagtgccttcagatctactaggcaaagaaattaaggaggcccttgcagctgaaagcaataacagtttcgtgatctggtacttgtctttgatgtgccatctgacttccattggcctctagatagtcgacttgtgtcttagtgcttcagcatatatataaggtcctatggtccaatatttatcgttaatggctaccagttgatttaacttatacaattggtaactgttgtatgcagattgagaagttcagagatacacttgcgaagcacagacttctgacaccaacgacaccattggcaaggcagggatctgatgatatgtccttggtgtcatccgtgatataaaccacttcctttagtcatgtgttattcttcattgttattcatgtgtacaatttgttcctttccattgtcacagagttcaggttttcagatttttttgcctgtgaagtctacccacgctgcctcgctcttgttctttataatgagatgaaattgtatggtggctttcgagtgagatgaaatgtatggtggctttgggagtgactcattgtggtttactaagtatggtggctttgcg

SEQ ID NO: 7702 - DNA, 2004 bp, Zea Mays
gtatggcgtggagaaagattaataaatatgtagtattaaaagaacttccattaaaactctagcctcccccaatttacttgagacaaaaaaaactgttgttgattaaaagaactagcatttctctgatagtacagatgaaataggcatacgactttaggcacgcagcaaaaattcaagtactaggaccgcaatcaaatgataagtctgggaccaacaaaatcaactgaaatgctcttgcctgctaacaattttctatatatacaaaaaaaacaccacagacttctgaacacaccaagcttgactaaaagaatcaaggacgtgttcagaactgaagcttgcactgagtatttccctcaagatgttccattttccaccttaacctaagagcattgttcacttctcaattttacctgaaacaaaaaattatacatcattgtgtcatgaaaaggcttgtttaatttaacaaataaaatcattgaaatcaagacacagaagagctgaaaatgaaatcatctgtctgggaaattaaataatctgttagggtgcaaagttaagaaatgaaaagcaactgattccttgtcatgtacggccacacatacgccaggcgtaggagagcccgcgatgtgcgccgagcttagcaggcagcaaaggcacatgcgcagcaggtgagtggctaggatggaaagtagccatctgattgattgcgcatgcagcaaacatagaaggcgaccgcctgattgattgtgcatgcagcaaacatagaaggagattggctaggagagaaagtagctagctcattagtatccttcctattttgattagatcttcaatcaaggagaaccttctccatttgtgtaaaccgccggctatatatagccatgtatggtggcacttgggaatcaatcaagaattacctatcaagtctcttcctctcttctctaaaccggcgaccaggagaacttctcctgtcaacgggtagctcggcgtgggggcataaccctgccggcaaccacgggtcaaggctacgatctacgtagcgaggtcctcctaccttgggcaataccgcccttgacaacctggtatcacgaagccgacgatcctcgtcttcttcacaaccatcaacttccaccaccgcagccactaaacagccctcaaccccaccctcgcccttagcctccaccacttccaccggtcactccaacaccatgtcggagccctccatggccgacctcatggagatgatgaaatcctggcattcggagctcaagctggagatcaaggagatgaagatcgagatggcttccttgaaggacaaggcatcctcgtcatctggcgttggtggcggcaatcgcatggagcctcctcgtgaaccggatcggccccctaggttccagaagtgggattttccccgttttgacgggaagtctgacccgcgcctcttcctcaacaaatgtgagtcatattttcgtcagcagcgtaccatggccgaggagcgcgtcgggatggcgtcatacaacctcgaagacgtcgcccaggaatggttcatgcaacttcaggaggacgaaggcacgtcgtcgtggggacgtttcaaagatctcattgatctacgattcggaccagcgttgcgctcggcgcccctcttcgagctgacggagtgccgacgcaccgggacggtggaggaatactccaaccgcttccagagcctcctcttccacgctgggcggctcgacgaagcccagcgagtccagctcttcacaggaggtctgcttccacccctcagccacgccgtccggcttcacaacccggagacgctggccgcggccatgagcctcgcccgacaagtggagctgatggagctcgacaagatggcggcagccccggccaagccggcgcatcgcgctctaccggccgccattaaacctcaacaggcgcccccactccttgcgctaccggcaccaccagcgggtgctgcgccagccgcacgcgagcggcaaccgggccgtc

SEQ ID NO: 7703 - DNA, 1842 bp, Zea Mays
ggctgcaacgctcccttcaccagccgcaggagcatcgccgctgctgctccactgcaacgccgccccttccgtctccttccgccaccgcaggcgttggcagcggccggctgctacacggcacgatggccgcgtcgcgcagctgttgctgccggtcgcgcgccgctggctgccggcagcagcgcctcccggagtcaatggcgcgcgcggaggcattgcggcgtcggggtcaggggcaggggcagtggctggggaggcgccgtacagaggcaacgaggggcaggggtcgctgtggatggtcttcctcgccacggcggtggtcgtgtgcggctccttcgagttcggcacctgtgtcgggtattctgcgccggctcaagctggaattgtgagcgacattgggttgtccaactccgagtatggtgtctttggatctgttttgacaattggagcaatgattggtgctgtgactagcggcagcctggcagacattcttggacgcaaaatgaccatgcgatttgcagcagttgtaggcatttttggctggcttactgtatattttgccaaggatgctatgatgctctatgctggaagagttttgctggggtgcctgtgtatatatctgaaatagcaccaaagggtatccgaggaggccttgcaacctcaaaccagttattcatctgttcagggtgttcggctgcttacattattggagcacttgtttcatggcgctgtttggttgtagtaggattgataccttgtgctgtcctacttgttgggcttttcttcattccagagtctccaaggtggctggccaacatagggaaagaaagagaatttcatgcttcattacaggagtttaggggggaagattctgacatttctgaagaggctactgagatcaaagattatataaaatcagttcgtcgattgcctaaggccaagattcaagatttatttcagagaaaaaatatgtatgcagtcacggtgggtgttggcctgatgatttttcagcaactgggaggaattaatgccttaggtttctatacaagctatattttttcctctgcaggtatccaagctagataaattttgtcctcttaaaaaacgaggtatctacagctctttctaaaaacttcaggattttctggaaaacttgggaccaccttgattggcgttattcagattccaatcacattctttggggcccttctgatggataggagtggaagaagagcccttcttttggtctcttcatctggaacatttcttggctgctttctgactggactatcattctattttaaggtatactatgcggcgtactcagttggaatgggcccagttccttgggttatcatgtcagagatattctcaatcgacatgaaagcaatcgccggagggtttgtaaccctggccagttggattggttcctttgcgatttcatactcattcaacttcctcatggattggaaccccgcaggcacattctttctgttctctgcagcgagcctggtcactgtgctgttcgtggcaaagctcgtgcctgaaactaaaggaagaacactagaagagatccaaacattgctcaaagccacatgagtggcttccattcgctcagtaggtaaagatccagttaaaaaaatgctgtaaatattcgcctcttgtaaattattgtgcatggcaggtgaatgatttcgcctcttgtcgattctcctatattttagtctctttgatatatgttatttaggacaaagatacggtctacaacatatgcttatcttcaactatttcattttctgagttttctctctgctactatacatcatcagtttcgacggttgtctt

SEQ ID NO: 7704 - DNA, 1839 bp, Zea Mays
ggctgcaacgctcccttcaccagccgcaggagcatcgccgctgctgctccactgcaacgccgccccttccgtctccttccgccaccgcaggcgttggcagcggccggctgctacacggcacgatggccgcgtcgcgcagctgttgctgccggtcgcgcgccgctggctgccggcagcagcgcctcccggagtcaatggcgcgcgcggaggcattgcggcgtcggggtcaggggcaggggcagtggctggggaggcgccgtacagaggcaacgaggggcaggggtcgctgtggatggtcttcctcgccacggcggtggtcgtgtgcggctccttcgagttcggcacctgtgtcgggtattctgcgccggctcaagctggaattgtgagcgacattgggttgtccaactccgagtatggtgtctttggatctgttttgacaattggagcaatgattggtgctgtgactagcggcagcctggcagacattcttggacgcaaaatgaccatgcgatttgcagcagttgtaggcatttttggctggcttactgtatattttgccaaggatgctatgatgctctatgctggaagagttttgctggggtattgtactggagttctttcctatgtggtgcctgtgtatatatctgaaatagcaccaaagggtatccgaggaggccttgcaacctcaaaccagttattcatctgttcagggtgttcggctgcttacattattggagcacttgtttcatggcgctgtttggttgtagtaggattgataccttgtgctgtcctacttgttgggcttttcttcattccagagtctccaaggtggctggccaacatagggaaagaaagagaatttcatgcttcattacaggagtttaggggggaagattctgacatttctgaagaggctactgagatcaaagattatataaaatcagttcgtcgattgcctaaggccaagattcaagatttatttcagagaaaaaatatgtatgcagtcacggtatccaagctagataaattttgtcctcttaaaaaacgaggtatctacagctctttctaaaaacttcaggattttctggaaaacttgggaccaccttgattggcgttattcagattccaatcacattctttggggcccttctgatggataggagtggaagaagagcccttcttttggtctcttcatctggaacatttcttggctgctttctgactggactatcattctattttaaggcacaaggactgtgcacacagctggttcctactttggctctttgtggcatactggtatactatgcggcgtactcagttggaatgggcccagttccttgggttatcatgtcagagatattctcaatcgacatgaaagcaatcgccggagggtttgtaaccctggccagttggattggttcctttgcgatttcatactcattcaacttcctcatggattggaaccccgcaggcacattctttctgttctctgcagcgagcctggtcactgtgctgttcgtggcaaagctcgtgcctgaaactaaaggaagaacactagaagagatccaaacattgctcaaagccacatgagtggcttccattcgctcagtaggtaaagatccagttaaaaaaatgctgtaaatattcgcctcttgtaaattattgtgcatggcaggtgaatgatttcgcctcttgtcgattctcctatattttagtctctttgatatatgttatttaggacaaagatacggtctacaacatatgcttatcttcaactatttcattttctgagttttctctctgctactatacatcatcagtttcgacggttgtctt

SEQ ID NO: 7705 - DNA, 1990 bp, Zea Mays
ggctgcaacgctcccttcaccagccgcaggagcatcgccgctgctgctccactgcaacgccgccccttccgtctccttccgccaccgcaggcgttggcagcggccggctgctacacggcacgatggccgcgtcgcgcagctgttgctgccggtcgcgcgccgctggctgccggcagcagcgcctcccggagtcaatggcgcgcgcggaggcattgcggcgtcggggtcaggggcaggggcagtggctggggaggcgccgtacagaggcaacgaggggcaggggtcgctgtggatggtcttcctcgccacggcggtggtcgtgtgcggctccttcgagttcggcacctgtgtcgggtattctgcgccggctcaagctggaattgtgagcgacattgggttgtccaactccgagtatggtgtctttggatctgttttgacaattggagcaatgattggtgctgtgactagcggcagcctggcagacattcttggacgcaaaatgaccatgcgatttgcagcagttgtaggcatttttggctggcttactgtatattttgccaaggatgctatgatgctctatgctggaagagttttgctggggtattgtactggagttctttcctatgtggtgcctgtgtatatatctgaaatagcaccaaagggtatccgaggaggccttgcaacctcaaaccagttattcatctgttcagggtgttcggctgcttacattattggagcacttgtttcatggcgctgtttggttgtagtaggattgataccttgtgctgtcctacttgttgggcttttcttcattccagagtctccaaggccaacatagggaaagaaagagaatttcatgcttcattacaggagtttaggggggaagattctgacatttctgaagaggctactgagatcaaagttatttattctgaacatagcttccatttatcaaacaatgtagaccgatattcaaactaaacattctgtccaggattatataaaatcagttcgtcgattgcctaaggccaagattcaagatttatttcagagaaaaaatatgtatgcagtcacggtgggtgttggcctgatgatttttcagcaactgggaggaattaatgccttaggtttctatacaagctatattttttcctctgcaggtatccaagctagataaattttgtcctcttaaaaaacgaggtatctacagctctttctaaaaacttcaggattttctggaaaacttgggaccaccttgattggcgttattcagattccaatcacattctttggggcccttctgatggataggagtggaagaagagcccttcttttggtctcttcatctggaacatttcttggctgctttctgactggactatcattctattttaaggcacaaggactgtgcacacagctggttcctactttggctctttgtggcatactggtatactatgcggcgtactcagttggaatgggcccagttccttgggttatcatgtcagagatattctcaatcgacatgaaagcaatcgccggagggtttgtaaccctggccagttggattggttcctttgcgatttcatactcattcaacttcctcatggattggaaccccgcaggcacattctttctgttctctgcagcgagcctggtcactgtgctgttcgtggcaaagctcgtgcctgaaactaaaggaagaacactagaagagatccaaacattgctcaaagccacatgagtggcttccattcgctcagtaggtaaagatccagttaaaaaaatgctgtaaatattcgcctcttgtaaattattgtgcatggcaggtgaatgatttcgcctcttgtcgattctcctatattttagtctctttgatatatgttatttaggacaaagatacggtctacaacatatgcttatcttcaactatttcattttctgagttttctctctgctactatacatcatcagtttcgacggttgtctt

SEQ ID NO: 7706 - DNA, 1855 bp, Zea Mays
ggctgcaacgctcccttcaccagccgcaggagcatcgccgctgctgctccactgcaacgccgccccttccgtctccttccgccaccgcaggcgttggcagcggccggctgctacacggcacgatggccgcgtcgcgcagctgttgctgccggtcgcgcgccgctggctgccggcagcagcgcctcccggagtcaatggcgcgcgcggaggcattgcggcgtcggggtcaggggcaggggcagtggctggggaggcgccgtacagaggcaacgaggggcaggggtcgctgtggatggtcttcctcgccacggcggtggtcgtgtgcggctccttcgagttcggcacctgtgtcgggtattctgcgccggctcaagctggaattgtgagcgacattgggttgtccaactccgagtatggtgtctttggatctgttttgacaattggagcaatgattggtgctgtgactagcggcagcctggcagacattcttggacgcaaaatgaccatgcgatttgcagcagttgtaggcatttttggctggcttactgtatattttgccaaggatgctatgatgctctatgctggaagagttttgctggggtattgtactggagttctttcctatgtggtgcctgtgtatatatctgaaatagcaccaaagggtatccgaggaggccttgcaacctcaaaccagttattcatctgttcagggtgttcggctgcttacattattggagcacttgtttcatggcgctgtttggttgtagtaggattgataccttgtgctgtcctacttgttgggcttttcttcattccagagtctccaaggtggctggccaacatagggaaagaaagagaatttcatgcttcattacaggagtttaggggggaagattctgacatttctgaagaggctactgagatcaaagattatataaaatcagttcgtcgattgcctaaggccaagattcaagatttatttcagagaaaaaatatgtatgcagtcacggtgggtgttggcctgatgatttttcagcaactgggaggaattaatgccttaggtttctatacaagctatattttttcctctgcaggattttctggaaaacttgggaccaccttgattggcgttattcagattccaatcacattctttggggcccttctgatggataggagtggaagaagagcccttcttttggtctcttcatctggaacatttcttggctgctttctgactggactatcattctattttaaggcacaaggactgtgcacacagctggttcctactttggctctttgtggcatactggtatactatgcggcgtactcagttggaatgggcccagttccttgggttatcatgtcagagatattctcaatcgacatgaaagcaatcgccggagggtttgtaaccctggccagttggattggttcctttgcgatttcatactcattcaacttcctcatggattggaaccccgcaggcacattctttctgttctctgcagcgagcctggtcactgtgctgttcgtggcaaagctcgtgcctgaaactaaaggaagaacactagaagagatccaaacattgctcaaagccacatgagtggcttccattcgctcagtaggtaaagatccagttaaaaaaatgctgtaaatattcgcctcttgtaaattattgtgcatggcaggtgaatgatttcgcctcttgtcgattctcctatattttagtctctttgatatatgttatttaggacaaagatacggtctacaacatatgcttatcttcaactatttcattttctgagttttctctctgctactatacatcatcagtttcgacggttgtctt

SEQ ID NO: 7707 - DNA, 1835 bp, Zea Mays
ggctgcaacgctcccttcaccagccgcaggagcatcgccgctgctgctccactgcaacgccgccccttccgtctccttccgccaccgcaggcgttggcagcggccggctgctacacggcacgatggccgcgtcgcgcagctgttgctgccggtcgcgcgccgctggctgccggcagcagcgcctcccggagtcaatggcgcgcgcggaggcattgcggcgtcggggtcaggggcaggggcagtggctggggaggcgccgtacagaggcaacgaggggcaggggtcgctgtggatggtcttcctcgccacggcggtggtcgtgtgcggctccttcgagttcggcacctgtgtcgggtattctgcgccggctcaagctggaattgtgagcgacattgggttgtccaactccgagtatggtgtctttggatctgttttgacaattggagcaatgattggtgctgtgactagcggcagcctggcagacattcttggacgcaaaatgaccatgcgatttgcagcagttgtaggcatttttggctggcttactgtatattttgccaaggatgctatgatgctctatgctggaagagttttgctggggtgcctgtgtatatatctgaaatagcaccaaagggtatccgaggaggccttgcaacctcaaaccagttattcatctgttcagggtgttcggctgcttacattattggagcacttgtttcatggcgctgtttggttgtagtaggattgataccttgtgctgtcctacttgttgggcttttcttcattccagagtctccaaggtggctggtgagatggccaacatagggaaagaaagagaatttcatgcttcattacaggagtttaggggggaagattctgacatttctgaagaggctactgagatcaaagattatataaaatcagttcgtcgattgcctaaggccaagattcaagatttatttcagagaaaaaatatgtatgcagtcacggtgggtgttggcctgatgatttttcagcaactgggaggaattaatgccttaggtttctatacaagctatattttttcctctgcaggattttctggaaaacttgggaccaccttgattggcgttattcagattccaatcacattctttggggcccttctgatggataggagtggaagaagagcccttcttttggtctcttcatctggaacatttcttggctgctttctgactggactatcattctattttaaggcacaaggactgtgcacacagctggttcctactttggctctttgtggcatactggtatactatgcggcgtactcagttggaatgggcccagttccttgggttatcatgtcagagatattctcaatcgacatgaaagcaatcgccggagggtttgtaaccctggccagttggattggttcctttgcgatttcatactcattcaacttcctcatggattggaaccccgcaggcacattctttctgttctctgcagcgagcctggtcactgtgctgttcgtggcaaagctcgtgcctgaaactaaaggaagaacactagaagagatccaaacattgctcaaagccacatgagtggcttccattcgctcagtaggtaaagatccagttaaaaaaatgctgtaaatattcgcctcttgtaaattattgtgcatggcaggtgaatgatttcgcctcttgtcgattctcctatattttagtctctttgatatatgttatttaggacaaagatacggtctacaacatatgcttatcttcaactatttcattttctgagttttctctctgctactatacatcatcagtttcgacggttgtctt

SEQ ID NO: 7708 - DNA, 1541 bp, Zea Mays
ctctctgttccgccaggtatggctggattggctgcaacgctcccttcaccagccgcaggagcatcgccgctgctgctccactgcaacgccgccccttccgtctccttccgccaccgcaggcgttggcagcggccggctgctacacggcacgatggccgcgtcgcgcagctgttgctgccggtcgcgcgccgctggctgccggcagcagcgcctcccggagtcaatggcgcgcgcggaggcattgcggcgtcggggtcaggggcaggggcagtggctggggaggcgccgtacagaggcaacgaggggcaggggtcgctgtggatggtcttcctcgccacggcggtggtcgtgtgcggctccttcgagttcggcacctgtgtcgggtattctgcgccggctcaagctggaattgtgagcgacattgggttgtccaactccgagtatggtgtctttggatctgttttgacaattggagcaatgattggtgctgtgactagcggcagcctggcagacattcttggacgcaaaatggttaagtaattcagctgcagcagttgataagtaaaatggttaccattattcatcctcacatctcttccatttgcatttatcacagaccatgcgatttgcagcagttgtaggcatttttggctggcttactgtatattttgccaaggatgctatgatgctctatgctggaagagttttgctggggtattgtactggagttctttcctatgtggtgcctgtgtatatatctgaaatagcaccaaagggtatccgaggaggccttgcaacctcaaaccagttattcatctgttcagggtgttcggctgcttacattattggagcacttgtttcatggcgctgtttggttgtagtaggattgataccttgtgctgtcctacttgttgggcttttcttcattccagagtctccaaggtggctggccaacatagggaaagaaagagaatttcatgcttcattacaggagtttaggggggaagattctgacatttctgaagaggctactgagatcaaagttatttattctgaacatagcttccatttatcaaacaatgtagaccgatattcaaactaaacattctgtccaggattatataaaatcagttcgtcgattgcctaaggccaagattcaagatttatttcagagaaaaaatatgtatgcagtcacggtgggtgttggcctgatgatttttcagcaactgggaggaattaatgccttaggtttctatacaagctatattttttcctctgcaggtatccaagctagataaattttgtcctcttaaaaaacgaggtatctacagctctttctaaaaacttcaggattttctggaaaacttgggaccaccttgattggcgttattcagattccaatcacattctttggggcccttctgatggataggagtggaagaagagcccttcttttggtctcttcatctggaacatttcttggctgctttctgactggactatcattctattttaagcaaggcaaattttcaaagattctt

SEQ ID NO: 7709 - DNA, 1119 bp, Zea Mays
ctccgacctaggattttttagaaatggaaaataacatgtggcgaaatcagacaccctctctgttccgccaggtatggctggattggctgcaacgctcccttcaccagccgcaggagcatcgccgctgctgctccactgcaacgccgccccttccgtctccttccgccaccgcaggcgttggcagcggccggctgctacacggcacgatggccgcgtcgcgcagctgttgctgccggtcgcgcgccgctggctgccggcagcagcgcctcccggagtcaatggcgcgcgcggaggcattgcggcgtcggggtcaggggcaggggcagtggctggggaggcgccgtacagaggcaacgaggggcaggggtcgctgtggatggtcttcctcgccacggcggtggtcgtgtgcggctccttcgagttcggcacctgtgtcgggtattctgcgccggctcaagctggaattgtgagcgacattgggttgtccaactccgagtatggtgtctttggatctgttttgacaattggagcaatgattggtgctgtgactagcggcagcctggcagacattcttggacgcaaaatgaccatgcgatttgcagcagttgtaggcatttttggctggcttactgtatattttgccaaggatgctatgatgctctatgctggaagagttttgctggggtattgtactggagttctttcctatgtggtgcctgtgtatatatctgaaatagcaccaaagggtatccgaggaggccttgcaacctcaaaccagttattcatctgttcagggtgttcggctgcttacattattggagcacttgtttcatggcgctgtttggttgtagtaggattgataccttgtgctgtcctacttgttgggcttttcttcattccagagtctccaaggtggctggccaacatagggaaagaaagagaatttcatgcttcattacaggagtttaggggggaagattctgacatttctgaagaggctactgagatcaaagattatataaaatcagttcgtcgattgcctaaggccaagattcaagatttatttcagagaaaaaatatgtatgcagtcacgttattgtttcctgaaaagtacaaaag

SEQ ID NO: 7710 - DNA, 1921 bp, Zea Mays
atgggtataatgcgagtcgcggacgatgtggaggccaggttggtggtcggggcaggtggcggcggcgggaccgccaccaccacgacggagccgcttctccgccactgccacggcggccgcaaggaggaggacgaccaggggtctaagatccgggacagcccggaggcggagggggcgtccgactgcgggaggacggacggaggctcgctgcggatggtccttgtctccaccgccgtcgccgtctgcggctccttcgagttcggcacctgcgtcggctactctgcgccgacgcagtcagggattgtagaggaagtcgggctatctatctccgagtttgcaatttttggatctgtactgacagtcggagcaatggttggtgccgttactagtgggcgcttggctgattttctcggacgaaaaatgaccatgcggatatcagctactatttgtatattcggttggctctccatacatctggccaagagcgctatcatgctctactttgggagaaccttgctgggtttcagcactggagttctttcttatgtggtgcctgtgttcatagctgaaatagcgccaaagaatctccgcgggggtctcgcaacgtcaaaccagctcttgatctgttccggaagctcagctacctacatcataggagccctggttgcatggcgcaatttggtacttgttggtttagtgccttgtgtcctcttgctagctgggcttttcttcattccagagtcgccaagatggctggccaatgtcggaagggaaaaggaattccacgcctcattgcaaaagctgcgtggagaggatgctgacgagtatattgaatcactctatagccttccaaaggccaggcttcgagacttatttctgagcaaaaatatatatgcagtcattgtgggcgttggcttgatggtttttcagcaactcggagggataaatggtgttggcttctatgcaagttatatcttcagttctgctggattttctggaaaacttggaaccatcttgattggcattattcagattccaatcacattgtttggggccatactcatggataggagtggaagaagggttctcctgatggtctctgcatctggaacatttttgggctgcttcctcacaggagtatcattctatctgaaggcacaaggactgttctcagaatgggttcccacactggctctttccggcatactggtgggcaaatattaagtttccctggagatttaccattgctcatattgactgccggcagatattctcaatcaacatgaaagcaactggtgggagcttggtgacccttgttagctggctgggctccttcgcgatttcttactcgttcagcttccttatggactggagctctgcaggtaccttcttcatgttctcttcagccagcttgatcactgtactcttcgtggcgaagctggtccctgaaaccaaaggaaggacactagaggagatccaggactcactaaacaccagaagatagtaatgaatttacttcacactacagaataattaattctaagatggaaaaatgggaatttacaggacacagcagaataattccaagatggaaaacgaatgtaccgtcagacctctgctcatcgatagatatgtatacaagaaacaatatatataattctcacgtcctcccgcttcccctccctttctctcccgcaccacctccgtgtaatacgtagtgtactgtgtaccctatgtaggttaaggaatgctgcagattcagattacgcattatgtaccgtgcccctccagattgtttgagcatgagcagcgacagaaccgacattatgtttatgtaccatgtccctctagatcaaccagcagtacattttttatattcaggatcaacatttatgtatcatgtttttttagggaaaaggct

SEQ ID NO: 7711 - DNA, 2311 bp, Zea Mays
atgggtataatgcgagtcgcggacgatgtggaggccaggttggtggtcggggcaggtggcggcggcgggaccgccaccaccacgacggagccgcttctccgccactgccacggcggccgcaaggaggaggacgaccaggggtctaagatccgggacagcccggaggcggagggggcgtccgactgcgggaggacggacggaggctcgctgcggatggtccttgtctccaccgccgtcgccgtctgcggctccttcgagttcggcacctgcgtaagaagacgccgctgccgccgccgcctatccctaaatgcattccttccttccatccctcacctttcgcggaaatgcaacaacacgctcgctgattcgcgttcgacgttactgatgacatgcagctatatacggccttttcttcgtcactaccgtacttttccttctgttctgcgagttgtcgccatttgttttactaccgtcaatctgtaatgcacgcgtgtctcaagaagaagtagtagaatgaagcagacaaagcttcgcaccttcgcccaaggtcctacatgattcatttgcttgcaggtcggctactctgcgccgacgcagtcagggattgtagaggaagtcgggctatctatctccgagtttgcaatttttggatctgtactgacagtcggagcaatggttggtgccgttactagtgggcgcttggctgattttctcggacgaaaaatgaccatgcggatatcagctactatttgtatattcggttggctctccatacatctggccaagagcgctatcatgctctactttgggagaaccttgctgggtttcagcactggagttctttcttatgtggtgcctgtgttcatagctgaaatagcgccaaagaatctccgcgggggtctcgcaacgtcaaaccagctcttgatctgttccggaagctcagctacctacatcataggagccctggttgcatggcgcaatttggtacttgttggtttagtgccttgtgtcctcttgctagctgggcttttcttcattccagagtcgccaagatggctggccaatgtcggaagggaaaaggaattccacgcctcattgcaaaagctgcgtggagaggatgctgacgagtatattgaatcactctatagccttccaaaggccaggcttcgagacttatttctgagcaaaaatatatatgcagtcattgtgggcgttggcttgatggtttttcagcaactcggagggataaatggtgttggcttctatgcaagttatatcttcagttctgctggattttctggaaaacttggaaccatcttgattggcattattcagattccaatcacattgtttggggccatactcatggataggagtggaagaagggttctcctgatggtattaacgctacaaagctgagctgatgtgcatacaaagaaagattgttaggtagaatgttttgtgagatccttttatcatataggtctctgcatctggaacatttttgggctgcttcctcacaggagtatcattctatctgaaggcacaaggactgttctcagaatgggttcccacactggctctttccggcatactggtttacatcggggcatactcaattggaatgggtcctgtcccttgggttgtcatgtctgagatattctcaatcaacatgaaagcaactggtgggagcttggtgacccttgttagctggctgggctccttcgcgatttcttactcgttcagcttccttatggactggagctctgcaggtaccttcttcatgttctcttcagccagcttgatcactgtactcttcgtggcgaagctggtccctgaaaccaaaggaaggacactagaggagatccaggactcactaaacaccagaagatagtaatgaatttacttcacactacagaataattaattctaagatggaaaaatgggaatttacaggacacagcagaataattccaagatggaaaacgaatgtaccgtcagacctctgctcatcgatagatatgtatacaagaaacaatatatataattctcacgtcctcccgcttcccctccctttctctcccgcaccacctccgtgtaatacgtagtgtactgtgtaccctatgtaggttaaggaatgctgcagattcagattacgcattatgtaccgtgcccctccagattgtttgagcatgagcagcgacagaaccgacattatgtttatgtaccatgtccctctagatcaaccagcagtacattttttatattcaggatcaacatttatgtatcatgtttttttagggaaaaggct

SEQ ID NO: 7712 - DNA, 2034 bp, Zea Mays
atgggtataatgcgagtcgcggacgatgtggaggccaggttggtggtcggggcaggtggcggcggcgggaccgccaccaccacgacggagccgcttctccgccactgccacggcggccgcaaggaggaggacgaccaggggtctaagatccgggacagcccggaggcggagggggcgtccgactgcgggaggacggacggaggctcgctgcggatggtccttgtctccaccgccgtcgccgtctgcggctccttcgagttcggcacctgcctatatacggccttttcttcgtcactaccgtacttttccttctgttctgcgagttgtcgccatttgttttactaccgtcaatctgtcggctactctgcgccgacgcagtcagggattgtagaggaagtcgggctatctatctccgagtttgcaatttttggatctgtactgacagtcggagcaatggttggtgccgttactagtgggcgcttggctgattttctcggacgaaaaatgaccatgcggatatcagctactatttgtatattcggttggctctccatacatctggccaagagcgctatcatgctctactttgggagaaccttgctgggtttcagcactggagttctttcttatgtggtgcctgtgttcatagctgaaatagcgccaaagaatctccgcgggggtctcgcaacgtcaaaccagctcttgatctgttccggaagctcagctacctacatcataggagccctggttgcatggcgcaatttggtacttgttggtttagtgccttgtgtcctcttgctagctgggcttttcttcattccagagtcgccaagatggctggccaatgtcggaagggaaaaggaattccacgcctcattgcaaaagctgcgtggagaggatgctgacgtatcagaagaggcaattgagatcaaagagtatattgaatcactctatagccttccaaaggccaggcttcgagacttatttctgagcaaaaatatatatgcagtcattgtgggcgttggcttgatggtttttcagcaactcggagggataaatggtgttggcttctatgcaagttatatcttcagttctgctggattttctggaaaacttggaaccatcttgattggcattattcagattccaatcacattgtttggggccatactcatggataggagtggaagaagggttctcctgatggtctctgcatctggaacatttttgggctgcttcctcacaggagtatcattctatctgaaggcacaaggactgttctcagaatgggttcccacactggctctttccggcatactggtttacatcggggcatactcaattggaatgggtcctgtcccttgggttgtcatgtctgagatattctcaatcaacatgaaagcaactggtgggagcttggtgacccttgttagctggctgggctccttcgcgatttcttactcgttcagcttccttatggactggagctctgcaggtaccttcttcatgttctcttcagccagcttgatcactgtactcttcgtggcgaagctggtccctgaaaccaaaggaaggacactagaggagatccaggactcactaaacaccagaagatagtaatgaatttacttcacactacagaataattaattctaagatggaaaaatgggaatttacaggacacagcagaataattccaagatggaaaacgaatgtaccgtcagacctctgctcatcgatagatatgtatacaagaaacaatatatataattctcacgtcctcccgcttcccctccctttctctcccgcaccacctccgtgtaatacgtagtgtactgtgtaccctatgtaggttaaggaatgctgcagattcagattacgcattatgtaccgtgcccctccagattgtttgagcatgagcagcgacagaaccgacattatgtttatgtaccatgtccctctagatcaaccagcagtacattttttatattcaggatcaacatttatgtatcatgtttttttagggaaaaggct

SEQ ID NO: 7713 - DNA, 2292 bp, Zea Mays
gtcagaggctcagagcccagcccaggccggagaccactgtccactgcgtctgtctctgtcccgagctcccgatccatccatctgcatcgtgggaacaagaagaacaatgggtataatgcgagtcgcggacgatgtggaggccaggttggtggtcggggcaggtggcggcggcgggaccgccaccaccacgacggagccgcttctccgccactgccacggcggccgcaaggaggaggacgaccaggggtctaagatccgggacagcccggaggcggagggggcgtccgactgcgggaggacggacggaggctcgctgcggatggtccttgtctccaccgccgtcgccgtctgcggctccttcgagttcggcacctgcgtcggctactctgcgccgacgcagtcagggattgtagaggaagtcgggctatctatctccgaggtccgtcgcaccatccttgtcttgggaaaataatttgttctttccctgcgcactcaaagtttcttttcctactaaaatctgttatgatatagtgcaaagcataggattgctgtaatggttggatctacctacttctaatcttctatcgtgctgagatgttcgatcccagtgtacgaaaaatatatatatcgatgacccccacagagtttagactgtctatgcatctcaatctgcagtttgcaatttttggatctgtactgacagtcggagcaatggttggtgccgttactagtgggcgcttggctgattttctcggacgaaaaatgaccatgcggatatcagctactatttgtatattcggttggctctccatacatctggccaagagcgctatcatgctctactttgggagaaccttgctgggtttcagcactggagttctttcttatgtggtgcctgtgttcatagctgaaatagcgccaaagaatctccgcgggggtctcgcaacgtcaaaccagctcttgatctgttccggaagctcagctacctacatcataggagccctggttgcatggcgcaatttggtacttgttggtttagtgccttgtgtcctcttgctagctgggcttttcttcattccagagtcgccaagatggctggccaatgtcggaagggaaaaggaattccacgcctcattgcaaaagctgcgtggagaggatgctgacgtatcagaagaggcaattgagatcaaagagtatattgaatcactctatagccttccaaaggccaggcttcgagacttatttctgagcaaaaatatatatgcagtcattgtgggcgttggcttgatggtttttcagcaactcggagggataaatggtgttggcttctatgcaagttatatcttcagttctgctggattttctggaaaacttggaaccatcttgattggcattattcagattccaatcacattgtttggggccatactcatggataggagtggaagaagggttctcctgatggtctctgcatctggaacatttttgggctgcttcctcacaggagtatcattctatctgaaggcacaaggactgttctcagaatgggttcccacactggctctttccggcatactggtttacatcggggcatactcaattggaatgggtcctgtcccttgggttgtcatgtctgagatattctcaatcaacatgaaagcaactggtgggagcttggtgacccttgttagctggctgggctccttcgcgatttcttactcgttcagcttccttatggactggagctctgcaggtaccttcttcatgttctcttcagccagcttgatcactgtactcttcgtggcgaagctggtccctgaaaccaaaggaaggacactagaggagatccaggactcactaaacaccagaagatagtaatgaatttacttcacactacagaataattaattctaagatggaaaaatgggaatttacaggacacagcagaataattccaagatggaaaacgaatgtaccgtcagacctctgctcatcgatagatatgtatacaagaaacaatatatataattctcacgtcctcccgcttcccctccctttctctcccgcaccacctccgtgtaatacgtagtgtactgtgtaccctatgtaggttaaggaatgctgcagattcagattacgcattatgtaccgtgcccctccagattgtttgagcatgagcagcgacagaaccgacattatgtttatgtaccatgtccctctagatcaaccagcagtacattttttatattcaggatcaacatttatgtatcatgtttttttagggaaaaggct

SEQ ID NO: 7714 - DNA, 2145 bp, Zea Mays
ctcagagtcagaggctcagagcccagcccaggccggagaccactgtccactgcgtctgtctctgtcccgagctcccgatccatccatctgcatcgtgggaacaagaagaacaatgggtataatgcgagtcgcggacgatgtggaggccaggttggtggtcggggcaggtggcggcggcgggaccgccaccaccacgacggagccgcttctccgccactgccacggcggccgcaaggaggaggacgaccaggggtctaagatccgggacagcccggaggcggagggggcgtccgactgcgggaggacggacggaggctcgctgcggatggtccttgtctccaccgccgtcgccgtctgcggctccttcgagttcggcacctgcgtcggctactctgcgccgacgcagtcagggattgtagaggaagtcgggctatctatctccgagtttgcaatttttggatctgtactgacagtcggagcaatggttggtgccgttactagtgggcgcttggctgattttctcggacgaaaaatgaccatgcggatatcagctactatttgtatattcggttggctctccatacatctggccaagagcgctatcatgctctactttgggagaaccttgctgggtttcagcactggagttctttcttatgtggtgcctgtgttcatagctgaaatagcgccaaagaatctccgcgggggtctcgcaacgtcaaaccagctcttgatctgttccggaagctcagctacctacatcataggagccctggttgcatggcgcaatttggtacttgttggtttagtgccttgtgtcctcttgctagctgggcttttcttcattccagagtcgccaagatggctggccaatgtcggaagggaaaaggaattccacgcctcattgcaaaagctgcgtggagaggatgctgacgtatcagaagaggcaattgagatcaaagagtatattgaatcactctatagccttccaaaggccaggcttcgagacttatttctgagcaaaaatatatatgcagtcattgtgggcgttggcttgatggtttttcagcaactcggagggataaatggtgttggcttctatgcaagttatatcttcagttctgctggattttctggaaaacttggaaccatcttgattggcattattcagattccaatcacattgtttggggccatactcatggataggagtggaagaagggttctcctgatggtattaacgctacaaagctgagctgatgtgcatacaaagaaagattgttaggtagaatgttttgtgagatccttttatcatataggtctctgcatctggaacatttttgggctgcttcctcacaggagtatcattctatctgaaggcacaaggactgttctcagaatgggttcccacactggctctttccggcatactggtgggcaaatattaagtttccctggagatttaccattgctcatattgactgccggcagatattctcaatcaacatgaaagcaactggtgggagcttggtgacccttgttagctggctgggctccttcgcgatttcttactcgttcagcttccttatggactggagctctgcaggtaccttcttcatgttctcttcagccagcttgatcactgtactcttcgtggcgaagctggtccctgaaaccaaaggaaggacactagaggagatccaggactcactaaacaccagaagatagtaatgaatttacttcacactacagaataattaattctaagatggaaaaatgggaatttacaggacacagcagaataattccaagatggaaaacgaatgtaccgtcagacctctgctcatcgatagatatgtatacaagaaacaatatatataattctcacgtcctcccgcttcccctccctttctctcccgcaccacctccgtgtaatacgtagtgtactgtgtaccctatgtaggttaaggaatgctgcagattcagattacgcattatgtaccgtgcccctccagattgtttgagcatgagcagcgacagaaccgacattatgtttatgtaccatgtccctctagatcaaccagcagtacattttttatattcaggatcaacatttatgtatcatgtttttttagggaaaaggct

SEQ ID NO: 7715 - DNA, 2152 bp, Zea Mays
ctctttcgcaccgactctcatgtggcccccgcgccgggcgtgttgtgtataaatacgtatcgcactgccccgtccactcatcgttagaggctcagagtcagaggctcagagcccagcccaggccggagaccactgtccactgcgtctgtctctgtcccgagctcccgatccatccatctgcatcgtgggaacaagaagaacaatgggtataatgcgagtcgcggacgatgtggaggccaggttggtggtcggggcaggtggcggcggcgggaccgccaccaccacgacggagccgcttctccgccactgccacggcggccgcaaggaggaggacgaccaggggtctaagatccgggacagcccggaggcggagggggcgtccgactgcgggaggacggacggaggctcgctgcggatggtccttgtctccaccgccgtcgccgtctgcggctccttcgagttcggcacctgcgtcggctactctgcgccgacgcagtcagggattgtagaggaagtcgggctatctatctccgagtttgcaatttttggatctgtactgacagtcggagcaatggttggtgccgttactagtgggcgcttggctgattttctcggacgaaaaatgaccatgcggatatcagctactatttgtatattcggttggctctccatacatctggccaagagcgctatcatgctctactttgggagaaccttgctgggtttcagcactggagttctttcttatgtggtgcctgtgttcatagctgaaatagcgccaaagaatctccgcgggggtctcgcaacgtcaaaccagctcttgatctgttccggaagctcagctacctacatcataggagccctggttgcatggcgcaatttggtacttgttggtttagtgccttgtgtcctcttgctagctgggcttttcttcattccagagtcgccaagatggctggccaatgtcggaagggaaaaggaattccacgcctcattgcaaaagctgcgtggagaggatgctgacgtatcagaagaggcaattgagatcaaagagtatattgaatcactctatagccttccaaaggccaggcttcgagacttatttctgagcaaaaatatatatgcagtcattgtgggcgttggcttgatggtttttcagcaactcggagggataaatggtgttggcttctatgcaagttatatcttcagttctgctggattttctggaaaacttggaaccatcttgattggcattattcagattccaatcacattgtttggggccatactcatggataggagtggaagaagggttctcctgatggtctctgcatctggaacatttttgggctgcttcctcacaggagtatcattctatctgaaggcacaaggactgttctcagaatgggttcccacactggctctttccggcatactggtttacatcggggcatactcaattggaatgggtcctgtcccttgggttgtcatgtctgagatattctcaatcaacatgaaagcaactggtgggagcttggtgacccttgttagctggctgggctccttcgcgatttcttactcgttcagcttccttatggactggagctctgcaggtaccttcttcatgttctcttcagccagcttgatcactgtactcttcgtggcgaagctggtccctgaaaccaaaggaaggacactagaggagatccaggactcactaaacaccagaagatagtaatgaatttacttcacactacagaataattaattctaagatggaaaaatgggaatttacaggacacagcagaataattccaagatggaaaacgaatgtaccgtcagacctctgctcatcgatagatatgtatacaagaaacaatatatataattctcacgtcctcccgcttcccctccctttctctcccgcaccacctccgtgtaatacgtagtgtactgtgtaccctatgtaggttaaggaatgctgcagattcagattacgcattatgtaccgtgcccctccagattgtttgagcatgagcagcgacagaaccgacattatgtttatgtaccatgtccctctagatcaaccagcagtacattttttatattcaggatcaacatttatgtatcatgtttttttagggaaaaggct

SEQ ID NO: 7716 - DNA, 55 bp, Zea Mays
tggcaggtaaacatccttgatagggccgaattgctcaaatgtagctcgaatatct

SEQ ID NO: 7717 - DNA, 1159 bp, Zea Mays
gccgactccctgggatatttgctgcgcactcatctccctcagctagctcgaccgcctctctctggtctctagcgctgtggagctccttcctacgtgcgctagccgccaggtcgtcttcaacctccatccgtggagctcgcctctgccatggccgccctctgccctcctccctcaagccctagctgagtttttccatggtgccctggatgccagcccctttactcgatgcccctgctaggttcctggcatgttcgcccagaccgatgcctagctcccatggccgccctggatctccatggttgagttttctccctgcaggatccccccaaatagcgcctggtctttttcccttggtcgaaaacacctctgcacttaacccccctctgttgatggtcgacgtctcttcatccatggtacctaggtctccatccccatgcccctgcagcttgttctcaagccgccaaccatggagaaacttccggtgttggagggcgaagagctcgaagttctaaaggtaacgcccgccgggtgcttggtggaacgtctcaaccggaggttgttgtcgatctctcggattcgaggcgatttagttgtggtacgttaattgatcacgtgatgtggaagacaatagttggattaatctcaaagtgatgctgatgaataaaccagagaagtggatgatttgatcatgtaccaggatgggagatgctcaccaagtgatcgtcatctaacaacactgacttagtgttatcccaggcaagccccggtgcatttgccaccttccttgtgtttacaaaattttatcacttatatgctgcattaggtgataggagttgagtgattaaacacttgatgcattaccatccttgaaaggttgattaccacaccttgtcacccgttttataaaagctagagatgcttagtcttgctgatagattaagaaacatatttttgatctatgactcatgtttttacaaaaaaaataaaatgggcttgggacaatgaaggcatcaagacgttgataaattcattatccaggcatggcccctctgtcaggcgccaaatttttgaaatagtttaaaatgggaccagacgttgagcaggaaaggtcgtccgtctgtgtcgattaaggaccataccgattgttggcctgatgatc

SEQ ID NO: 7718 - DNA, 1078 bp, Zea Mays
gccgactccctgggatatttgctgcgcactcatctccctcagctagctcgaccgcctctctctggtctctagcgctgtggagctccttcctacgtgcgctagccgccaggtcgtcttcaacctccatccgtggagctcgcctctgccatggccgccctctgccctcctccctcaagccctagctgagtttttccatggtgccctggatgccagcccctttactcgatgcccctgctaggttcctggcatgttcgcccagaccgatgcctagctcccatggccgccctggatctccatggttgagttttctccctgcaggatccccccaaatagcgcctggtctttttcccttggtcgaaaacacctctgcacttaacccccctctgttgatggtcgacgtctcttcatccatggtacctaggtctccatccccatgcccctgcagcttgttctcaagccgccaaccatggagaaacttccggtgttggagggcgaagagctcgaagttctaaaggtacgttaattgatcacgtgatgtggaagacaatagttggattaatctcaaagtgatgctgatgaataaaccagagaagtggatgatttgatcatgtaccaggatgggagatgctcaccaagtgatcgtcatctaacaacactgacttagtgttatcccaggcaagccccggtgcatttgccaccttccttgtgtttacaaaattttatcacttatatgctgcattaggtgataggagttgagtgattaaacacttgatgcattaccatccttgaaaggttgattaccacaccttgtcacccgttttataaaagctagagatgcttagtcttgctgatagattaagaaacatatttttgatctatgactcatgtttttacaaaaaaaataaaatgggcttgggacaatgaaggcatcaagacgttgataaattcattatccaggcatggcccctctgtcaggcgccaaatttttgaaatagtttaaaatgggaccagacgttgagcaggaaaggtcgtccgtctgtgtcgattaaggaccataccgattgttggcctgatgatc

SEQ ID NO: 7719 - DNA, 1206 bp, Zea Mays
ctcacatacgctcctttatcttctagtgacgccgactccctgggatatttgctgcgcactcatctccctcagctagctcgaccgcctctctctggtctctagcgctgtggagctccttcctacgtgcgctagccgccaggtcgtcttcaacctccatccgtggagctcgcctctgccatggccgccctctgccctcctccctcaagccctagctgagtttttccatggtgccctggatgccagcccctttactcgatgcccctgctaggttcctggcatgttcgcccagaccgatgcctagctcccatggccgccctggatctccatggttgagttttctccctgcaggatccccccaaatagcgcctggtctttttcccttggtcgaaaacacctctgcacttaacccccctctgttgatggtcgacgtctcttcatccatggtacctaggtctccatccccatgcccctgcagcttgttctcaagccgccaaccatggtgcgttgtccgcctcggagaaacttccggtgttggagggcgaagagctcgaagttctaaaggtaacgcccgccgggtgcttggtggaacgtctcaaccggaggttgttgtcgatctctcggattcgaggcgatttagttgtggtacgttaattgatcacgtgatgtggaagacaatagttggattaatctcaaagtgatgctgatgaataaaccagagaagtggatgatttgatcatgtaccaggatgggagatgctcaccaagtgatcgtcatctaacaacactgacttagtgttatcccaggcaagccccggtgcatttgccaccttccttgtgtttacaaaattttatcacttatatgctgcattaggtgataggagttgagtgattaaacacttgatgcattaccatccttgaaaggttgattaccacaccttgtcacccgttttataaaagctagagatgcttagtcttgctgatagattaagaaacatatttttgatctatgactcatgtttttacaaaaaaaataaaatgggcttgggacaatgaaggcatcaagacgttgataaattcattatccaggcatggcccctctgtcaggcgccaaatttttgaaatagtttaaaatgggaccagacgttgagcaggaaaggtcgtccgtctgtgtcgattaaggaccataccgattgttggcctgatgatc

SEQ ID NO: 7720 - DNA, 1519 bp, Zea Mays
tgcttttctttattcactgataaagttgcattcttgccgtcccctaactgtcctttttgtgaatttcaagaaagcgatgtcaaaagatattttatagatgacgaaggcagcaactctttatgggagcaagacacagagcgatgccctacggccagggccattgcgcccagcaaatattatcagaaataaattccccacatacaagaatggttcaaatggtatagtgatcaagctggctgatggtccagaaatgccacctctcaaggagatcgttgcaaaggaaactgcagatctacttgatcgtcgtcagcgtctctctgttcgtgaacttgcgatgaagtttgagaagggtctcaacactgccacgctgttgtcgaatgaggttaaatggagacaagtagctttgctggagcgggatatccttttgaaaaatctaaagtgtgtattagaatcattgagaggccgggtgacaggcaaaactaaggatgaaatcgaggagtctatatctatggtggagatccttgcggttcagctctccaaaagagaagccgagttgcttcaacaaaaagaagaggtcacaaaattagcaaaatcattaaagcaggcttctgaagatgcaaagagaattgttgaagaagaaagagctaatgctcatacagaaatagaaactgctaagagttctgtccaaagagttcagcaagcagttcaggagcatgagaagatgtcccaaaataccgggaagcaagacatggaagaactaaagaaagaagttagagaagcccggaggatcaaaatgttgcatcagcccagcaaggcaatggatctggaaaatgaaatacgaattttacgtaacacattcgctgagaagtccaaggattgtgttaatcttttgaaagagttggaaatgcataaaaggttaaaagaaaatggtaccatcccttctttcgatctggagggtctccaatgcttaggatcaatgctacgtatagttggtttgagtggcactcacatggatttgtcaaatatttcaatccagtggttccggatacatccaaaagaaagcaacaaagagatcatttcaggcgccacaagaccagtatatgctctggagccacatgatgttgggcgctatttgcaagctgaaatcgatgtcggcggtgaaattgcagttgcaaagacagctgggccagtagaccctgatgctggattggttgattatgtggagacactcgtaaggaaacctgaaactgaattcaatgttgttgtgcttcaattgaatggcattgacctgccaaaagagtcagttcatgttctcaatgtcggaaggctgcggatgagacttactaaagggaattcagtagttgccaaggaattctattcctcatcaatgcagatcatccttgctgggccaggcgacaaaactccctggtgatggcacctgtgctgctctgccaatccccaccactcttaacaatccgcgattcgcacagcttgcttgcaccagttcctctgattttcc

SEQ ID NO: 7721 - DNA, 1661 bp, Zea Mays
caactacctccggtcctccgctggcccgcaacgcatcactctcgccctcgcgagatccccaatctcgccgcaggtgtctcgccggagtgacccccattgcggcgcgggttatcgattccgcggccagcagttcttccccttctgctgtgggtcccgcgactcgattcgagctgttctgccgcggaggcggccgccccagccgcggccaaggcgcgcgcattgcgagggatattttatagatgacgaaggcagcaactctttatgggagcaagacacagagcgatgccctacggccagggccattgcgcccagcaaatattatcagaaataaattccccacatacaagaatggttcaaatggtatagtgatcaagctggctgatggtccagaaatgccacctctcaaggagatcgttgcaaaggaaactgcagatctacttgatcgtcgtcagcgtctctctgttcgtgaacttgcgatgaagtttgagaagggtctcaacactgccacgctgttgtcgaatgaggttaaatggagacaagtagctttgctggagcgggatatccttttgaaaaatctaaagtgtgtattagaatcattgagaggccgggtgacaggcaaaactaaggatgaaatcgaggagtctatatctatggtggagatccttgcggttcagctctccaaaagagaagccgagttgcttcaacaaaaagaagaggtcacaaaattagcaaaatcattaaagcaggcttctgaagatgcaaagagaattgttgaagaagaaagagctaatgctcatacagaaatagaaactgctaagagttctgtccaaagagttcagcaagcagttcaggagcatgagaagatgtcccaaaataccgggaagcaagacatggaagaactaaagaaagaagttagagaagcccggaggatcaaaatgttgcatcagcccagcaaggcaatggatctggaaaatgaaatacgaattttacgtaacacattcgctgagaagtccaaggattgtgttaatcttttgaaagagttggaaatgcataaaaggttaaaagaaaatggtaccatcccttctttcgatctggagggtctccaatgcttaggatcaatgctacgtatagttggtttgagtggcactcacatggatttgtcaaatatttcaatccagtggttccggatacatccaaaagaaagcaacaaagagatcatttcaggcgccacaagaccagtatatgctctggagccacatgatgttgggcgctatttgcaagctgaaatcgatgtcggcggtgaaattgcagttgcaaagacagctgggccagtagaccctgatgctggattggttgattatgtggagacactcgtaaggaaacctgaaactgaattcaatgttgttgtgcttcaattgaatggcattgacctgccaaaagagtcagttcatgttctcaatgtcggaaggctgcggatgagacttactaaagggaattcagtagttgccaaggaattctattcctcatcaatgcagatcatccttgctgggccaggcgacaaaactccctggtgatggcacctgtgctgctctgccaatccccaccactcttaacaatccgcgattcgcacagcttgcttgcaccagttcctctgattttcc

SEQ ID NO: 7722 - DNA, 1683 bp, Zea Mays
agaaaagcaactacctccggtcctccgctggcccgcaacgcatcactctcgccctcgcgagatccccaatctcgccgcaggtgtctcgccggagtgacccccattgcggcgcgggttatcgattccgcggccagcagttcttccccttctgctgtgggtcccgcgactcgattcgagctgttctgccgcggaggcggccgccccagccgcggccaaggcgcgcgcattgcgagggttagttacctctaggatattttatagatgacgaaggcagcaactctttatgggagcaagacacagagcgatgccctacggccagggccattgcgcccagcaaatattatcagaaataaattccccacatacaagaatggttcaaatggtatagtgatcaagctggctgatggtccagaaatgccacctctcaaggagatcgttgcaaaggaaactgcagatctacttgatcgtcgtcagcgtctctctgttcgtgaacttgcgatgaagtttgagaagggtctcaacactgccacgctgttgtcgaatgaggttaaatggagacaagtagctttgctggagcgggatatccttttgaaaaatctaaagtgtgtattagaatcattgagaggccgggtgacaggcaaaactaaggatgaaatcgaggagtctatatctatggtggagatccttgcggttcagctctccaaaagagaagccgagttgcttcaacaaaaagaagaggtcacaaaattagcaaaatcattaaagcaggcttctgaagatgcaaagagaattgttgaagaagaaagagctaatgctcatacagaaatagaaactgctaagagttctgtccaaagagttcagcaagcagttcaggagcatgagaagatgtcccaaaataccgggaagcaagacatggaagaactaaagaaagaagttagagaagcccggaggatcaaaatgttgcatcagcccagcaaggcaatggatctggaaaatgaaatacgaattttacgtaacacattcgctgagaagtccaaggattgtgttaatcttttgaaagagttggaaatgcataaaaggttaaaagaaaatggtaccatcccttctttcgatctggagggtctccaatgcttaggatcaatgctacgtatagttggtttgagtggcactcacatggatttgtcaaatatttcaatccagtggttccggatacatccaaaagaaagcaacaaagagatcatttcaggcgccacaagaccagtatatgctctggagccacatgatgttgggcgctatttgcaagctgaaatcgatgtcggcggtgaaattgcagttgcaaagacagctgggccagtagaccctgatgctggattggttgattatgtggagacactcgtaaggaaacctgaaactgaattcaatgttgttgtgcttcaattgaatggcattgacctgccaaaagagtcagttcatgttctcaatgtcggaaggctgcggatgagacttactaaagggaattcagtagttgccaaggaattctattcctcatcaatgcagatcatccttgctgggccaggcgacaaaactccctggtgatggcacctgtgctgctctgccaatccccaccactcttaacaatccgcgattcgcacagcttgcttgcaccagttcctctgattttcc

SEQ ID NO: 7723 - DNA, 1182 bp, Zea Mays
gtttgtttctgggcactggctgtgggacagagaggagacatgtgccactgccatatcttgttgctggatttgaaataagccactgctagctagctactgtgcttctgtttcctggctacctgcctattcaaaaagaacaacatataagtatcttctgtattttgcccattatttcattggatctttgatgaggactgaagcttaattgggtttcaggaagatcgtggcagacaggtgggagttcgccaacgagttcttcaggaagggcgctaagcacctcctctcggagatccaccggaggaagtcctcgtcgtgctcgcaaccgccgcagaagctgcagccaccgccgctccctcagcaccagcggccttacgacctcagcctcttctttccgccgccgcagccgcctcggcatcctacgtcgggctaccacgtcgtccaggaggaagaccacggccacggcgggaataaggacttcctggcgaccctgtcggaggacaaccgggagctccggcggcgcaactcgctgctgctgtcggagctggcccacatgaggcggctctacaacgacatcatatacttcctgcagaaccacgtggagccggtgccgccgccaccgccggggacgacgacgaccgccgccagctgcaggctggtggagctcggctctgccgacgacgcctcggcggcacagacgtggaggccacgccgcggcgacgacgatgaggcgccggtgaagctgtttggcgtgcgcctgaacgacggcaagaagaggagggcacaacaggtcgtgccgctggaagaaaaaggtggtggtaatgatcaaggtgaaggccttgccgatggtgaccgcaaatggccatggcgttggtgacgagatgatcagcgaggtgagagtgagacgtaggtgattgttgcgtgtagcgcgtagactaattaattttctagatagagaagcagaggtacgtacacgctgcagggagctagctcggtagtctacggtttatgtaataagtttattagaatgcatgattttgatttgttttccccttttacgcattatgtatagtctcgacgatatgtgcatgccatcaccaagcttttctcaaaggaatggtttggagtttacatttgtttaaactgttttcactagtttgacaagttaattcgttgactatatac

SEQ ID NO: 7724 - DNA, 1608 bp, Zea Mays
tggcgcgctatgtgcgtgcatgtgtgcgctccagtctgaagctaattagctttagggagagggccggggccttcttctcttctgtcgtctccttcatctctctcgcactatagcaatctagcatagagcgcctttgctcctagcttgcctcctctcgtcccagtcgatgatggcggcattcctcgtggagaggagaggtgcggcgcgcggcggtggctgtggtgatacgacgacggggcgcggtggtgtccgatccatggacgccgacatgggcatgagctcgcacgctgcagctaataagccggcgccggggccggcccccttcctcaccaagaccttccagctcgtggaggaccaccgcaccgaccacgtcgtgtcgtggggggaggacggcgccaccttcgtggtgtggcggccgccggagttcgcccgggacctcctccccagctacttcaagcacaacaacttctccagcttcgtcaggcagctcaacacctaccctttttcatttgaagccacagcagcattgctgagcctgactgcctgagatcttagcgtgtggctgtgctgtcaagttagctgcatgcatgcagcctgcaagcgtcgtctggcatcggtgggccggggcgagaagggtttcaggaagatcgtggcagacaggtgggagttcgccaacgagttcttcaggaagggcgctaagcacctcctctcggagatccaccggaggaagtcctcgtcgtgctcgcaaccgccgcagaagctgcagccaccgccgctccctcagcaccagcggccttacgacctcagcctcttctttccgccgccgcagccgcctcggcatcctacgtcgggctaccacgtcgtccaggaggaagaccacggccacggcgggaataaggacttcctggcgaccctgtcggaggacaaccgggagctccggcggcgcaactcgctgctgctgtcggagctggcccacatgaggcggctctacaacgacatcatatacttcctgcagaaccacgtggagccggtgccgccgccaccgccggggacgacgacgaccgccgccagctgcaggctggtggagctcggctctgccgacgacgcctcggcggcacagacgtggaggccacgccgcggcgacgacgatgaggcgccggtgaagctgtttggcgtgcgcctgaacgacggcaagaagaggagggcacaacaggtcgtgccgctggaagaaaaaggtggtggtaatgatcaaggtgaaggccttgccgatggtgaccgcaaatggccatggcgttggtgacgagatgatcagcgaggtgagagtgagacgtaggtgattgttgcgtgtagcgcgtagactaattaattttctagatagagaagcagaggtacgtacacgctgcagggagctagctcggtagtctacggtttatgtaataagtttattagaatgcatgattttgatttgttttccccttttacgcattatgtatagtctcgacgatatgtgcatgccatcaccaagcttttctcaaaggaatggtttggagtttacatttgtttaaactgttttcactagtttgacaagttaattcgttgactatatac

SEQ ID NO: 7725 - DNA, 256 bp, Zea Mays
ctcccacctcccgccaccgactcgcttgcgtgggctgcgtccgcatcgtcctcatgacctcatcaggctcccacctcccgccaccgcgcctctcgttgtgccgtgcggcggcggctgacggttcacgtggattgcaatcgatgccaagctgcgcgccttcccgctctaccgctctcgtgtaattctgacatggaccatcttcttcatcttgtgcacgtcaagaatcttgctgcagatcttctctctttaaccatac

SEQ ID NO: 7726 - DNA, 339 bp, Zea Mays
tcggcctcctcctcggcgggcgacttcttcttcgcgggcggcgggagttcgccgccgttgtcgccaacttcgtgagccatggcagaagctagcgaccgggcaggtgctcaccggccgccgcgtcggaacaggggagggagaggtagggcaagggaacacttcgctaatcaaggccgatgtggcgctgtccgtgcgcgtctgcgcgagcgcaactgcgcattggccgggaggcggagcagtttcggtagcagcagccagcaacgcctgggagttggaaggagcgggtggatgggaatgggatggtggactcgccggtggccggcggagagtccaacgaag

SEQ ID NO: 7727 - DNA, 4148 bp, Zea Mays
ctcgtggtttggtcctccatcactcgaaatccttgaagccccctctcagaccagtcccagttgatttgcgcgagagatgcttcaattgcttctcatctgagcaccgtgcggcggagtgtcgtaatcgtgtgcggtgcttcctctgccggctgtcggggcaccgtgtgtacgtgtgcccgcgccggcatgcagccccatccctcccaaggcgcaacttggtgtggcggcatgtgtctaaggagacatcggaggcggcaaattcgtgactggtcatggctggcggttcggtggctgggaatggtcctgccgctggtgatggcacgaagaaacgcactcgtcgtggacagaggaagcggaaggctgcgtcgggaagccggttgggcgacgcgcctatcggtggctccacactgctggcgcctgtggtggctcctcctaccttcgacctggccaggccggtgtgttttatcgggcgttgtgggaggattgatcgggctgaggtggagctccgtcgtacactgatcgtcggtgttatcggacaggaaggctctggctgcgccgcggaggtccgtgatgcgatcgcctcgaggttttgccttgaggcggatacgctccgcctacgtcatgttgcgccaaattccttcctcgtcttcttcccctccgtgagcttggttgatcgcgtggtcgacagggggcagtcgcttcatgtccctcccctcaggctacatgttagaaggtggtctcatcaagcttttgcatctggaagtggccagtcgcttgtgccccttgacattgaactctgtggaatccatgctcgtctctgggggattgagactgcggaggctctggttggtgcttactgtttgattcatggtctgctatcatattcagtcagtggagatgatttatctgtcctcagattgagggtctggtgccgttcgccagaacatctgccggcggttttggacctccatgctgaggagtcggcagtcattggtgaggatgggaattggcttcctcgcacattggtgttccctgtttcggagttggttcttcgttcgggcagagttccaggtttggggttagataatccttcgccatctccattggactttgccgacaaagacagggatcatgatcaacatgaacgacgaccaaggcagctggatcacccaacatcctccactcgggcttcggtgcatttgcggttggacccacgcattcagtcggagccgtcgcatgatggacaggtggatgtcattcctctccagtttgttcatgttgtagaattggtggcacccatgtctccatatcttgtggaggttggaccaattgatgcctcggctatcccagtaacttcgattgaggagctggaggcgcctggacacccacccgacttggccttgggtctaacagtggatttgggtgagaacttccagtgtgacgtctcgttgccaggtgatttatttccttctaagctaagttctggagatcttgtagcagtggttcaggaggctgttttggaggatgttatctcaacagggcagaatggttccggaaactgcatggtcagggattcttcttctcaattggaggctggtgttatttctaatgtctgctctgtcaagccgaggaaacactgatcgtgtcagtcctcgggggcggacagatggaaggctaagctgcctgttttcaaagtctattccaggagacggatgaccccagttcagcttgtccaggacgaccttctgttgcgatcggttgttgaattggatccacctttgcaagagtccaagattggggtttcaagaccaactgatggcctgttacccccccccctcggtgtaccaaaagaaggaaaaagacaatgccaagtaattttcgaccaaggcgaagtaggagagtggccaaattccctctggagttgagttccagttcggctgctcatgcgtgccgacatccgggattttgtgatgataataagaatatatccttcaaggatgccagcaattatgcaaaattatttgatactgggctttctaatgagcatatcgctgctttggcgctttgtttggttgggaggtgcctcaagatgggcatgtttagatgttggtctgtgaggcagtgatggtagtcttcgtttgtttttatggagtatagttgttttctaatatggaatgtgaggggtctcaatgatcgtgccaagagggattcggttaaaactctggttcttgatatcaaaccttccattgtctccaggagatcaaattatgttccatctctgattttgatattctgtctattcttagggctggatttagtaattttgtttatagctcatctcaggggactagaggaggggtgttaattgcttggtgtgatgggtcttttgtctctgtggattctgttgtgaagaacttctctgtctcagtccagtttcaggaggagtctggttcttgctggtggttcacatgtgtttatggacctcatcaggacaaccttaaacaagcttttctccatgaattaagattggtcagggaggagtgtgcggggccatggatcttgtgtggtgattttaacctgatttacagagaggaggataagaatatttccaacataaacaggacaatgttgggtaatttcagaggtcttgttaattccttggagctaaaggagattcctttgattggtagaaggtttacttgatcgaatcagagggatgagcctacccttgtgaaattggatcatgttttctgcactacaggttgggaagattcttttcctgattgttctcttcacagtaacgctacctcagtttcatatcactgtcccagtgtcccctaactcttaaagtcagagaggtgtgcttgggtaagcgacggtttcatttcgagagttttgggcctaagatccctgggtttttggatgtggtggctgcatcgtggaatcagccattacaggattcttgccctatggagaagatatcattgaagttaaaaagattagctaagtgtttgcaatcctgggggcataaagaagtgggcaatgtgaatgtccagttgggtcgtgctcgtgaggtactgcattagattggagatggcgcaagatagcagaattttgtccagggaggaaatttggttattgagacagctaaaacaacattgcttggtcctggcttctttgcaaaggacagttgcatgtctaaggtcacgtattcaatttttaaaagaaggtcatgccaatactcaattcttccaccgacaggcttgttaccgtaagaagcggaattttatttcaaagctagaggaagatggaagggtgattacaaatcatgatgacatacaggaagtcctggatggtttcttttccaacctattgggtgctgattttcagaggcgttttactattgaactatcaagctgtcatagggatgttgtggatcttagtgcgctagatagtcctttcttggagaaggaggtaagggatactgttgcaggcctcccttctgataaagctcctgggcctgatgggtttacggggaggttttacaagacatgttggaacattattaaagatgatctgttggctgctctgaattcttagcatcaagtaaatgctcaaaaattgggttgctgaatttggcctatcttatccttctcccaaagaggttggatgctatgtcggcgagtgattataggcctattagcctaatccatagttttgctaagttggtcaccaagcttcttgccaacaggttgggtcctcatcttcatgagatggctgcagccaatcagagcacttttgtgagagggagatcaattcatgacaactttatgttggcccaacagtcaattaagtctcttcacaagagaaaggtcgctagtttgttcttaaaattggatatctccagggctttcgattcagtgtcttgggcttttattattgaaattctttctcatcttggttttggacctatttggcgtaatttgatttcctctctgtttttcacgtcttctaagcaagtgcttctaaatggttctcctggtaatcgtattgcacatcggagaggtcttcgtcagggagaccatctatctcctatgttgtttgtgcatgtcatggatgttttttctcgaacacgcaggagagttgtg

SEQ ID NO: 7728 - DNA, 764 bp, Zea Mays
actatacacccttgtcctgtttgccatggcaaaatttacaagacattcttgtaggtcgtagcacaaactgttgagactggagctcaaactgctgcgacattaacacagcaaacagagcaaatgaagagaattggtaatgagctagatactgtccacttctcactgaagaaagctagccaactagtgaaggagattggtcgccaggttgcgactgacaaatgtatcatggcattcctcttcctgatcgttttgggtgtgattgctatcattgttgtcaagatcgtccatccgaataacaaaaacattcgagacattccagggctggccccgcctgctcaaaactatcagattcacaacaggagattgttgtgggcagaagcttccataggcatgtgatggctctgaatgtaggcttcatgtggacgcactgcctgcgaagcagcagctatccatagggcgaaagatacatagtaacaattctttgtgcctgtatatctattttgtcttgttaactccgagccctaggtctgtattcctgcgtctggtgtttgtacaccgctggccgtttggctgtgtatatggtacagagatgagatcttaaaaccaaaccagtaattatgacaaatacttgaaagagctacagtaccgaaatactccagttggtactcgctgcacttcatgggcgaatatataaagggtgccggttgggccgtgtaacacattctgaattccgaagacccatgaaaagaatgtgaacgtttaag

SEQ ID NO: 7729 - DNA, 1056 bp, Zea Mays
ctcatctcccatgtttctcaatgtggagcgcaggagcggtgatctgggcagaatcagtagtcggtcctgcttgaccctgaccaacgattttggacgatgtccctgggttgcagagcaaactatcgtccccgacttggccacttctgtgttcatacctggttaagaggaactgcaactgaaaacaacaagtggatcgaatgccatgacaaatcaacaactcattgatacgggaaggaaccaaatggaccaaacagatcaagctattgaacgttcaaaaatggttacttcccttactatacacccttgtcctgtttgccatggcaaaatttacaagacattcttgtaggtcgtagcacaaactgttgagactggagctcaaactgctgcgacattaacacagcaaacagagcaaatgaagagaattggtaatgagctagatactgtccacttctcactgaagaaagctagccaactagtgaaggagattggtcgccaggttgcgactgacaaatgtatcatggcattcctcttcctgatcgttttgggtgtgattgctatcattgttgtcaagatcgtccatccgaataacaaaaacattcgagacattccagggctggccccgcctgctcaaaactatcagattcacaacaggagattgttgtgggcagaagcttccataggcatgtgatggctctgaatgtaggcttcatgtggacgcactgcctgcgaagcagcagctatccatagggcgaaagatacatagtaacaattctttgtgcctgtatatctattttgtcttgttaactccgagccctaggtctgtattcctgcgtctggtgtttgtacaccgctggccgtttggctgtgtatatggtacagagatgagatcttaaaaccaaaccagtaattatgacaaatacttgaaagagctacagtaccgaaatactccagttggtactcgctgcacttcatgggcgaatatataaagggtgccggttgggccgtgtaacacattctgaattccgaagacccatgaaaagaatgtgaacgtttaag

SEQ ID NO: 7730 - DNA, 1671 bp, Zea Mays
ggaaatgttagcttgaatgccaatctcattcttgaatgacattatgacttaggtactgttggttgatctgtgcttatggcagttagatgattcaatttaatgaactggactgatgttatcttttctacctttttttggtcactgggagacgatttatggattgttttgaatatgtcaactgtcactgaaacttaaaggtttcagaccatattcgaagggtcggggatgcattttgatgcttgccttgttattgtaaataaatattgatttgattaaaaatggaatatctatccttgcccctcccaatttatattagtcatcgtaaatgttgcaacttgcaagcagtttttggcaggcttggatgcctgcatccttactatgaactagtattggcatccgtagtccatttcttgtgtgagatcaacctgagttttgagttgcaatagcagtatgttcaccacctttatgtgacttgatcagggacacctcttacgcttgtgagttgatgtagattttggaactccttgtttaactcttttgatctcattcaaaaaatggattccaaaagatggataagattaaagattcaaataggcaagctaagcaattggaagatcttactgtgaaaatgaaggagtgcaagcgcttgatcaaagagtttgatcgcattctcaaagatgaggagtcaaataatccacctgagatcaacaagcagctaaatgacagaaaacagttcatgatcaaagagttgaattcctatgtcaccttgaggaaaacataccaaagtagccttggtaacaacaataagagggttgagctctttgatatgggtgctggaagtagtgagcctgctgctgaggacaatattcaaatggcatcagccatgacaaatcaacaactcattgatacgggaaggaaccaaatggaccaaacagatcaagctattgaacgttcaaaaatggtcgtagcacaaactgttgagactggagctcaaactgctgcgacattaacacagcaaacagagcaaatgaagagaattggtaatgagctagatactgtccacttctcactgaagaaagctagccaactagtgaaggagattggtcgccaggttgcgactgacaaatgtatcatggcattcctcttcctgatcgttttgggtgtgattgctatcattgttgtcaagatcgtccatccgaataacaaaaacattcgagacattccagggctggccccgcctgctcaaaactatcagattcacaacaggagattgttgtgggcagaagcttccataggcatgtgatggctctgaatgtaggcttcatgtggacgcactgcctgcgaagcagcagctatccatagggcgaaagatacatagtaacaattctttgtgcctgtatatctattttgtcttgttaactccgagccctaggtctgtattcctgcgtctggtgtttgtacaccgctggccgtttggctgtgtatatggtacagagatgagatcttaaaaccaaaccagtaattatgacaaatacttgaaagagctacagtaccgaaatactccagttggtactcgctgcacttcatgggcgaatatataaagggtgccggttgggccgtgtaacacattctgaattccgaagacccatgaaaagaatgtgaacgtttaag

SEQ ID NO: 7731 - DNA, 2115 bp, Zea Mays
ttcctcaccagtgtctcttcagcggctggagatgtttgcccatgtgggtggtgggctggcggcacgagattgatcggggttgtcgcatgcatgcagtagaacgtagggttaaaagggcagttattgggctggagcaaccagccagatacgtgttggccgacgtatcacatatttctgtatctatttttactgttatttctctgataagtatctatcacacatcggagccgtatctgtattaggtacatatctgatacgggatacagaccctgccacacgtatccatgcatcatagggttatactatgtctttccttgacactactgagcttgaattcttagaattgctctttgtctggaaatccatgcttaacttattttctaaaaggaaagcttactttatttggtgattacatgacaaatagttgtccaggtggatatttagttttggaaatgttagcttgaatgccaatctcattcttgaatgacattatgacttaggtactgttggttgatctgtgcttatggcagttagatgattcaatttaatgaactggactgatgttatcttttctacctttttttggtcactgggagacgatttatggattgttttgaatatgtcaactgtcactgaaacttaaaggtttcagaccatattcgaagggtcggggatgcattttgatgcttgccttgttattgtaaataaatattgatttgattaaaaatggaatatctatccttgcccctcccaatttatattagtcatcgtaaatgttgcaacttgcaagcagtttttggcaggcttggatgcctgcatccttactatgaactagtattggcatccgtagtccatttcttgtgtgagatcaacctgagttttgagttgcaatagcagtatgttcaccacctttatgtgacttgatcagggacacctcttacgcttgtgagttgatgtagattttggaactccttgtttaactcttttgatctcattcaaaaaatggattccaaaagatggataagattaaagattcaaataggcaagctaagcaattggaagatcttactgtgaaaatgaaggagtgcaagcgcttgatcaaagagtttgatcgcattctcaaagatgaggagtcaaataatccacctgagatcaacaagcagctaaatgacagaaaacagttcatgatcaaagagttgaattcctatgtcaccttgaggaaaacataccaaagtagccttggtaacaacaataagagggttgagctctttgatatgggtgctggaagtagtgagcctgctgctgaggacaatattcaaatggcatcagccatgacaaatcaacaactcattgatacgggaaggaaccaaatggaccaaacagatcaagctattgaacgttcaaaaatggtcgtagcacaaactgttgagactggagctcaaactgctgcgacattaacacagcaaagcaaatgaagagaattggtaatgagctagatactgtccacttctcactgaagaaagctagccaactagtgaaggagattggtcgccaggttgcgactgacaaatgtatcatggcattcctcttcctgatcgttttgggtgtgattgctatcattgttgtcaagatcgtccatccgaataacaaaaacattcgagacattccagggctggccccgcctgctcaaaactatcagattcacaacaggagattgttgtgggcagaagcttccataggcatgtgatggctctgaatgtaggcttcatgtggacgcactgcctgcgaagcagcagctatccatagggcgaaagatacatagtaacaattctttgtgcctgtatatctattttgtcttgttaactccgagccctaggtctgtattcctgcgtctggtgtttgtacaccgctggccgtttggctgtgtatatggtacagagatgagatcttaaaaccaaaccagtaattatgacaaatacttgaaagagctacagtaccgaaatactccagttggtactcgctgcacttcatgggcgaatatataaagggtgccggttgggccgtgtaacacattctgaattccgaagacccatgaaaagaatgtgaacgtttaag

SEQ ID NO: 7732 - DNA, 1213 bp, Zea Mays
gtccttcaagatgggttttacactgctaaaatggattccaaaagatggataagattaaagattcaaataggcaagctaagcaattggaagatcttactgtgaaaatgaaggagtgcaagcgcttgatcaaagagtttgatcgcattctcaaagatgaggagtcaaataatccacctgagatcaacaagcagctaaatgacagaaaacagttcatgatcaaagagttgaattcctatgtcaccttgaggaaaacataccaaagtagccttggtaacaacaataagagggttgagctctttgatatgggtgctggaagtagtgagcctgctgctgaggacaatattcaaatggcatcagccatgacaaatcaacaactcattgatacgggaaggaaccaaatggaccaaacagatcaagctattgaacgttcaaaaatggttacttcccttactatacacccttgtcctgtttgccatggcaaaatttacaagacattcttgtaggtcgtagcacaaactgttgagactggagctcaaactgctgcgacattaacacagcaaacagagcaaatgaagagaattggtaatgagctagatactgtccacttctcactgaagaaagctagccaactagtgaaggagattggtcgccaggttgcgactgacaaatgtatcatggcattcctcttcctgatcgttttgggtgtgattgctatcattgttgtcaagatcgtccatccgaataacaaaaacattcgagacattccagggctggccccgcctgctcaaaactatcagattcacaacaggagattgttgtgggcagaagcttccataggcatgtgatggctctgaatgtaggcttcatgtggacgcactgcctgcgaagcagcagctatccatagggcgaaagatacatagtaacaattctttgtgcctgtatatctattttgtcttgttaactccgagccctaggtctgtattcctgcgtctggtgtttgtacaccgctggccgtttggctgtgtatatggtacagagatgagatcttaaaaccaaaccagtaattatgacaaatacttgaaagagctacagtaccgaaatactccagttggtactcgctgcacttcatgggcgaatatataaagggtgccggttgggccgtgtaacacattctgaattccgaagacccatgaaaagaatgtgaacgtttaag

SEQ ID NO: 7733 - DNA, 1693 bp, Zea Mays
caccccttcacttgtatataaatgtaatgatctgtggaatacaaacgacagtcctgtcatttgtcgcttctctctgtctctctccactgagttagccactgagttataataaccacgacgttaacaacgatatcttgccctgcatcgcttttcttcggccgcgctgtttcgacatattccattctaaaccccagctaatacgccagccagcccaggagccaagccctaggccctactcactgtggaccccaaatccccaactgctcctcttcctcgtcgtcttcctctccgtccccgtccccgtccccctctcggcctccccctccactagccccaaatcctccgtctcctcctgtccctctccgcatccaccggaccccaccgggaatggcggtttgagtaagttcccgtaccagggttcttcggtctgggaggccgaggggacaccgggtcggagtgaggggccgccatggcgagcgacgtgcccatgaccccggagctcgagcagatcgacggagagatccacgatatcttccgcgccctccaaaatggattccaaaagatggataagattaaagattcaaataggcaagctaagcaattggaagatcttactgtgaaaatgaaggagtgcaagcgcttgatcaaagagtttgatcgcattctcaaagatgaggagtcaaataatccacctgagatcaacaagcagctaaatgacagaaaacagttcatgataccaaagtagccttggtaacaacaataagagggttgagctctttgatatgggtgctggaagtagtgagcctgctgctgaggacaatattcaaatggcatcagccatgacaaatcaacaactcattgatacgggaaggaaccaaatggaccaaacagatcaagctattgaacgttcaaaaatggttacttcccttactatacacccttgtcctgtttgccatggcaaaatttacaagacattcttgtaggtcgtagcacaaactgttgagactggagctcaaactgctgcgacattaacacagcaaacagagcaaatgaagagaattggtaatgagctagatactgtccacttctcactgaagaaagctagccaactagtgaaggagattggtcgccaggttgcgactgacaaatgtatcatggcattcctcttcctgatcgttttgggtgtgattgctatcattgttgtcaagatcgtccatccgaataacaaaaacattcgagacattccagggctggccccgcctgctcaaaactatcagattcacaacaggagattgttgtgggcagaagcttccataggcatgtgatggctctgaatgtaggcttcatgtggacgcactgcctgcgaagcagcagctatccatagggcgaaagatacatagtaacaattctttgtgcctgtatatctattttgtcttgttaactccgagccctaggtctgtattcctgcgtctggtgtttgtacaccgctggccgtttggctgtgtatatggtacagagatgagatcttaaaaccaaaccagtaattatgacaaatacttgaaagagctacagtaccgaaatactccagttggtactcgctgcacttcatgggcgaatatataaagggtgccggttgggccgtgtaacacattctgaattccgaagacccatgaaaagaatgtgaacgtttaag

SEQ ID NO: 7734 - DNA, 1689 bp, Zea Mays
cctgtgttgagtacctttcaatcaatgattaataatcaacaagatcgtaaccatgcttgcttaatcatggttgtgtgctttagaggttatgtctcttgaatcatttaaggggtagtttttcattagatatatccaccatgattaactcttgttgtgttcgtgaataaacctgtattccgttgtgagttatgctatatggttttaatgattaacctgtgtgcaaatatgacatattgtttagtttatgttcacatgattactctagtctgatattgtgtgaataccaactccatgttgtgcctctaatgcacccttttgagctaaggcgcatgaacaaaaggagccctcaattagtgacaactggtgctctcatggcaattcaggaaaaggcaaaggtatggagaatggaactatgcaatcctgtcttcgagtagagtaagatttatgttttaaagtgatactttttaatcgcctattcacccccctctaggcgacatccagatcatgttcccgggccaaagggaactttcactcacacaacaggaacgagcgatgcacagttttatgcagaaatggattccaaaagatggataagattaaagattcaaataggcaagctaagcaattggaagatcttactgtgaaaatgaaggagtgcaagcgcttgatcaaagagtttgatcgcattctcaaagatgaggagtcaaataatccacctgagatcaacaagcagctaaatgacagaaaacagttcatgatcaaagagttgaattcctatgtcaccttgaggaaaacataccaaagtagccttggtaacaacaataagagggttgagctctttgatatgggtgctggaagtagtgagcctgctgctgaggacaatattcaaatggcatcagccatgacaaatcaacaactcattgatacgggaaggaaccaaatggaccaaacagatcaagctattgaacgttcaaaaatggtcgtagcacaaactgttgagactggagctcaaactgctgcgacattaacacagcaaacagagcaaatgaagagaattggtaatgagctagatactgtccacttctcactgaagaaagctagccaactagtgaaggagattggtcgccaggttgcgactgacaaatgtatcatggcattcctcttcctgatcgttttgggtgtgattgctatcattgttgtcaagatcgtccatccgaataacaaaaacattcgagacattccagggctggccccgcctgctcaaaactatcagattcacaacaggagattgttgtgggcagaagcttccataggcatgtgatggctctgaatgtaggcttcatgtggacgcactgcctgcgaagcagcagctatccatagggcgaaagatacatagtaacaattctttgtgcctgtatatctattttgtcttgttaactccgagccctaggtctgtattcctgcgtctggtgtttgtacaccgctggccgtttggctgtgtatatggtacagagatgagatcttaaaaccaaaccagtaattatgacaaatacttgaaagagctacagtaccgaaatactccagttggtactcgctgcacttcatgggcgaatatataaagggtgccggttgggccgtgtaacacattctgaattccgaagacccatgaaaagaatgtgaacgtttaag

SEQ ID NO: 7735 - DNA, 4514 bp, Zea Mays
cacacgcatagctgtctgcggtcttgagacaaggacaggtgcatgtgggcccgataacttgggaggttctgcgacaaaaagaaaagagatgcaaaatgcttggatgtgtacaaccaagactcagctcagtctggcacaccggactgtccggtggtgcactggacagtgtccggtgcgccaggctgaactctggtgaacaggccactctcgggaaaagccggcgacgtacggctataaattcaccggactgtccggtggtgcaccagactgtccggtggtgcaccggactgtccggtgagccaatggtcggctgggccaacggtcggccgcgcaatccgcgcgtgacgcgtgaccgagccaacggtcagatggaggcaccagactgtctggtgtgcaccggacagtgtccggtgctccaacggctccaggactgcaacggtcgactgctccatttctggaaggaaatcaggcaccggacagtgtccggtggggcaccggactgtccggtgcgccacccgacagaaggcaagatttgccttcctggattgcttccaacggctcctaggccccttgtgcctataaaagggacctctaggcgcctcaatcattagagcaagagcagccaacaagtgtagacatcactcgaatcaattctcactctccctcttgtgtgtatctctcttgtttgtgtagaaggcaaagctataagcctttagtgagtggagaagtgctgctaagagcaagaggagggtcttgagcgtatcgttactctgccagggtgctgtcaaaaagtttgtaagcagccgcggttttgttgtaacccaactcaacatagtgaaaggctctatctgtcatactgacagatctgagcaaacagaggaaggagttgaaacagactccaagcccaggtgtggctaactccaacgaggactaggcaagcatttcaggcttggccgaacctcgggataaatccttgcgtctgtgcgctctgttctgtattgtattctgactctctgtcttactcgcttttatatctgcacttcactgcttacttgtggtactagctttccttgaagtgcaggatattcttaagacaggaacttcaattccactgcaacctactcgaagggttcttcactccactgcgatcctgtcttcgagtagagtaagatttaagttttaaagtgataatttttattcacctattcacccccctctaggcgacatccagatcctgttcccgggccaaagggaactttcaattggtatcagagctaggcctctccagtgtgggcttagccgtccggagatgacgatgtcgtcacaagaggtaactgtagaacttcttttaggcaatggttctaattacaagtcttggtttgtctctatttataatgctttcatgagtgttgatcctgatttgagatatgtctttagtagaagtttttttccctctaatgttagtaaaaatccttctgatgatgaactaagatgtctatctctaaatcaccatgcttgcaacatcttagttgattctctttctagaggtgcctactttgccatcatgagtagtgatagtgacttatttgctaatgctcatgatctatggactaaacttaagttgaaattttttaagtccatatgcactacctctgctccctctattgttggtgatactaacttgtccaagggagaagaacaagaacgatggcaaccaaacaatgaatccacctcatcaacaggtttgtcttccactagtaataaatgttttattgctagcaatgatgatggagacaaaagcaatgatgaggaagaggatgaggagtctacatcatcacaaggtacatttcttgttttgcttccactaatagtaatgacagggaaaatgagaccgacgatgtggaagaagaggagattcgccgtttctacacccatctcaacaaagaagacaaagcgctcttgattaagctattgagaaggaacaaggaacaaggcgaaacgcttctcaagctagaggaaactctcatcaaaacaaacaacagcctggagaagatgaccaaagaacatgaggagctaaggtgctctcatgatgtcttggtccaacggtatgattcaattttaattgagcaaagtagtaatgatgatgctttatcttgtgttgctcaacttagagtgaaaaatgccatgcttgagaggcaagtagatttgctaagtcatgataaactagctctcactgaaaaatatgattcattgtcttattctcatgataatctcttggatagacatatcatgcttaatgttgctcatgaggttataattgcgaacttaaattcatgtgaacctcattctcgcacgtgtgcgcatttgaattgtatatcatcatgtgctaacccctgttgctcaaaggaaagccaatcattgattgagcaacaagttttagggtcacaaaagaaatggtgtgggaacaagaagcaaagacaactaaggagaagacacattgctcaactttctcaagatatccacgggcgcgtggtgaagaagcttgagaaaggaaaaactgcagcaagtgttaagctccataagaaggatgttcctaaagatgaagaaatcaacatgagcttggaaaaaggtaaagatttaattaatcatgttgtttgcactgaccatgtctctatgtcatctaaaagtaacaagataagaggaaaacggagatgcttcaagtgcaaggcattaggccacctcatcacatcttgtccatacaaagacaagcgaagggataaggagatgttttggatgcaacaacaaggaccacatgatcacttcatgtctggtattgatgaaccaagcatgtgcattctccaagatgactctcaccaaggaaaatgacaaacatcaagcgtcatgtcaggttgagcgacgcttctgctacaagtgtggtgagcagagtcatctactcaaggtatgtaataaaggtgaggttcctaagcaagtaaatttgtctcaatcttattcgcttaggagacccaaatcacactcttgtgctagatcaatcatgagatcacctaggactagcacacatgctatttgggtacccaaggcttttttggatgatcaatatggacccatcccgagatgggtaccaaactatgctaactagaccatgcaggtgccttgagatgaactggagaccatgggagagcttaagacggttatctcaaactctatgcttaaactgttaattgttttggtgtttattcattgacccacggttgaattattgtgagacactaatcccatgttcatctcaagtgaaaagttgaacaggtccttaatcattattggtgattcaagcagaggaccttaatgagattctgcaacttgcgctccataggatgaaatggattccaaaagatggataagattaaagattcaaataggcaagctaagcaattggaagatcttactgtgaaaatgaaggagtgcaagcgcttgatcaaagagtttgatcgcattctcaaagatgaggagtcaaataatccacctgagatcaacaagcagctaaatgacagaaaacagttcatgatcaaagagttgaattcctatgtcaccttgaggaaaacataccaaagtagccttggtaacaacaataagagggttgagctctttgatatgggtgctggaagtagtgagcctgctgctgaggacaatattcaaatggcatcagccatgacaaatcaacaactcattgatacgggaaggaaccaaatggaccaaacagatcaagctattgaacgttcaaaaatggtcgtagcacaaactgttgagactggagctcaaactgctgcgacattaacacagcaaacagagcaaatgaagagaattggtaatgagctagatactgtccacttctcactgaagaaagctagccaactagtgaaggagattggtcgccaggttgcgactgacaaatgtatcatggcattcctcttcctgatcgttttgggtgtgattgctatcattgttgtcaagatcgtccatccgaataacaaaaacattcgagacattccagggctggccccgcctgctcaaaactatcagattcacaacaggagattgttgtgggcagaagcttccataggcatgtgatggctctgaatgtaggcttcatgtggacgcactgcctgcgaagcagcagctatccatagggcgaaagatacatagtaacaattctttgtgcctgtatatctattttgtcttgttaactccgagccctaggtctgtattcctgcgtctggtgtttgtacaccgctggccgtttggctgtgtatatggtacagagatgagatcttaaaaccaaaccagtaattatgacaaatacttgaaagagctacagtaccgaaatactccagttggtactcgctgcacttcatgggcgaatatataaagggtgccggttgggccgtgtaacacattctgaattccgaagacccatgaaaagaatgtgaacgtttaag

SEQ ID NO: 7736 - DNA, 1260 bp, Zea Mays
cacgccagccgcattctggttctgtacttctgtactctggttctatacggggtctccttcataccaccccagccttatctcttcaagtggtacgcatctctccctgtcagccttatctctcgcttcctgtccacagcaagccgcgccccagcccgtggccatcggcctcttcttcgccgcatgctctccttgctcgagctcgcccacttcctggtgcatcttcctcctcgcctcccatctcagggccaggctgctcggccacgcccagcagctccttgaacgcgtgcccctccgagcatcttgtccctttgttggttgccatctttcccagctccccagcgcaggtggctggctgtgcgttccccttgccggcgtcctcgttctccctgctcgtcggtccccgggaaaaaaaaacatctccctcacggctgctcccatggctgtctgcagccctagccgagctcgctctccccgcccagcagcaagcagctcctttcccctcgccatgaacgccgtcgatcccctactgcagttcctccacgtggtctggtcgtcgaccgcgcgcgtcacctgctcgtggttatgggaaaccagcgagcctctcctcacggcgtagtttccttgcatcatcgttcagcccgagatttagatgagaagaaagctttagcgaggcgcttgccaagtgcttggtgaatcacctcaaccggatgtggttgtcgatcttgcggagtcgagtcgagtttagtcgtggtacgctagctgattatgcgagctgaaggacatggatcagagcaaaccggtattggtggattaatcttgtggatgcatcaagccagcaccagaatggaagatgctcaccaagtggtcgtcaattaacaacactaacgtagtgtttatcccaggcaagctccggtgcatttgccacctccttgttgttttaaaacttttatcacttatatgctgcattaggtgataggagttgagtgatgaaacaattgatgtattgccattccttggaattcgattactattccttgatagagaactaatgaggcttagccctgcttagaaactaaaagttgtttcttttaaaaagaatgttgtgcaacattggatatgggttttatgaaaaaggaacttgcaataatgaaggcatcactcgcgatgatgaattcattattcgagtattgtacctctgtcaggtacatggtttgggtgttaaataataagatgagaccagacgttgagcaggaaaggtcg

SEQ ID NO: 7737 - DNA, 1675 bp, Zea Mays
gcaacagctcgtggcctgaataaattatcgttacaaataatcacatataacaatcatttgtttggcaacagcccgtggcctgaacaaatactaataacaatgtcgcacaaggtgtaaactgagtacctaataataaaaaggagtactgaaataaaaatacagtggcttacagatgtaagtttatgctctagcggatcatccggtgtgatcgagagttcgtccgtcaatacatgctatgcacaggtcaaggagccacttgtagagctttctagccccccaagttatcccagctgtccaactcacagaagtaatgcaggcaccagaacatgccctcccactcattctctcgctctcaggttctctctctacttcatcactctccctgtatatactctctcgaccaagataagcatggttttgttcttcactgtggttttcaatttgatacaatgagtagatttagtccccgccaaggcattaagggagggttggcaaaagtcttcactgagtatctttgctacagccatctcattcaggagacctctgcatggcgttgctcaaacttctccccacaatggaaatagagattgttggccttaaaatactctctggattgctcgtccctccacaagttaccatacagttttttttatcatgtctgaattgtggcggttcttgtgtggcaggatttctgtgttatttgagtttgcttctgtctaagaccctttgttggattttagcaacgacaaatgctctgtccactgtacaaggcacttcaggttcggctgttgccctgatttcatctttgaggccactgacatacttcgaagcaaataagaggtcgttatagtggcaagctggcagctgtgcatggtaaaatcatattgcaaggactggagttgagatatgtattcttccactgtccctatttttcttctcctgatctccgagattcctctcgattctacatggctttgtgctttgagggacgggaaggtagaggctaatcctcaaatttgaggaaaattgagaaggatcgctgagtatgttaaagcttcggagtaacaggcatgccacgagtattaaatgtgatcagctcttgaactttacatgacttgtatttttatcacatgctagcattcacataatgcgggcaaggagtaacaggcatgccacgagtactccttttctgaggagtacttaggtttaggaccacttagtctcctcagaaattcatcactatataaagagctatgtttgtaatcctatgtgacttatccgctaatttatgtgatatgcaaagtaggcacaaagatcacgacaacattttgcagtaagctttttaacaggtatgagtaccaataaagtagtcaagtgatcagaagctgacacttatcttaaacatcatcagaatccagaaaggggcaataatgcatagacttcaacctcttagttcttaaagatagcacagtgggacaggtagcattttttgtttgtgtgaaaaaaactttcaacatattccatattgttagaaacagtgcatctgcacaagtgtccttgcagtctaatgtgctagaagtagtacatacgaacaggtagtattttaatttatgagaaagctgaacttgctaggacaataaatccttttgcacaccatctacaaaattacaggaag

SEQ ID NO: 7738 - DNA, 1708 bp, Zea Mays
atagtatagaagcatagatttgtgaactttgagattatctattggatttggtttttcttttttgataaactgaaataaactgcgcttggaactcagcgtaaaacggggaaggacggacgggcccacatgactgttactgtaacttaatccggttcatggtctgtggtttgtccaacaaagcctgggcctggccgcctggacctgaaaaagtcgttcgggattcaaacccttcgatcccaaatctgccctgcacgcctcgccgccggccacacccccggcggtcgtcgccctacccgcccttctccttacctctaaccccgccggagcccaacacctccccaccatgccgcgaaacttccgcaagcggggcatcgagcaggacactgacgaccgctccgacgacgaggacactcgccgcatcgccctcgaggagatcaagtacatgcagaagctccgggagaggaagctgggtatccccgccgacctcgccgccgcatccactaacgggtcctccgcccgtggtctattgggcaccggggcagcggtcgccggtgaggccgagaaggaggacctcgtcctccaggacaccttcgctcaggagaccgccgtcactatcgaggaccccaacatgttgaggtacgtggagaccgagctggcgaagaagaggggtaagatggttgatgtgggacacaaggaagagatggaccatgtggacgagctctataccgtgccagaccacctcaaggtaaagaagaagaactcagaggagagctcgacacaatggacaactggcattgctgaagttcagctgcctattgagtacaaattaagaaacatcgaagaaaccgaggcggctaaaaagttgctgcaagagaaaaggcttgcaagaaaaccaaaaccagatgcaaacattccatcaagttatagtgctgattatttccaccgtggcaaagaatatgatgaaaaactgcgaagagagaatcctgggttgtacaaagataatgattctcggccaagtggaaatccaggaggcaaagcaacagatactaaaaatccagatggtgttggtgcaggacggagagaagctgcgagtgatgaactcatgcttcagcgtttccgcaaacgagaaaaattccgcgcccttcgaagataagccagagctgacagctgctaagggcaaggagcagattaaccttattacagaggcgatttggggcaatatatttgagctgagggatatctgaattttgtgtcagctctgaggctcatatattaagaggggccgcagtggttcaggacataggagctcataactttccagatgctcagatcgtgccatgttcatctgcaatggaagaaaggaaggtgtgttctccgtacaaatataaatgaactgcttcgacatcttgagcaaactccaaggggtagtgcgaatgtctgatctcattttctttggagtgaatggcaaagcctgcaaattcatctttctagtctagaatgtattgtttctctgaattatttgcagtttgctgcagtagcatcagttatctagatttctagggacgagcaatctgtgagttgtttttgttgcactattgctgcttgctttgcctttactagttcaagtatcaattctttataagagttttgagtttcatatcaattttgaggttttggccttttgcacccccgttttttttggtttagc

SEQ ID NO: 7739 - DNA, 1629 bp, Zea Mays
atagtatagaagcatagatttgtgaactttgagattatctattggatttggtttttcttttttgataaactgaaataaactgcgcttggaactcagcgtaaaacggggaaggacggacgggcccacatgactgttactgtaacttaatccggttcatggtctgtggtttgtccaacaaagcctgggcctggccgcctggacctgaaaaagtcgttcgggattcaaacccttcgatcccaaatctgccctgcacgcctcgccgccggccacacccccggcggtcgtcgccctacccgcccttctccttacctctaaccccgccggagcccaacacctccccaccatgccgcgaaacttccgcaagcggggcatcgagcaggacactgacgaccgctccgacgacgaggacactcgccggttgaggtacgtggagaccgagctggcgaagaagaggggtaagatggttgatgtgggacacaaggaagagatggaccatgtggacgagctctataccgtgccagaccacctcaaggtaaagaagaagaactcagaggagagctcgacacaatggacaactggcattgctgaagttcagctgcctattgagtacaaattaagaaacatcgaagaaaccgaggcggctaaaaagttgctgcaagagaaaaggcttgcaagaaaaccaaaaccagatgcaaacattccatcaagttatagtgctgattatttccaccgtggcaaagaatatgatgaaaaactgcgaagagagaatcctgggttgtacaaagataatgattctcggccaagtggaaatccaggaggcaaagcaacagatactaaaaatccagatggtgttggtgcaggacggagagaagctgcgagtgatgaactcatgcttcagcgtttccgcaaacgagaaaaattccgcgcccttcgaagataagccagagctgacaggttgctagattgtgccagttgcctttgaagctcaaaaatatagttgtggctgcataaagtcccaacatatcatgtccttttagtgagaaacttactgtaaaatgcatccttggttattgagtctgcttctgcagctgctaagggcaaggagcagattaaccttattacagaggcgatttggggcaatatatttgagctgagggatatctgaattttgtgtcagctctgaggctcatatattaagaggggccgcagtggttcaggacataggagctcataactttccagatgctcagatcgtgccatgttcatctgcaatggaagaaaggaaggtgtgttctccgtacaaatataaatgaactgcttcgacatcttgagcaaactccaaggggtagtgcgaatgtctgatctcattttctttggagtgaatggcaaagcctgcaaattcatctttctagtctagaatgtattgtttctctgaattatttgcagtttgctgcagtagcatcagttatctagatttctagggacgagcaatctgtgagttgtttttgttgcactattgctgcttgctttgcctttactagttcaagtatcaattctttataagagttttgagtttcatatcaattttgaggttttggccttttgcacccccgttttttttggtttagc

SEQ ID NO: 7740 - DNA, 1361 bp, Zea Mays
gcaagacttagatcgacgactcgttcacaggcacaggacactacaggcaggtgaacatggttcttggtaatcttgttcgtctgcactggcctggtcttgtgactttgcctactggcgagtctgtccccgccaccacttgggagcattatcgctatggtgtctgtagaacgtttggcaacacacaggcactagtttgggatgcattctggtgatgatcgaccgatgccaaatacaaaggccgagtggtcatcaatttacttgacggaggagcaatacctagaggtgtcggtgccgtggatggccacccgatcagacggttatcgggcattgtgcagatggtggggttcccctgagtttcgtgccatttccgaaaggaataggggaaaccgtggaactgagtcgttccacaactacggcggtgatggtcatgtgcgcttggctaagcgaatggaagtcaaatccggccgtacgcccacggatgtggaggtgtatatgcaaggccataggggttctgatcctcagaatcctgatgtgttatgcactcagacggccaccgaccgtctagattcgtatgggcaggagatggttcaacgccatggggaggagtacgattggaggagccagccaatcgaccctcaggcagcatatgctagtgcaggaggacaagcccatggacggttgggtatttttgattctacgattgattccagagagctgagacgccgtggacgacaatccacatcgtcgtcttcacagtcgtctcgttcacgatcagcagcccatgagatagagcttgcggtgttgcgtcaacaggcagagtaccatcaataagtcttgagggatcaattggagtaccagaggcaacaatctgaataccagagacaacaagccgagtaccagaagaagagagacgagtattatgcaagcctccaggcccaaaatcaagctcttctctcgcaactagcccaacaagcgggcgtcccgatgccgacatatgggatgccgcctccggactttgcactgccaatgccaatgttggcgcctccaccaccgcctccgcctccgtcacaattccctatgacaccccccgcttcagttgccgcacctggagatgggtctggtcaggacgacacaacacattcgtgggtgaacaatcttttcagcacgcatagtccagccggaggaggtggcgatggatatgagtgatactgatgtaaaacacttgttgaaacctttcatgtgaaagcctacccgtcgaataatgttcattttggagtttggacaactatgtttatgtaaacacttattgcaaccatttggaactatgttgttatgttaaattttgtgaatgtgaatgctta

SEQ ID NO: 7741 - DNA, 1228 bp, Zea Mays
cttttgtagtagctgttgctaatacaatgactgtcattaggcctgctgacatggatgctctccaaaatgcgttggacaacaataatgtatctcttttcttcacggagactcctacaaatccatttctcagatgcattgatattgaacatgtatcaaatatgtgccatagcaagggagcgttgctttgtattgacagtactttcgcgtcacctatcaatcagaaggcattaactttaggtgctgacctagttattcattctgcaacgaagtacattgctggacacaatgatgttattggaggatgcgtcagtggcagagatgagttagtttccaaagttcgtatttaccaccatgtagttggtggtgttctaaacccgaatgctgcgtaccttatccttcgaggtatgaagacactgcatctccgtgtgcaatgtcagaacgacactgctcttcggatggcccagtttttagaggagcatccaaagattgctcgtgtctactatcctggcttgccaagtcaccctgaacatcacattgccaagagtcaaatgactggctttggcggtgttgttagttttgaggttgctggagactttgatgctacgaggaaattcattgattctgttaaaataccctatcatgcgccttcttttggaggctgtgagagcataattgatcagcctgccatcatgtcctactgggattcaaaggagcagcgggacatctacgggatcaaggacaacctgatcaggttcagcattggtgtggaggatttcgaggatcttaagaacgatctcgtgcaggccctcgagaagatctaagcactctaatcagtttgtattgacaaaatcatgaggtgatggctgtcttggatcttgtcaagatctgtgacaatgatatgagctgatgactgcgaataagttctcttttgcttattttatccgtcaaattcaataagctgtgattgctgcatgatctagtgttgggcttagttacacttgtcaagttaaattggtctggaaccatgtatacttgtagttttgctttagagtggtgacctggctatgtgggatgaggtcacgcttcccttcaattactgtgagattcacacatttaataatcttgataataaaaatgaaaatcctcacaaggaattaacataatatgtcgaagtgaaaatattttttctttaattgaagttaaatggttagtgaggataacatttaac

SEQ ID NO: 7742 - DNA, 1215 bp, Zea Mays
cccacccggtgtcccttgctccctcttctgtccagtcctctgtcctcaccttatccccaaaaccctatcagcccaaaaccgaacccacacctctgcggctctgcccttcccatggcggccacgctattctccacctccctcttgccccagttcctctccctctccgctaagcccgccgccgccgccccgtccgccgccgccttcccatcggggctgccgcagctccacgcgctgtccgccgcggcggtgggctttaggccgctcgagcccgtgcgagcggccgcgaccgcggccgtgacggaggagctcgaggcggaggggcgttcgggcggggacgagttttcagatgatctcagggtcttcgtcggtaaccttccgttcagcgtcgacagcgcccagctcgcgggacttttcgagcaggccggctccgtcgagatggtcgaggttatctatgacaaattgacgggaagaagccgtggattcgggtttgtgaccatgtcttcggtcgaagaggttgaggtgcttgatggaagaagtttgagggtgaactctgggccgccaccacccagagatcggtcatcaccgtcaccgcaaagacccaggggtgatgccaacagggtctacgtgggtaacctttcctggggagttgacaattcagctctcgcaaacctgttcagtgagcaaggtgaggtactggaagcaaggatcatctatgacagggagagtggaaggtcaagggggtttggttttgtcacgtacggttccgccgaagaggttgagaatgcaatatctaatctcgatggcgctgacttggacggcagacagatccgtgttacggtagcagagtcgaagccacctaggcagcaatactgaaattcctcttgagatttttgtaggtgtaccggtagcccaaactctggattatagtgacgccagtcctggatttggtctcgagattcattgaagttaaaaagccctcatgtatatggctcactatttatatacatgtaatattggattcccgtgttcagtgtccttttgtatcaatttggctgcatagtgtcttgtggcacttcaaaggacatagattgttgacgggcaaccaaacctcaagaaagtatcttgtattgtttcttgtctcgtgtggtttgttcactatatttacttttgcaattacatttatctacttgtatgatatttctgtattgtaattag

SEQ ID NO: 7743 - DNA, 1553 bp, Zea Mays
cccacccggtgtcccttgctccctcttctgtccagtcctctgtcctcaccttatccccaaaaccctatcagcccaaaaccgaacccacacctctgcggctctgcccttcccatggcggccacgctattctccacctccctcttgccccagttcctctccctctccgctaagcccgccgccgccgccccgtccgccgccgccttcccatcggggctgccgcagctccacgcgctgtccgccgcggcggtgggctttaggccgctcgagcccgtgcgagcggccgcgaccgcggccgtgacggaggagctcgaggcggaggggcgttcgggcggggacgagttttcagatgatctcagggtcttcgtcggtaaccttccgttcagcgtcgacagcgcccagctcgcgggacttttcgagcaggccggctccgtcgagatggtcgaggttatctatgacaaattgacgggaagaagccgtggattcgggtttgtgaccatgtcttcggtcgaagaggttgaggtggctgttgaccaatttaatggctatgtgagttcactccggttcttccagagctatgcaccttcttttgctgtcacaatggatcattctcctaatgtgcgacattgtttatttacctggaattgtgacctttgcaatactctaggaattccgtgatgttcattcatgtctccgcaccagatcctgcattgcataaatcaagttctaagttaatggttactcttaaggattcagatagagcatttgtattctgtttccttgattgagtatattctgttacagaatgtctagaagttgttcattttcttatgtatcggacatgatctctcgaaatataggtgcttgatggaagaagtttgagggtgaactctgggccgccaccacccagagatcggtcatcaccgtcaccgcaaagacccaggggtgatgccaacagggtctacgtgggtaacctttcctggggagttgacaattcagctctcgcaaacctgttcagtgagcaaggtgaggtactggaagcaaggatcatctatgacagggagagtggaaggtcaagggggtttggttttgtcacgtacggttccgccgaagaggttgagaatgcaatatctaatctcgatggcgctgacttggacggcagacagatccgtgttacggtagcagagtcgaagccacctaggcagcaatactgaaattcctcttgagatttttgtaggtgtaccggtagcccaaactctggattatagtgacgccagtcctggatttggtctcgagattcattgaagttaaaaagccctcatgtatatggctcactatttatatacatgtaatattggattcccgtgttcagtgtccttttgtatcaatttggctgcatagtgtcttgtggcacttcaaaggacatagattgttgacgggcaaccaaacctcaagaaagtatcttgtattgtttcttgtctcgtgtggtttgttcactatatttacttttgcaattacatttatctacttgtatgatatttctgtattgtaattag

SEQ ID NO: 7744 - DNA, 375 bp, Zea Mays
atgcagctcataaataggggaaggagatcagcactagccttggacttgagatcgtctatgctctcgcactgctcctcgaccagcttgccgagcgacgccgccttctgctccagccggacgacctcgacgatgttcctcgaggagaggcaggcctgggtacacgctctgggtggaggaatggatggccgtgccaaagcggtgctggatctaccacctcgcctcgctgccgccgttcctgctcgtctttgcgggccacatctgggtggtggaccactggtggaactagcacgagctcggcggcgacaacgtcgagggccgctgtcggggtctccatcagggccatatcaacctccttcactggagcggcaagggtaa

SEQ ID NO: 7745 - DNA, 3820 bp, Zea Mays
gaaaaaaacacgagctcgtgaatcgtggcgacaaaaggttgccaccctccgtggctggctaaccctcttcgtcgatcggtgtccctagcctccccctgcccggctgtcctcctcgatttcgcaagctcctggttacggcggcatctatcgttccgccgcaagggccgcatcgtctctctcgcgacgctgccccagaccgccgagataatggctggccaccgaaacagtcatggaaagcgccagtctgattttactgaaaatggaggcagtaagagaagaaatcctggcgatgatacatatgcacctggtcctgatgacactgtgtatcgctacctctgtgcctctagaaaaattgggagtatcattggcaggggtggagaaattgcaaagcagttgaggactgagacccaagctaagatcaggattggcgagagtgtccctggatgtgatgagcgagttgttaccatatttagcacaagcaggaaaactaataccatcgatggtgctgaagatgaggtttgccctgctcaggatgccctctttagagttcatgagaggcttgccagtgatgagggtcttgggaacgaagacagcgaagaaatttcacctcaagttactgttcgcttgcttgtgccatcagaccagattggatgcattattggaaaaggtgggcagatcatccaaggaatccgcagtgagactggtgcacaaatacgtgtccttagtaatgatcatatccccgcatgtgccattagtggagacgaacttctccagatatctggggacacggtagttgtcagaaaggctcttcatcaagtgtcatctcgcctccataacaacccatccaagtcacagcatcttcttgcatccagcttgacccaaccttatccagggagcacccaccttggtggttcctctactgcacctgttgtagggatcactccagtaattcctccttatggtggctacaaaggtgatgtagcaggagattggccctctttataccaaccacgaagggatgagagctctgcaaaggagtttagcttgcgtttactttgtgctgctgcaaatgtggggggtgtaattgggaagggtggtggaattatcaaacagattaggcaggagtctggggctttaatcaaagtggctagctccaattcagaccctgatgatgactgcataattacagtttctgcgaaagagttctttgaagatcctgtatctccaacaattgatgctgcagttcgtttgcagcctagatgcagcgagaaaagtgatttagaatcagctgagcagtcatacacaacacgcttgctggtgtcaacatcacgtattgggtgcctaattggcaaaggtggttcaatcattactgagatacggagaacatccagagcaaatgtacgtattctttcaaaagaaaatgttccaaaggtagcagcagaagatgatgagatggttcagatcactggaggccttgatgttgcaagaaatgctcttgtgcaaatagctacaaggctgaaagccaatttctttgaaagagagggctctttatctgcatttccacctgttatcccttaccatcctttgcctgctggtgtttcggatgaaccaaaatatctaggcagagacaccaagcctgttgggcactatctatattcaagtggttttcgtacatcggatgacacgattccttctgacagctatgcaagttatggcggctcccaggcacctggaagaggatatggggcttacagcgggtacagtgctcgctcctctaatagtgggttatctggtcatagttctcttcactatggaaagcgtcatggttattaggatttagattgcttgataaagcagctcagctatctgatggacctgttattttcacctttgccacccctgctcccctcacgtactataaaaacagccaagacattgaagtttggagcctgcttattggagtcccttcccaaaccagatgaccaagagagcccaacctggaagctttgcttaagaggacccgtgtggatgccatagaccaccttatattcctcactacattactttgtcttcctgtgggcctatgtttttagccctgccgcaaatgttctgaacctatgtattgaaaggtcgcatttgagactgcatgtatttgcttgtttgaaacctgattcagtttagtgattttgttgaaacacttgtttcctatatgccacccaaaaagccaggaatatgttactaaaaaaccctagggagctgttacttgcctttccatggaagatgtgggttactttcttctcagtgatgtgtgactgacatcctaaattaaagtaacaccagaaatggcctttttgcatccgacactagatataccaaacttcgctcctccctgccaacatttcactgaattgcacattttgctttattcatctacccctgccatcgaacacactcagtttcacctgcctgcctcaatcttcagggcctgtttggttttagttcagacagctttgcatggctctccttgcaatccaaggctttagattttctgttcctggggtggcaggctttgaaccaaacaggccccaagagcattgttgaactgacgttagctagctgaacacacatctgtacttgttcgattgcaatgctgttgcaacttgctacacatgggcaagtttatgtttaaacattgaagtcatttttttgaacgagaacattaagccaatttgaagtacgttggtgttttaagtataagctttctaacttaatcggttataaatatatactttggtgtgagtagctaatatccgaaactttgggtagctggaactttttttagtcgtattgatttatcacaatgacccaaaaaatgggttagtcatgatcttactgaactctttaacctgatgcatatgttataatgctttattgactaaatgagtattggtgattgaagtcccgataacgtacttgccaacatgctatgatggggaaactatatgccaacggttgaaccatgtgcatgaggctgcagtacgcaaagttttttttgcaggttcactgttcatttcatgtagatttagcaggttgtaagttccactgggcttgattcaagattgattcttcttcatgcccgtgagtcttgttaactaggaatgtgcaggaacatgcaaagggtaaaccatatgcagtgcctggaacgattgtggttttggcatagtaagtttcataagatttgattctgagatgtcctgaacactattctattgcagtgcctggaacagtgctctctctttctgacctaggacaggattcttttggatcagtttcaagattgtgtctatccttgccatgtggttttggtgttgccggtgtacggtggcggatggctcacctgtattgaatttgcaggatatgtcttcagagcgtgcgctaagaggaatggtttttaatttattattacccaaacaaaccagtcaagaaaattgttttatttctctagtccagtctatgggtgagaactgttctatccaaacaagtccaagcaaacaagaagttgaatttgaacacgtgaggatgggaatcatccaaaaaaagaagggatcgaggtcttggtcagggtttcggggttaggataggagtttaggagagactgctggcctagcggtagtgatgggtcgtgggacacaactacacaagtgtcttacctttagttgttgtgtggagactgacccaatagagcgaatatgaagacattcgctgcagtatgtattagggttttggtctttatatctttagcagtttacctatcatatct

SEQ ID NO: 7746 - DNA, 3627 bp, Zea Mays
cccgtcgaatcccgcgacggcgggccttagttcggcgtctgcaccccgtagatccgggcggtagagcccttgtttcgtgccaatccgtcttcttggtggttcgatctcttcggtgggcgcgtagacgtgataatggctggccaccgaaacagtcatggaaagcgccagtctgattttactgaaaatggaggcagtaagagaagaaatcctggcgatgatacatatgcacctggtcctgatgacactgtgtatcgctacctctgtgcctctagaaaaattgggagtatcattggcaggggtggagaaattgcaaagcagttgaggactgagacccaagctaagatcaggattggcgagagtgtccctggatgtgatgagcgagttgttaccatatttagcacaagcaggaaaactaataccatcgatggtgctgaagatgaggtttgccctgctcaggatgccctctttagagttcatgagaggcttgccagtgatgagggtcttgggaacgaagacagcgaagaaatttcacctcaagttactgttcgcttgcttgtgccatcagaccagattggatgcattattggaaaaggtgggcagatcatccaaggaatccgcagtgagactggtgcacaaatacgtgtccttagtaatgatcatatccccgcatgtgccattagtggagacgaacttctccagatatctggggacacggtagttgtcagaaaggctcttcatcaagtgtcatctcgcctccataacaacccatccaagtcacagcatcttcttgcatccagcttgacccaaccttatccagggagcacccaccttggtggttcctctactgcacctgttgtagggatcactccagtaattcctccttatggtggctacaaaggtgatgtagcaggagattggccctctttataccaaccacgaagggatgagagctctgcaaaggagtttagcttgcgtttactttgtgctgctgcaaatgtggggggtgtaattgggaagggtggtggaattatcaaacagattaggcaggagtctggggctttaatcaaagtggctagctccaattcagaccctgatgatgactgcataattacagtttctgcgaaagagttctttgaagatcctgtatctccaacaattgatgctgcagttcgtttgcagcctagatgcagcgagaaaagtgatttagaatcagctgagcagtcatacacaacacgcttgctggtgtcaacatcacgtattgggtgcctaattggcaaaggtggttcaatcattactgagatacggagaacatccagagcaaatatcactggaggccttgatgttgcaagaaatgctcttgtgcaaatagctacaaggctgaaagccaatttctttgaaagagagggctctttatctgcatttccacctgttatcccttaccatcctttgcctgctggtgtttcggatgaaccaaaatatctaggcagagacaccaagcctgttgggcactatctatattcaagtggttttcgtacatcggatgacacgattccttctgacagctatgcaagttatggcggctcccaggcacctggaagaggatatggggcttacagcgggtacagtgctcgctcctctaatagtgggttatctggtcatagttctcttcactatggaaagcgtcatggttattaggatttagattgcttgataaagcaggtattgttcttcaaccttttcttgatatgttagaatgattatgtgattgtgcatttgcctaccttaatgttcttttttttgccttttgaacacattgaacccagctcagctatctgatggacctgttattttcacctttgccacccctgctcccctcacgtactataaaaacagccaagacattgaagtttggagcctgcttattggagtcccttcccaaaccagatgaccaagagagcccaacctggaagctttgcttaagaggacccgtgtggatgccatagaccaccttatattcctcactacattactttgtcttcctgtgggcctatgtttttagccctgccgcaaatgttctgaacctatgtattgaaaggtcgcatttgagactgcatgtatttgcttgtttgaaacctgattcagtttagtgattttgttgaaacacttgtttcctatatgccacccaaaaagccaggaatatgttactaaaaaaccctagggagctgttacttgcctttccatggaagatgtgggttactttcttctcagtgatgtgtgactgacatcctaaattaaagtaacaccagaaatggcctttttgcatccgacactagatataccaaacttcgctcctccctgccaacatttcactgaattgcacattttgctttattcatctacccctgccatcgaacacactcagtttcacctgcctgcctcaatcttcagggcctgtttggttttagttcagacagctttgcatggctctccttgcaatccaaggctttagattttctgttcctggggtggcaggctttgaaccaaacaggccccaagagcattgttgaactgacgttagctagctgaacacacatctgtacttgttcgattgcaatgctgttgcaacttgctacacatgggcaagtttatgtttaaacattgaagtcatttttttgaacgagaacattaagccaatttgaagtacgttggtgttttaagtataagctttctaacttaatcggttataaatatatactttggtgtgagtagctaatatccgaaactttgggtagctggaactttttttagtcgtattgatttatcacaatgacccaaaaaatgggttagtcatgatcttactgaactctttaacctgatgcatatgttataatgctttattgactaaatgagtattggtgattgaagtcccgataacgtacttgccaacatgctatgatggggaaactatatgccaacggttgaaccatgtgcatgaggctgcagtacgcaaagttttttttgcaggttcactgttcatttcatgtagatttagcaggttgtaagttccactgggcttgattcaagattgattcttcttcatgcccgtgagtcttgttaactaggaatgtgcaggaacatgcaaagggtaaaccatatgcaggtattgtttatggatgagaatggattagcctacggagttgcacaacattgttaaccttcgaaatgttgttagcggaatggttactattcgttcattgaatcttctgccaatctgttttatgtaaatgctgtatcggattttgatgagcaaattctattgcagtgcctggaacgattgtggttttggcatagtaagtttcataagatttgattctgagatgtcctgaacactattctattgcagtgcctggaacagtgctctctctttctgacctaggacaggtagtgttgctgatccgggtagtgtaccgtagcactgcactgtccgtcatccatctatctatcgagtcaaactgcagctgaacctgacctgaacttgtgcagggttcagggtgctccgatgaaagtatcctgaatctttacaggtttcagggcgctctgatgaaaaatatatgcattatcattaac

SEQ ID NO: 7747 - DNA, 3642 bp, Zea Mays
aaccctcttcgtcgatcggtgtccctagcctccccctgcccggctgtcctcctcgatttcgcaagctcctggttacggcggcatctatcgttccgccgcaagggccgcatcgtctctctcgcgacgctgccccagaccgccgagataatggctggccaccgaaacagtcatggaaagcgccagtctgattttactgaaaatggaggcagtaagagaagaaatcctggcgatgatacatatgcacctggtcctgatgacactgtgtatcgctacctctgtgcctctagaaaaattgggagtatcattggcaggggtggagaaattgcaaagcagttgaggactgagacccaagctaagatcaggattggcgagagtgtccctggatgtgatgagcgagttgttaccatatttagcacaagcaggaaaactaataccatcgatggtgctgaagatgaggtttgccctgctcaggatgccctctttagagttcatgagaggcttgccagtgatgagggtcttgggaacgaagacagcgaagaaatttcacctcaagttactgttcgcttgcttgtgccatcagaccagattggatgcattattggaaaaggtgggcagatcatccaaggaatccgcagtgagactggtgcacaaatacgtgtccttagtaatgatcatatccccgcatgtgccattagtggagacgaacttctccagatatctggggacacggtagttgtcagaaaggctcttcatcaagtgtcatctcgcctccataacaacccatccaagtcacagcatcttcttgcatccagcttgacccaaccttatccagggagcacccaccttggtggttcctctactgcacctgttgtagggatcactccagtaattcctccttatggtggctacaaaggtgatgtagcaggagattggccctctttataccaaccacgaagggatgagagctctgcaaaggagtttagcttgcgtttactttgtgctgctgcaaatgtggggggtgtaattgggaagggtggtggaattatcaaacagattaggcaggagtctggggctttaatcaaagtggctagctccaattcagaccctgatgatgactgcataattacagtttctgcgaaagagttctttgaagatcctgtatctccaacaattgatgctgcagttcgtttgcagcctagatgcagcgagaaaagtgatttagaatcagctgagcagtcatacacaacacgcttgctggtgtcaacatcacgtattgggtgcctaattggcaaaggtggttcaatcattactgagatacggagaacatccagagcaaatatcactggaggccttgatgttgcaagaaatgctcttgtgcaaatagctacaaggctgaaagccaatttctttgaaagagagggctctttatctgcatttccacctgttatcccttaccatcctttgcctgctggtgtttcggatgaaccaaaatatctaggcagagacaccaagcctgttgggcactatctatattcaagtggttttcgtacatcggatgacacgattccttctgacagctatgcaagttatggcggctcccaggcacctggaagaggatatggggcttacagcgggtacagtgctcgctcctctaatagtgggttatctggtcatagttctcttcactatggaaagcgtcatggttattaggatttagattgcttgataaagcaggtattgttcttcaaccttttcttgatatgttagaatgattatgtgattgtgcatttgcctaccttaatgttcttttttttgccttttgaacacattgaacccagctcagctatctgatggacctgttattttcacctttgccacccctgctcccctcacgtactataaaaacagccaagacattgaagtttggagcctgcttattggagtcccttcccaaaccagatgaccaagagagcccaacctggaagctttgcttaagaggacccgtgtggatgccatagaccaccttatattcctcactacattactttgtcttcctgtgggcctatgtttttagccctgccgcaaatgttctgaacctatgtattgaaaggtcgcatttgagactgcatgtatttgcttgtttgaaacctgattcagtttagtgattttgttgaaacacttgtttcctatatgccacccaaaaagccaggaatatgttactaaaaaaccctagggagctgttacttgcctttccatggaagatgtgggttactttcttctcagtgatgtgtgactgacatcctaaattaaagtaacaccagaaatggcctttttgcatccgacactagatataccaaacttcgctcctccctgccaacatttcactgaattgcacattttgctttattcatctacccctgccatcgaacacactcagtttcacctgcctgcctcaatcttcagggcctgtttggttttagttcagacagctttgcatggctctccttgcaatccaaggctttagattttctgttcctggggtggcaggctttgaaccaaacaggccccaagagcattgttgaactgacgttagctagctgaacacacatctgtacttgttcgattgcaatgctgttgcaacttgctacacatgggcaagtttatgtttaaacattgaagtcatttttttgaacgagaacattaagccaatttgaagtacgttggtgttttaagtataagctttctaacttaatcggttataaatatatactttggtgtgagtagctaatatccgaaactttgggtagctggaactttttttagtcgtattgatttatcacaatgacccaaaaaatgggttagtcatgatcttactgaactctttaacctgatgcatatgttataatgctttattgactaaatgagtattggtgattgaagtcccgataacgtacttgccaacatgctatgatggggaaactatatgccaacggttgaaccatgtgcatgaggctgcagtacgcaaagttttttttgcaggttcactgttcatttcatgtagatttagcaggttgtaagttccactgggcttgattcaagattgattcttcttcatgcccgtgagtcttgttaactaggaatgtgcaggaacatgcaaagggtaaaccatatgcaggtattgtttatggatgagaatggattagcctacggagttgcacaacattgttaaccttcgaaatgttgttagcggaatggttactattcgttcattgaatcttctgccaatctgttttatgtaaatgctgtatcggattttgatgagcaaattctattgcagtgcctggaacgattgtggttttggcatagtaagtttcataagatttgattctgagatgtcctgaacactattctattgcagtgcctggaacagtgctctctctttctgacctaggacaggtagtgttgctgatccgggtagtgtaccgtagcactgcactgtccgtcatccatctatctatcgagtcaaactgcagctgaacctgacctgaacttgtgcagggttcagggtgctccgatgaaagtatcctgaatctttacaggtttcagggcgctctgatgaaaaatatatgcattatcattaac

SEQ ID NO: 7748 - DNA, 783 bp, Zea Mays
gcgactgagagcagtaggcaagagttgccctgcttaatccttcattaatgataatagtctgtacatataggcaatttctaacttatttgattgcctcttcaactaatctccatctatctaggtggatctccacattattctccaactaaccctatcttatctagacgactgctaattctcatcttatctatccggctgttaacaaaccagcaataaactggccaataaactagctagctgctatggcgcttatggcgtctgacatattggatgccggtcataacatggaggtattggggcgctaggggtccaatcttcattgcatgtgggtcgcccgaaagaacaccggccttctgacatttgagaagtcattgcatccggacacttctataatgtcttctagtgctaagccctcccttggtcggggccagaggaggtccctacgactaggggccccaggagtagtggatttcaaagtcagtttcccgagtcgagatctctaaatgtgtcttggcggcaaccatgggtatggccttccccgggcgcttacacatacataaataaggtaaaaggaatagaaaaaagattagtaagatgcatgtgcaagaccagcatttatgcctacatggctgcatcttcatgctaagattaaatggttctatgtttctcagcatttcagaaaataaatgacaaactgcattgagctgcatttttaccaaggatgctataaatgccctccttattctggctgattatatcagcacttcttttatcagaaatgag

SEQ ID NO: 7749 - DNA, 2621 bp, Zea Mays
tactgacagaatcatgaaggcggtgagggaagaagcagagagcgtgttaactgagagattaaccagaccagtaaggatatttgcctgaaagaagaagacacttaagtttcagttcgattgacctgaaggaatgaaccgagcatattttgattgaatgcatcttcaagaaccaagttctttttatatgagacgaacccagctaatgtgaggatacataaaacctaaattggataatcaatcagcataaagccatgaacagtgaagctaatgtgaagcataaacaaaaatactagaccaaacaactaaagaaaaaacagacaaacccactgttcgtaaactctcaggaaagtgtgatcatttaattggctaagtagttaacttcgtggctttgcaaacccccgtgctactactcacgggtctaatgattgatcgaataagtcttgtgcctaccttagatttcagcttctagtcaagtagtagttggtgcatatgtccacagcttatcatctaccttatctagcctaacgctttggctttctttggccacattatgggttaatttgtcggcattatcagataaagtgcatattgttaaagaaaagtccagtatttgtctattgcttaacaaatacgaacactaccaagatgttaaagaaaagaccaacctggtgtgctaattaatgtattctactcctttcgtcccaaataaaaatacgttttacctttttattggattcacacaataattaatgtatgtgttctatatatgtatctagattcatcttcatccatatgaacagtcataaaaatatagagctaaaacgactactattttgggacggagagagtataattaaacaaaagaacatagaaaagcacattacctgaaaattctggccaaaaacaagcataacataagcaaagttgcactgcaaaatgaatgctttgatcacgttttgagctatatgtattaacatccaattcaatctaaagactgatgagaaaaaaggttaagcattaaggtttatttactgcaaattggaatgctataactccttttacactgtattcagcctattcataagcattaaagtttcctgactaaaaaattgcttaagcctaaataattgtcattccatgttacgaccacaatattctgctccacgaaccataaaattgcaatagcaacttttaaaaacattctccaagatggcttctgataggattgcggatcctaccggggatgtggcgaagggaatagcgatgaggtgctggagcccgacagcgatcacggcgctggagcgccatggctcggtgtggccggcagaaagcgagagaacaggggcgctacaatactcatgctacagcacccgcgctacagtaccggcgagtactgttcacggttagggctgcaagcgaggggaggaagaagggggtggcggctgcgttgtcgccggcagtgtgcacgacggagggcaccgtggctaatcgagagagagagagagagagagagagagctggtggctagggttcgccctgctccctgagggaagcgggcaatagtaattgcttctgcttatcctacaatcaagggtcttacagattatttatagtctcatctggacaactctcatctagataactctcatctaaactaactctcatctggatagctcttttggatatctatccttatctaatgacttggatatctatccttatccagtaactaatcttatctaaggatacttgggccttaagcctgatgaccgcaccacattggcacccagccataacagcttcgccttcactattctgtcagttgggctttcctgatggaagtgctgcatcatttggggtttggacagatttggtgcaatctggtttttaatcttctcatatcttcttctacccaaattttggtgaatggaaaacccggtcagtctatcaggcacaggagagggttaaggcagggtgaccccttgattacaatcaattgctaatcaggctcatggtatcagctctctagatcctgcgcccatctccctgctgtgcgcagcgccaactcctccctgttgcgccgcacctcctcccccctggtcaccatgaccgacgccaccactcctgctcccgctgtgattgtcgccccctatgcgacgatcaatgtcaagaaccacatcccggtgactcttgaactggcaaaacccaacttcaaccagtgggaaccattcttcacctctctctgtggaaaattcgctctcctctcgcatatcgacggactgcaggaagcccgtcccacagatccttcttggggcatcgccgatgcctacgtccgcagctagcttctcggctcggctgggcccgacgtcatcggcctcgccgcggctccaaaccagactgtgcgcgagctctgggtcgccatcaagcgcctcttcgaggccaacaaggttccacgcgccatcttcctaagccacgagtttcactcgatgactcaggcgactcctccatcaatgactatgcccagcgtatgaaggccaccgccgacgcgctccgtgatgtcggccgcaccatcaccgacgcggagctcgtcctcaacctcctccgcggcctcaacccacgtt

SEQ ID NO: 7750 - DNA, 3445 bp, Zea Mays
ctttctccttaatcaaacgggtcacttagaccccacaaggaccaccacacaattggtgtctcttgctttgattacaagtgcttgaagaacaagaatgagaagaagaaagtgatccaagaacaagagctcaaataacacgagcaaaactctctctctctagtcactaggtgtttggagtgtgtttgggacttggagaggctttgattcttttgaattgtgtcttgtattgattgcactagctcttgtattgaatgagatgtctgaaaaacttggatgcttggagtggtggtggttggggggtatttatagccccaaccaccaaaccaaccattggggaggctgtccgttagggttctgacggtttcgaccgttggagctctgacatcttgggggcaccggacagtccggttccgcaccggacaggcactgttcactgtccggtgtgccttctggcgctgctctgactctgcgcgaactatccacgcattgttcacgtttgcaggcgaccattggagttgaccgttgcacttgatagtcattgctccgctggcacaccggacagtccgataaattatagcggagcggctttccaaaaacccgaaggtggcaagtttgaactgtacgacccctggtgcaccagacactatccggtggtgcaccggacactgtccagtggcacaccggactgtccggtgcgccagaccagggttctcttcggtttcttttgctcctttctttttgaaccctaacttgatctttttattggtttatgttgaacctttagcacctgtagaatatataatctagagcaaactagttagtccaattatttgtgttggcatttcaaccaccaaaatcatttaggaaaaggtttgaccctatttccctttcagtctctgtcctgttactccggactatccgcggtcaaggtcctaacagtctgtggcatgatactcagtttccattttttgtccattttatgaatccaaaattcaaatggggttctttgcttaaatatggatattttgattgttacaagggttagcatgtatgcataaacacataatgtactagaataaatagcattttcacatagaacccacttagatcatgtaagaataaaaaattcaagaaaaatagtcaataaatgacttagagagatgcactagggctcaaatggatgtctatacatgtgccctcgacttcaagccacgtttaagaagtcaattacattcatttcgtttttcaacttgcaaaaccttgattcatccaaagattttgtaaatatatccactaattgatcattcgtgctaataaaacatattgagatatcccctttgacaccatgatccctcaaaaaataatgttttatatcaatatgcttcgttcttgagtgttgaaccgaatttgtacccaatttcactgcactctcattatcacacatgaaagacacattttttgaaaaagatctcataatccaatagagtttgcttcatccacaatacttgagcacaacaattacagactgatatgtattccacctcggcggtagatacatcgaccaaattttacttcttagaagaccatgagactagagatcttccaagaaattgacaacaaccagaagtgttcattctatcaactttgtgtcccgcataatcggaatccgaatatccaattaattcaaattgagcacctttatgatacaataagccaacattgggagtatgcttcaaataccttagaatcctctttgcgactttcaaataaacttctctaggtgaagcttgaaaccgagcacacatgcaaacactaaacattacatcaggcctagatgcagtaatgtaaagtaaactatcaataatagaacgaaaacacttttaatcaacaattgcacatccctcatctaagtctagatgaccatttgtagccatgtgagtctcgattggatttgcatcttctagcccaaatttctttagcatgtcctttaaatacttagattggctcacaaaaatcccatatttccattgtttgttttgaaggccacaaaagaaattcaattcccatatcattgacatttcaaactcttttgacatcattttccaaattcctcgtaaaacaactcattagtaaatccaaaaatgatatcatcaacgtagatttgacaaacaaataaatctttaccaattcttttagtgaacatatagtgccaaccttcccaattttaaactatttggaaaacaagaattctctaagcctttcataccaagtgcatggagcttgcttaagcccatagaaagctttagaaagcttgtacatgtggctatgcttcttggggtcctcaaaaccgagaggttgctccacatacactagttcactaatcttagcatttagaaaaaacgtcatttacatccatttggtagagtttaatgttgtaagcacaagcataagcaagaagaacccatattgcctctaatcttgcaacatgaaaattatctcaccaaaatacaatccttctatttaaatataatcttgtgccactaatcgtgtcgtgttcctcactaccaatctatcttcattatgcttgttgtgaaatacccatttagtaccagtaacattgtgattcttgggtctttcaacaagctctcaaacttcattacggatgtagttatttaattcctcatgcattgcattcacccaatcaacatcaagtagtgcttcatctatacggttatgtttaatacaagatacaaaagagaaatattcataaaataaagcaatgcgggagcgagtttaaacacccttacttatgtcacccataatttgatcgaccatgttatcttttgcaatataatgatggatccttgatacaatatgagaatcacttgatgaagcttgaggaaccgaatgacttgttaccattatcatgagcattctcaacttcattattttgttaactttgatgaatttcctcatttagagttgaagatgatggaatgacaaccatgcatcatcgtcatcttcttttggctgaatttcaccaatggtcaatcttaatggcattcctcaagtgaactccacttacatcattaagattttgattttcatcttaaaacctatttgtttcatcaaactcaacatcaaatgattcctcaataatgccacgagttttgtttaaaaccctacaagccttgctatttgaagaatacccgagtagaaaaccgcatcacatttcttcttaaatttagagagtcgactacctttcctcaagatatagcatttgcaaccaaatattataaaacatgaaatattataaatctagttgaacttatgaaaatttgaccgattagaataacctagcaacatcaatttcagaaacgagagtaccgaaaacaagttaaaggaagtagtactatgggccacacaaggtcggtgcaatacaaat

SEQ ID NO: 7751 - DNA, 1880 bp, Zea Mays
aaaaaacgcgtctgctctgcagctgggcctccagtccggcctctgcatttccgaattcccacgcaaattcctcggcgcaggaatctacatcgacgatatccatcgctccgatcccagttccatttgctgcgattgttctcagccaccgcagcctcgccgatgcaaattgccgatcctacattgtgcgcctctgttcatataggagcgccgcccatctgctcgatggaatgcctagccgagtagccatggcttttagggaagttcagtgcagatgctccaggacaaaccactgttccgcttcaccatccccgagggttcttcgctgcttccatttctcaaacgccaagaaggaatgctttgctctgacgaacttccactgagaccgatcaagagtcaatgaagtttgcttgctctctttttcaaggtgtggacaagccaaggccgaacagaccgctcgcttttcacagaagcaaggctttggcgctggtaaaatgccatccttggaccatgaccaggaaaccacccccggccgttggattccatccagaaaccctctccaatgcttcaagattcaccctccaccccccttctttgtgttctgcaccaaagctagcgggcaaagcattgggtgttagcatgcatagcatcctacacggagaagcgtgaggaaaggaagctattgaaactcggtgcagatccttttcgtttgaacgggcctagctttggcggccttggtggaagattcaaagcgaaaagggtgcttcttgcaaggaggggcaagcacaagaaaaatggaaagcatacgaaagcgcaagagggccttgcgttgtgctcctgtctgctgctggttacccatttaccatcctgtccatggacggtaggtagcttcggatctggttttactgaactgaaagcaagggcttggttcttgctgttgctcttgtgcactacgtggcctggccgcttgctttaggtgttgtttgtctgtgtagaggatggaagacgatgggggggggggggggggggggtgagggaggcactccaatgacttttgcaaaatctaactgtcagggcctcaggaccttctacgggcagccttagacagacgtgtgctttgggacccggcgtggccaccgtaccttggggtggggggctatatctactgcagacaggacagtgctgtgattggtaattgtactgcatcaaccaaactactactactaccaccagtctactggagccaaagaacagcaggcagcacaagttgcatgtctccagctgagcagcagcgacatggcgagtgcaagaagctggtcgaggctgttcgccgtctcggccttcctttgcctcctggcggtgcaccctgctgccacggtgaggagggaggacatggtcctcggccgtgaccgggcgccggtgccagcggaggcgcccgccacgggcgccgtcggcagcggcaactcgtggacagcgaagccgttcgcgacggccaaggccgtcggcgcggcgcagatgagcaagtggagggtccggcggggctcggaccccatacacaacaggagctgacgtgacgcccttcttcgcttagttgtagcctgtaggaggaggaggataacaggcagaggcaggtggatcaatgtaatgcaatgtactaggagggagattcagttgcactgtgatataggagtaatttctcgtcagacgttatcctgtctctctttggttgcattgcatccgtcactcagatgtgcgtgcatcaggatccggcaaagagctgtttgcgggctggaaggaacgcgaacgtttttatggctttgattgatggattgcagtctgcagagtgcgatttgcacagtacagtacagcgatggcactcatcc

SEQ ID NO: 7752 - DNA, 1772 bp, Zea Mays
ggcttcttccgcacaaaaaacgcgtctgctctgcagctgggcctccagtccggcctctgcatttccgaattcccacgcaaattcctcggcgcaggaatctacatcgacgatatccatcgctccgatcccagttccatttgctgcgattgttctcagccaccgcagcctcgccgatgcaaattgccgatcctacattgtgcgcctctgttcatataggagcgccgcccatctgctcgatggaatgcctagccgagtagccatggcttttagggaaggtgggaagcgtggtctggcttcttcagccatcgctacttagctggcaccaatgaaacaagcgactaacatcgcacgggggcgtccagttcagtgcagatgctccaggacaaaccactgttccgcttcaccatccccgagggttcttcgctgcttccatttctcaaacgccaagaaggagaacttccactgagaccgatcaagagtcaatgaagtttgcttgctctctttttcaaggtgtggacaagccaaggccgaacagaccgctcgcttttcacagaagcaaggctttggcgctggtaaaatgccatccttggaccatgaccaggaaaccacccccggccgttggattccatccagaaaccctctccaatgcttcaagattcaccctccaccccccttctttgtgttctgcaccaaagctagcgggcaaagcattgggtgttagcatgcatagcatcctacacggagaagcgtgaggaaaggaagctattgaaactcggtgcagatccttttcgtttgaacgggcctagctttggcggccttggtggaagattcaaagcgaaaagggtgcttcttgcaaggaggggcaagcacaagaaaaatggaaagcatacgaaagcgcaagagggccttgcgttgtgctcctgtctgctgctggttacccatttaccatcctgtccatggacgggcctcaggaccttctacgggcagccttagacagacgtgtgctttgggacccggcgtggccaccgtaccttggggtggggggctatatctactgcagacaggacagtgctgtgattggtaattgtactgcatcaaccaaactactactactaccaccagtctactggagccaaagaacagcaggcagcacaagttgcatgtctccagctgagcagcagcgacatggcgagtgcaagaagctggtcgaggctgttcgccgtctcggccttcctttgcctcctggcggtgcaccctgctgccacggtgaggagggaggacatggtcctcggccgtgaccgggcgccggtgccagcggaggcgcccgccacgggcgccgtcggcagcggcaactcgtggacagcgaagccgttcgcgacggccaaggccgtcggcgcggcgcagatgagcaagtggagggtccggcggggctcggaccccatacacaacaggagctgacgtgacgcccttcttcgcttagttgtagcctgtaggaggaggaggataacaggcagaggcaggtggatcaatgtaatgcaatgtactaggagggagattcagttgcactgtgatataggagtaatttctcgtcagacgttatcctgtctctctttggttgcattgcatccgtcactcagatgtgcgtgcatcaggatccggcaaagagctgtttgcgggctggaaggaacgcgaacgtttttatggctttgattgatggattgcagtctgcagagtgcgatttgcacagtacagtacagcgatggcactcatcc

SEQ ID NO: 7753 - DNA, 1989 bp, Zea Mays
ggcttcttccgcacaaaaaacgcgtctgctctgcagctgggcctccagtccggcctctgcatttccgaattcccacgcaaattcctcggcgcaggaatctacatcgacgatatccatcgctccgatcccagttccatttgctgcgattgttctcagccaccgcagcctcgccgatgcaaattgccgatcctacattgtgcgcctctgttcatataggagcgccgcccatctgctcgatggaatgcctagccgagtagccatggcttttagggaaggtgggaagcgtggtctggcttcttcagccatcgctacttagctggcaccaatgaaacaagcgactaacatcgcacgggggcgtccagttcagtgcagatgctccaggacaaaccactgttccgcttcaccatccccgagggttcttcgctgcttccatttctcaaacgccaagaaggaatgctttgctctgacgaacttccactgagaccgatcaagagtcaatgaagtttgcttgctctctttttcaaggtgtggacaagccaaggccgaacagaccgctcgcttttcacagaagcaagggtacggagctttggcgctggtaaaatgccatccttggaccatgaccaggaaaccacccccggccgttggattccatccagaaaccctctccaatgcttcaagattcaccctccaccccccttctttgtgttctgcaccaaagctagcgggcaaagcattgggtgttagcatgcatagcatcctacacggagaagcgtgaggaaaggaagctattgaaactcggtgcagatccttttcgtttgaacgggcctagctttggcggccttggtggaagattcaaagcgaaaagggtgcttcttgcaaggaggggcaagcacaagaaaaatggaaagcatacgaaagcgcaagagggccttgcgttgtgctcctgtctgctgctggttacccatttaccatcctgtccatggacggtaggtagcttcggatctggttttactgaactgaaagcaagggcttggttcttgctgttgctcttgtgcactacgtggcctggccgcttgctttaggtgttgtttgtctgtgtagaggatggaagacgatgggggggggggggggggggggtgagggaggcactccaatgacttttgcaaaatctaactgtcagggcctcaggaccttctacgggcagccttagacagacgtgtgctttgggacccggcgtggccaccgtaccttggggtggggggctatatctactgcagacaggacagtgctgtgattggtaattgtactgcatcaaccaaactactactactaccaccagtctactggagccaaagaacagcaggcagcacaagttgcatgtctccagctgagcagcagcgacatggcgagtgcaagaagctggtcgaggctgttcgccgtctcggccttcctttgcctcctggcggtgcaccctgctgccacggtgaggagggaggacatggtcctcggccgtgaccgggcgccggtgccagcggaggcgcccgccacgggcgccgtcggcagcggcaactcgtggacagcgaagccgttcgcgacggccaaggccgtcggcgcggcgcagatgagcaagtggagggtccggcggggctcggaccccatacacaacaggagctgacgtgacgcccttcttcgcttagttgtagcctgtaggaggaggaggataacaggcagaggcaggtggatcaatgtaatgcaatgtactaggagggagattcagttgcactgtgatataggagtaatttctcgtcagacgttatcctgtctctctttggttgcattgcatccgtcactcagatgtgcgtgcatcaggatccggcaaagagctgtttgcgggctggaaggaacgcgaacgtttttatggctttgattgatggattgcagtctgcagagtgcgatttgcacagtacagtacagcgatggcactcatcc

SEQ ID NO: 7754 - DNA, 2032 bp, Zea Mays
gtcagatcggaatcggacacgtgggcgggtagatggagagggcgtttacatgcggtgcggcttcttccgcacaaaaaacgcgtctgctctgcagctgggcctccagtccggcctctgcatttccgaattcccacgcaaattcctcggcgcaggaatctacatcgacgatatccatcgctccgatcccagttccatttgctgcgattgttctcagccaccgcagcctcgccgatgcaaattgccgatcctacattgtgcgcctctgttcatataggagcgccgcccatctgctcgatggaatgcctagccgagtagccatggcttttagggaaggtgggaagcgtggtctggcttcttcagccatcgctacttagctggcaccaatgaaacaagcgactaacatcgcacgggggcgtccagttcagtgcagatgctccaggacaaaccactgttccgcttcaccatccccgagggttcttcgctgcttccatttctcaaacgccaagaaggagaacttccactgagaccgatcaagagtcaatgaagtttgcttgctctctttttcaaggtgtggacaagccaaggccgaacagaccgctcgcttttcacagaagcaagggtacggagctttggcgctggtaaaatgccatccttggaccatgaccaggaaaccacccccggccgttggattccatccagaaaccctctccaatgcttcaagattcaccctccaccccccttctttgtgttctgcaccaaagctagcgggcaaagcattgggtgttagcatgcatagcatcctacacggagaagcgtgaggaaaggaagctattgaaactcggtgcagatccttttcgtttgaacgggcctagctttggcggccttggtggaagattcaaagcgaaaagggtgcttcttgcaaggaggggcaagcacaagaaaaatggaaagcatacgaaagcgcaagagggccttgcgttgtgctcctgtctgctgctggttacccatttaccatcctgtccatggacggtaggtagcttcggatctggttttactgaactgaaagcaagggcttggttcttgctgttgctcttgtgcactacgtggcctggccgcttgctttaggtgttgtttgtctgtgtagaggatggaagacgatgggggggggggggggggggggtgagggaggcactccaatgacttttgcaaaatctaactgtcagggcctcaggaccttctacgggcagccttagacagacgtgtgctttgggacccggcgtggccaccgtaccttggggtggggggctatatctactgcagacaggacagtgctgtgattggtaattgtactgcatcaaccaaactactactactaccaccagtctactggagccaaagaacagcaggcagcacaagttgcatgtctccagctgagcagcagcgacatggcgagtgcaagaagctggtcgaggctgttcgccgtctcggccttcctttgcctcctggcggtgcaccctgctgccacggtgaggagggaggacatggtcctcggccgtgaccgggcgccggtgccagcggaggcgcccgccacgggcgccgtcggcagcggcaactcgtggacagcgaagccgttcgcgacggccaaggccgtcggcgcggcgcagatgagcaagtggagggtccggcggggctcggaccccatacacaacaggagctgacgtgacgcccttcttcgcttagttgtagcctgtaggaggaggaggataacaggcagaggcaggtggatcaatgtaatgcaatgtactaggagggagattcagttgcactgtgatataggagtaatttctcgtcagacgttatcctgtctctctttggttgcattgcatccgtcactcagatgtgcgtgcatcaggatccggcaaagagctgtttgcgggctggaaggaacgcgaacgtttttatggctttgattgatggattgcagtctgcagagtgcgatttgcacagtacagtacagcgatggcactcatcc

SEQ ID NO: 7755 - DNA, 3137 bp, Zea Mays
gaggcaagacggatcgagactacgacgccgatcctagctagctctcccgtttctgctcgcaagtcacacacagctccggtagatccgcccctcgcctctgggctccaggaagagattagcttcagacggcagggatcgatactagcaagcaagcatggcgcacgacttgtgcgaggacttggagctcgtcgccgacgacggcggcttcgatgactactactgggacgacgacttccatttccacgacgacgacggcttctccgcctcccctacgacccccgccagcgttggtgcgccccgccagcagcagcagcagcagcagatgggtgatatttcagcctcggactacaaagaaggcgaagacatgcaggggataccctgggaaaggctcaactacaccagggaccagtatcgtcggatgaggctcaaagagtacaagagctaccagaacctcacgaggtcgcacagcggcctacaacaacaggtggagaggaaggacacattctacgatttccatctgaacacgagagccgtcaagtcaacgatagtgcatttccaggtcaacaacaagcagtggcaggacgtttgggtgtgcgctatctgcagttagtcttgagtgatactagctgcaatttaatcagatcgatcaggtggatgggcatcctcagcagccgggaggagtgactccagcagggggttggaaagcttgcaatatggtatggcaggacgtttcgagatggacgaatctgttgaaacgggtcaccttgagttcctcattttttttgcaggttcatttgctgcatgttcatttgtggcacgccttttcgtgttaatggaaattgtgctcaaaccaatgctgtccgttgaaagttttttatggggtttatattatcgtccaatgttgtgtcctttgtttgggtgaacattgtgtggctaaaaccgttctggatggcaatgttaacatggaccttcactttggacactgaattgtaaggtgtactagtacatcattggaatgacgacagccaatggcatgggggcagcaggggacaatttcccctgtagctcgagttttaagttgccgaacagatcgcgcgcagagcactgttttattttataatgtagacttgacaacgttattgattttatgaagtggagtttaaaatgaaagataaaaaatgattaagccgctagagatagcctcagtcggccggttgcatcatgacatcctgtacctctgtcagtctgtatcctttgcattctctggagcatgtatttcaagcgcaatcaacaatcgtgaatcgtgtgttccaaattgaaacacctgcagctgaggaacctcctgtggcctacatcgaagcacgacgtgtacctggtgcagagctactccgtgacgcactggtctgccctgctccggagaggaagagaggttctcaacgtggccggccggttggctccgacccagaacgtgaagggggctggaccgttgtcgagggttcagatcagcgccatggctgtgaaggacaacctcatggtggccggtggcttccagggagaactcatatgcaagtacgttgatagacccggggtggcattctgcaccagcctgaccggtggcagcagttccatcacgaacgccgtcgacatccaccaggcacccagcggcgccacgcgagtgatggcggcgaacaacgactgcgtcgtcaggacgttcgacgccgagagatacagccttctcacgcagctcaccttcccgtggtccgtcaacagcacgtcggtgagccccgacggcaagctgctggcggtcctgggcgacagcacggagtgcgtggtcgccgacccgcagtcgggcaaggcggtggcgacgctgcgcgggcacctggactactccttcgcgtcggcgtggcaccccgacggccgcgtcctggcgacggggaaccaggacgcgacgtgccggctgtgggacgcgcgcagcctgtcggagccgttcgccgtgctcggggcccggatcggcgccgtccggggcctccgcttctcccccgacggcaggttcctggccgcggccgaggccgccgacttcgtgcacgtgtacgacgccgcggccgggtacgccggcgccgcgcaggaggtggacgtgttcggggaggtcgccggcgccgcgttcagccccgacggcgaggcgctgttcgtgagcgtcgccgaccgcacctacggcggcctgctcgagttccgacgccggcgggcggaccgctacctcgacgcgtgtttcttctgagggagaggcgcgcgcgcgcgccgtctgttgtgtactgtgcatgtgcctgccggcgggcggcacgtatacatgtggtgtgttgtgtagtgtaaaacgcagagttttggtgcgtatcggacagcgtaccggctggagacaacctggccagggtgctttcaggagctagtatcgctttcttgtttgttttggacttcgggggaaaaacacttcagaatggtgcactcgggttgcctttaggtactacaagcttgctatagagatgctgtgtatcaattcgttaatgtaagaactgtaaaatacttctaatacttcttctgtcctaaattatattttatctctttcctaaattataactaagtataagacataattattatgttatagtatttttatattcgttgttttctataatctacatatctagatgtatagtttagtttagcttatatcgttaagtctagcttatatgtgtagttttgttctttttatttcaatcatattagggtctgtttggttgggcatgtggaaaaagctgttgttgggcctgtggaaaaagctgctgtggactgtgagcggtggaaaaagctgttgtgagctgttaaaaagctaaaaaccgtttgatgtaaactactaaaagccgttaaaagtttttttatatatgttttaaagtttttttatatatgttttcacagttccatctaaaagccgttaaaagcaggttaaggagtgtttataattttatactgcgaaaaagtcagcttttagaaaaagttgatttctagaatcagtcttttggtttggtttttgatttttagggggtaaaagccaaaaccaaaagctaaaccgaacacttgtaaaggac

SEQ ID NO: 7756 - DNA, 4080 bp, Zea Mays
gaggcaagacggatcgagactacgacgccgatcctagctagctctcccgtttctgctcgcaagtcacacacagctccggtagatccgcccctcgcctctgggctccaggaagagattagcttcagacggcagggatcgatactagcaagcaagcatggcgcacgacttgtgcgaggacttggagctcgtcgccgacgacggcggcttcgatgactactactgggacgacgacttccatttccacgacgacgacggcttctccgcctcccctacgacccccgccagcgttggtgcgccccgccagcagcagcagcagcagcagatgggtgatatttcagcctcggactacaaagaaggcgaagacatgcaggggataccctgggaaaggctcaactacaccagggaccagtatcgtcggatgaggctcaaagagtacaagagctaccagaacctcacgaggtcgcacagcggcctacaacaacaggtggagaggaaggacacattctacgatttccatctgaacacgagagccgtcaagtcaacgatagtgcatttccaggtacggtttcaactcggtacttctccatccacacacctgaccaagacgtgtttcgcgcgaggatgtgaagtgccgtttgattagcccactggaatttaccataatcttctgctcatcccatatcgcccaaccaaaaaacacacacacagtcaggatagtagtcattccgttggccataggctgttacacttgcacaatttattctcttaaggctagtttaatttgggaaccttatttttccaatgaaaaaagaactaatttactttggaaaaatgaaaattccttgagaaaaaatgaggttcccaaactaacattaaggaaagagtaggcatgccatcaagatgcatagtggtgcgtgtgactctgggttgcccgcctcacagttcgattgcttcagtttgcatgatagaagcacagtgctcttgttgtccgttctctttaccagaactcagagggcgcgcagggttacaagttggaacgtgtgccacccccctatccgaaaaaaattctttacatacgagatataaagaatttttttacagcctctcacatatatctatatcagttgttggtttatataaatagaagaaaaataaattactaaagggttattttgtaaattttgatatgtgtttgtgaactttcgagtggtggatgtgaggggctttaaaagataacgtttacatcgggtatgtacagaatttttttcgcctcctatacctaagcactccttttttcacaaaatacttaagtctaacctgtcatcatcatcccctaaatctaacttgtgattttttccccgactgctgtgcgagtatatatatatatatatatatatatatgtacgctacgaaccatgaagcatgatgtttcatctgcatcgaatgatgtcgctgttgttctgcttctatcaatgtatatatggacatcacgctggttgcaggtcaacaacaagcagtggcaggacgtttgggtgtgcgctatctgcagttagtcttgagtgatactagctgcaatttaatcagatcgatcaggtggatgggcatcctcagcagccgggaggagtgactccagcagggggttggaaagcttgcaatatggtatggcaggacgtttcgagatggacgaatctgttgaaacgggtcaccttgagttcctcattttttttgcaggttcatttgctgcatgttcatttgtggcacgccttttcgtgttaatggaaattgtgctcaaaccaatgctgtccgttgaaagttttttatggggtttatattatcgtccaatgttgtgtcctttgtttgggtgaacattgtgtggctaaaaccgttctggatggcaatgttaacatggaccttcactttggacactgaattgtaaggtgtactagtacatcattggaatgacgacagccaatggcatgggggcagcaggggacaatttcccctgtagctcgagttttaagttgccgaacagatcgcgcgcagagcactgttttattttataatgtagacttgacaacgttattgattttatgaagtggagtttaaaatgaaagataaaaaatgattaagccgctagagatagcctcagtcggccggttgcatcatgacatcctgtacctctgtcagtctgtatcctttgcattctctggagcatgtatttcaagcgcaatcaacaatcgtgaatcgtgtgttccaaattgaaacacctgcagctgaggaacctcctgtggcctacatcgaagcacgacgtgtacctggtgcagagctactccgtgacgcactggtctgccctgctccggagaggaagagaggttctcaacgtggccggccggttggctccgacccagaacgtgaagggggctggaccgttgtcgagggttcagatcagcgccatggctgtgaaggacaacctcatggtggccggtggcttccagggagaactcatatgcaagtacgttgatagacccggggtggcattctgcaccagcctgaccggtggcagcagttccatcacgaacgccgtcgacatccaccaggcacccagcggcgccacgcgagtgatggcggcgaacaacgactgcgtcgtcaggacgttcgacgccgagagatacagccttctcacgcagctcaccttcccgtggtccgtcaacagcacgtcggtgagccccgacggcaagctgctggcggtcctgggcgacagcacggagtgcgtggtcgccgacccgcagtcgggcaaggcggtggcgacgctgcgcgggcacctggactactccttcgcgtcggcgtggcaccccgacggccgcgtcctggcgacggggaaccaggacgcgacgtgccggctgtgggacgcgcgcagcctgtcggagccgttcgccgtgctcggggcccggatcggcgccgtccggggcctccgcttctcccccgacggcaggttcctggccgcggccgaggccgccgacttcgtgcacgtgtacgacgccgcggccgggtacgccggcgccgcgcaggaggtggacgtgttcggggaggtcgccggcgccgcgttcagccccgacggcgaggcgctgttcgtgagcgtcgccgaccgcacctacggcggcctgctcgagttccgacgccggcgggcggaccgctacctcgacgcgtgtttcttctgagggagaggcgcgcgcgcgcgccgtctgttgtgtactgtgcatgtgcctgccggcgggcggcacgtatacatgtggtgtgttgtgtagtgtaaaacgcagagttttggtgcgtatcggacagcgtaccggctggagacaacctggccagggtgctttcaggagctagtatcgctttcttgtttgttttggacttcgggggaaaaacacttcagaatggtgcactcgggttgcctttaggtactacaagcttgctatagagatgctgtgtatcaattcgttaatgtaagaactgtaaaatacttctaatacttcttctgtcctaaattatattttatctctttcctaaattataactaagtataagacataattattatgttatagtatttttatattcgttgttttctataatctacatatctagatgtatagtttagtttagcttatatcgttaagtctagcttatatgtgtagttttgttctttttatttcaatcatattagggtctgtttggttgggcatgtggaaaaagctgttgttgggcctgtggaaaaagctgctgtggactgtgagcggtggaaaaagctgttgtgagctgttaaaaagctaaaaaccgtttgatgtaaactactaaaagccgttaaaagtttttttatatatgttttaaagtttttttatatatgttttcacagttccatctaaaagccgttaaaagcaggttaaggagtgtttataattttatactgcgaaaaagtcagcttttagaaaaagttgatttctagaatcagtcttttggtttggtttttgatttttagggggtaaaagccaaaaccaaaagctaaaccgaacacttgtaaaggac

SEQ ID NO: 7757 - DNA, 4081 bp, Zea Mays
gaggcaagacggatcgagactacgacgccgatcctagctagctctcccgtttctgctcgcaagtcacacacagctccggtagatccgcccctcgcctctgggctccaggaagagattagcttcagacggcagggatcgatactagcaagcaagcatggcgcacgacttgtgcgaggacttggagctcgtcgccgacgacggcggcttcgatgactactactgggacgacgacttccatttccacgacgacgacggcttctccgcctcccctacgacccccgccagcgttggtgcgccccgccagcagcagcagcagcagcagatgggtgatatttcagcctcggactacaaagaaggcgaagacatgcaggggataccctgggaaaggctcaactacaccagggaccagtatcgtcggatgaggctcaaagagtacaagagctaccagaacctcacgaggtcgcacagcggcctacaacaacaggaacgcaaacaggtggagaggaaggacacattctacgatttccatctgaacacgagagccgtcaagtcaacgatagtgcatttccaggtacggtttcaactcggtacttctccatccacacacctgaccaagacgtgtttcgcgcgaggatgtgaagtgccgtttgattagcccactggaatttaccataatcttctgctcatcccatatcgcccaaccaaaaaacacacacacagtcaggatagtagtcattccgttggccataggctgttacacttgcacaatttattctcttaaggctagtttaatttgggaaccttatttttccaatgaaaaaagaactaatttactttggaaaaatgaaaattccttgagaaaaaatgaggttcccaaactaacattaaggaaagagtaggcatgccatcaagatgcatagtggtgcgtgtgactctgggttgcccgcctcacagttcgattgcttcagtttgcatgatagaagcacagtgctcttgttgtccgttctctttaccagaactcagagggcgcgcagggttacaagttggaacgtgtgccacccccctatccgaaaaaaattctttacatacgagatataaagaatttttttacagcctctcacatatatctatatcagttgttggtttatataaatagaagaaaaataaattactaaagggttattttgtaaattttgatatgtgtttgtgaactttcgagtggtggatgtgaggggctttaaaagataacgtttacatcgggtatgtacagaatttttttcgcctcctatacctaagcactccttttttcacaaaatacttaagtctaacctgtcatcatcatcccctaaatctaacttgtgattttttccccgactgctgtgcgagtatatatatatatatatatatatatatgtacgctacgaaccatgaagcatgatgtttcatctgcatcgaatgatgtcgctgttgttctgcttctatcaatgtatatatggacatcacgctggttgcaggtcaacaacaagcagtggcaggacgtttgggtgtgcgctatctgcagttagtcttgagtgatactagctgcaatttaatcagatcgatcaggtggatgggcatcctcagcagccgggaggagtgactccagcagggggttggaaagcttgcaatatggtatggcaggacgtttcgagatggacgaatctgttgaaacgggtcaccttgagttcctcattttttttgcaggttcatttgctgcatgttcatttgtggcacgccttttcgtgttaatggaaattgtgctcaaaccaatgctgtccgttgaaagttttttatggggtttatattatcgtccaatgttgtgtcctttgtttgggtgaacattgtgtggctaaaaccgttctggatggcaatgttaacatggaccttcactttggacactgaattgtaaggtgtactagtacatcattggaatgacgacagccaatggcatgggggcagcaggggacaatttcccctgtagctcgagttttaagttgccgaacagatcgcgcgcagagcactgttttattttataatgtagacttgacaacgttattgattttatgaagtggagtttaaaatgaaagataaaaaatgattaagccgctagagatagcctcagtcggccggttgcatcatgacatcctgtacctctgtcagtctgtatcctttgcattctctggagcatgtatttcaagcgcaatcaacaatcgtgaatcgtgtgttccaaattgaaacacctgcagctgaggaacctcctgtggcctacatcgaagcacgacgtgtacctggtgcagagctactccgtgacgcactggtctgccctgctccggagaggaagagaggttctcaacgtggccggccggttggctccgacccagaacgtgaagggggctggaccgttgtcgagggttcagatcagcgccatggctgtgaaggacaacctcatggtggccggtggcttccagggagaactcatatgcaagacccggggtggcattctgcaccagcctgaccggtggcagcagttccatcacgaacgccgtcgacatccaccaggcacccagcggcgccacgcgagtgatggcggcgaacaacgactgcgtcgtcaggacgttcgacgccgagagatacagccttctcacgcagctcaccttcccgtggtccgtcaacagcacgtcggtgagccccgacggcaagctgctggcggtcctgggcgacagcacggagtgcgtggtcgccgacccgcagtcgggcaaggcggtggcgacgctgcgcgggcacctggactactccttcgcgtcggcgtggcaccccgacggccgcgtcctggcgacggggaaccaggacgcgacgtgccggctgtgggacgcgcgcagcctgtcggagccgttcgccgtgctcggggcccggatcggcgccgtccggggcctccgcttctcccccgacggcaggttcctggccgcggccgaggccgccgacttcgtgcacgtgtacgacgccgcggccgggtacgccggcgccgcgcaggaggtggacgtgttcggggaggtcgccggcgccgcgttcagccccgacggcgaggcgctgttcgtgagcgtcgccgaccgcacctacggcggcctgctcgagttccgacgccggcgggcggaccgctacctcgacgcgtgtttcttctgagggagaggcgcgcgcgcgcgccgtctgttgtgtactgtgcatgtgcctgccggcgggcggcacgtatacatgtggtgtgttgtgtagtgtaaaacgcagagttttggtgcgtatcggacagcgtaccggctggagacaacctggccagggtgctttcaggagctagtatcgctttcttgtttgttttggacttcgggggaaaaacacttcagaatggtgcactcgggttgcctttaggtactacaagcttgctatagagatgctgtgtatcaattcgttaatgtaagaactgtaaaatacttctaatacttcttctgtcctaaattatattttatctctttcctaaattataactaagtataagacataattattatgttatagtatttttatattcgttgttttctataatctacatatctagatgtatagtttagtttagcttatatcgttaagtctagcttatatgtgtagttttgttctttttatttcaatcatattagggtctgtttggttgggcatgtggaaaaagctgttgttgggcctgtggaaaaagctgctgtggactgtgagcggtggaaaaagctgttgtgagctgttaaaaagctaaaaaccgtttgatgtaaactactaaaagccgttaaaagtttttttatatatgttttaaagtttttttatatatgttttcacagttccatctaaaagccgttaaaagcaggttaaggagtgtttataattttatactgcgaaaaagtcagcttttagaaaaagttgatttctagaatcagtcttttggtttggtttttgatttttagggggtaaaagccaaaaccaaaagctaaaccgaacacttgtaaaggac

SEQ ID NO: 7758 - DNA, 3149 bp, Zea Mays
gaggcaagacggatcgagactacgacgccgatcctagctagctctcccgtttctgctcgcaagtcacacacagctccggtagatccgcccctcgcctctgggctccaggaagagattagcttcagacggcagggatcgatactagcaagcaagcatggcgcacgacttgtgcgaggacttggagctcgtcgccgacgacggcggcttcgatgactactactgggacgacgacttccatttccacgacgacgacggcttctccgcctcccctacgacccccgccagcgttggtgcgccccgccagcagcagcagcagcagcagatgggtgatatttcagcctcggactacaaagaaggcgaagacatgcaggggataccctgggaaaggctcaactacaccagggaccagtatcgtcggatgaggctcaaagagtacaagagctaccagaacctcacgaggtcgcacagcggcctacaacaacaggaacgcaaacaggtggagaggaaggacacattctacgatttccatctgaacacgagagccgtcaagtcaacgatagtgcatttccaggtcaacaacaagcagtggcaggacgtttgggtgtgcgctatctgcagttagtcttgagtgatactagctgcaatttaatcagatcgatcaggtggatgggcatcctcagcagccgggaggagtgactccagcagggggttggaaagcttgcaatatggtatggcaggacgtttcgagatggacgaatctgttgaaacgggtcaccttgagttcctcattttttttgcaggttcatttgctgcatgttcatttgtggcacgccttttcgtgttaatggaaattgtgctcaaaccaatgctgtccgttgaaagttttttatggggtttatattatcgtccaatgttgtgtcctttgtttgggtgaacattgtgtggctaaaaccgttctggatggcaatgttaacatggaccttcactttggacactgaattgtaaggtgtactagtacatcattggaatgacgacagccaatggcatgggggcagcaggggacaatttcccctgtagctcgagttttaagttgccgaacagatcgcgcgcagagcactgttttattttataatgtagacttgacaacgttattgattttatgaagtggagtttaaaatgaaagataaaaaatgattaagccgctagagatagcctcagtcggccggttgcatcatgacatcctgtacctctgtcagtctgtatcctttgcattctctggagcatgtatttcaagcgcaatcaacaatcgtgaatcgtgtgttccaaattgaaacacctgcagctgaggaacctcctgtggcctacatcgaagcacgacgtgtacctggtgcagagctactccgtgacgcactggtctgccctgctccggagaggaagagaggttctcaacgtggccggccggttggctccgacccagaacgtgaagggggctggaccgttgtcgagggttcagatcagcgccatggctgtgaaggacaacctcatggtggccggtggcttccagggagaactcatatgcaagtacgttgatagacccggggtggcattctgcaccagcctgaccggtggcagcagttccatcacgaacgccgtcgacatccaccaggcacccagcggcgccacgcgagtgatggcggcgaacaacgactgcgtcgtcaggacgttcgacgccgagagatacagccttctcacgcagctcaccttcccgtggtccgtcaacagcacgtcggtgagccccgacggcaagctgctggcggtcctgggcgacagcacggagtgcgtggtcgccgacccgcagtcgggcaaggcggtggcgacgctgcgcgggcacctggactactccttcgcgtcggcgtggcaccccgacggccgcgtcctggcgacggggaaccaggacgcgacgtgccggctgtgggacgcgcgcagcctgtcggagccgttcgccgtgctcggggcccggatcggcgccgtccggggcctccgcttctcccccgacggcaggttcctggccgcggccgaggccgccgacttcgtgcacgtgtacgacgccgcggccgggtacgccggcgccgcgcaggaggtggacgtgttcggggaggtcgccggcgccgcgttcagccccgacggcgaggcgctgttcgtgagcgtcgccgaccgcacctacggcggcctgctcgagttccgacgccggcgggcggaccgctacctcgacgcgtgtttcttctgagggagaggcgcgcgcgcgcgccgtctgttgtgtactgtgcatgtgcctgccggcgggcggcacgtatacatgtggtgtgttgtgtagtgtaaaacgcagagttttggtgcgtatcggacagcgtaccggctggagacaacctggccagggtgctttcaggagctagtatcgctttcttgtttgttttggacttcgggggaaaaacacttcagaatggtgcactcgggttgcctttaggtactacaagcttgctatagagatgctgtgtatcaattcgttaatgtaagaactgtaaaatacttctaatacttcttctgtcctaaattatattttatctctttcctaaattataactaagtataagacataattattatgttatagtatttttatattcgttgttttctataatctacatatctagatgtatagtttagtttagcttatatcgttaagtctagcttatatgtgtagttttgttctttttatttcaatcatattagggtctgtttggttgggcatgtggaaaaagctgttgttgggcctgtggaaaaagctgctgtggactgtgagcggtggaaaaagctgttgtgagctgttaaaaagctaaaaaccgtttgatgtaaactactaaaagccgttaaaagtttttttatatatgttttaaagtttttttatatatgttttcacagttccatctaaaagccgttaaaagcaggttaaggagtgtttataattttatactgcgaaaaagtcagcttttagaaaaagttgatttctagaatcagtcttttggtttggtttttgatttttagggggtaaaagccaaaaccaaaagctaaaccgaacacttgtaaaggac

SEQ ID NO: 7759 - DNA, 4020 bp, Zea Mays
gaggcaagacggatcgagactacgacgccgatcctagctagctctcccgtttctgctcgcaagtcacacacagctccggtagatccgcccctcgcctctgggctccaggaagagattagcttcagacggcagggatcgatactagcaagcaagcatggcgcacgacttgtgcgaggacttggagctcgtcgccgacgacggcggcttcgatgactactactgggacgacgacttccatttccacgacgacgacggcttctccgcctcccctacgacccccgccagcgttggtgcgccccgccagcagcagcagcagcagcagatgggtgatatttcagcctcggactacaaagaaggcgaagacatgcaggggataccctgggaaaggctcaactacaccagggaccagtatcgtcggatgaggctcaaagagtacaagagctaccagaacctcacgaggtcgcacagcggcctacaacaacaggaacgcaaacaggtggagaggaaggacacattctacgatttccatctgaacacgagagccgtcaagtcaacgatagtgcatttccaggtacggtttcaactcggtacttctccatccacacacctgaccaagacgtgtttcgcgcgaggatgtgaagtgccgtttgattagcccactggaatttaccataatcttctgctcatcccatatcgcccaaccaaaaaacacacacacagtcaggatagtagtcattccgttggccataggctgttacacttgcacaatttattctcttaaggctagtttaatttgggaaccttatttttccaatgaaaaaagaactaatttactttggaaaaatgaaaattccttgagaaaaaatgaggttcccaaactaacattaaggaaagagtaggcatgccatcaagatgcatagtggtgcgtgtgactctgggttgcccgcctcacagttcgattgcttcagtttgcatgatagaagcacagtgctcttgttgtccgttctctttaccagaactcagagggcgcgcagggttacaagttggaacgtgtgccacccccctatccgaaaaaaattctttacatacgagatataaagaatttttttacagcctctcacatatatctatatcagttgttggtttatataaatagaagaaaaataaattactaaagggttattttgtaaattttgatatgtgtttgtgaactttcgagtggtggatgtgaggggctttaaaagataacgtttacatcgggtatgtacagaatttttttcgcctcctatacctaagcactccttttttcacaaaatacttaagtctaacctgtcatcatcatcccctaaatctaacttgtgattttttccccgactgctgtgcgagtatatatatatatatatatatatatatgtacgctacgaaccatgaagcatgatgtttcatctgcatcgaatgatgtcgctgttgttctgcttctatcaatgtatatatggacatcacgctggttgcaggtcaacaacaagcagtggcaggacgtttgggtgtgcgctatctgcagttagtcttgagtgatactagctgcaatttaatcagatcgatcaggtggatgggcatcctcagcagccgggaggagtgactccagcagggggttggaaagcttgcaatatggttcatttgctgcatgttcatttgtggcacgccttttcgtgttaatggaaattgtgctcaaaccaatgctgtccgttgaaagttttttatggggtttatattatcgtccaatgttgtgtcctttgtttgggtgaacattgtgtggctaaaaccgttctggatggcaatgttaacatggaccttcactttggacactgaattgtaaggtgtactagtacatcattggaatgacgacagccaatggcatgggggcagcaggggacaatttcccctgtagctcgagttttaagttgccgaacagatcgcgcgcagagcactgttttattttataatgtagacttgacaacgttattgattttatgaagtggagtttaaaatgaaagataaaaaatgattaagccgctagagatagcctcagtcggccggttgcatcatgacatcctgtacctctgtcagtctgtatcctttgcattctctggagcatgtatttcaagcgcaatcaacaatcgtgaatcgtgtgttccaaattgaaacacctgcagctgaggaacctcctgtggcctacatcgaagcacgacgtgtacctggtgcagagctactccgtgacgcactggtctgccctgctccggagaggaagagaggttctcaacgtggccggccggttggctccgacccagaacgtgaagggggctggaccgttgtcgagggttcagatcagcgccatggctgtgaaggacaacctcatggtggccggtggcttccagggagaactcatatgcaagtacgttgatagacccggggtggcattctgcaccagcctgaccggtggcagcagttccatcacgaacgccgtcgacatccaccaggcacccagcggcgccacgcgagtgatggcggcgaacaacgactgcgtcgtcaggacgttcgacgccgagagatacagccttctcacgcagctcaccttcccgtggtccgtcaacagcacgtcggtgagccccgacggcaagctgctggcggtcctgggcgacagcacggagtgcgtggtcgccgacccgcagtcgggcaaggcggtggcgacgctgcgcgggcacctggactactccttcgcgtcggcgtggcaccccgacggccgcgtcctggcgacggggaaccaggacgcgacgtgccggctgtgggacgcgcgcagcctgtcggagccgttcgccgtgctcggggcccggatcggcgccgtccggggcctccgcttctcccccgacggcaggttcctggccgcggccgaggccgccgacttcgtgcacgtgtacgacgccgcggccgggtacgccggcgccgcgcaggaggtggacgtgttcggggaggtcgccggcgccgcgttcagccccgacggcgaggcgctgttcgtgagcgtcgccgaccgcacctacggcggcctgctcgagttccgacgccggcgggcggaccgctacctcgacgcgtgtttcttctgagggagaggcgcgcgcgcgcgccgtctgttgtgtactgtgcatgtgcctgccggcgggcggcacgtatacatgtggtgtgttgtgtagtgtaaaacgcagagttttggtgcgtatcggacagcgtaccggctggagacaacctggccagggtgctttcaggagctagtatcgctttcttgtttgttttggacttcgggggaaaaacacttcagaatggtgcactcgggttgcctttaggtactacaagcttgctatagagatgctgtgtatcaattcgttaatgtaagaactgtaaaatacttctaatacttcttctgtcctaaattatattttatctctttcctaaattataactaagtataagacataattattatgttatagtatttttatattcgttgttttctataatctacatatctagatgtatagtttagtttagcttatatcgttaagtctagcttatatgtgtagttttgttctttttatttcaatcatattagggtctgtttggttgggcatgtggaaaaagctgttgttgggcctgtggaaaaagctgctgtggactgtgagcggtggaaaaagctgttgtgagctgttaaaaagctaaaaaccgtttgatgtaaactactaaaagccgttaaaagtttttttatatatgttttaaagtttttttatatatgttttcacagttccatctaaaagccgttaaaagcaggttaaggagtgtttataattttatactgcgaaaaagtcagcttttagaaaaagttgatttctagaatcagtcttttggtttggtttttgatttttagggggtaaaagccaaaaccaaaagctaaaccgaacacttgtaaaggac

SEQ ID NO: 7760 - DNA, 3550 bp, Zea Mays
gaggcaagacggatcgagactacgacgccgatcctagctagctctcccgtttctgctcgcaagtcacacacagctccggtagatccgcccctcgcctctgggctccaggaagagattagcttcagacggcagggatcgatactagcaagcaagcatggcgcacgacttgtgcgaggacttggagctcgtcgccgacgacggcggcttcgatgactactactgggacgacgacttccatttccacgacgacgacggcttctccgcctcccctacgacccccgccagcgttggtgcgccccgccagcagcagcagcagcagcagatgggtgatatttcagcctcggactacaaagaaggcgaagacatgcaggggataccctgggaaaggctcaactacaccagggaccagtatcgtcggatgaggctcaaagagtacaagagctaccagaacctcacgaggtcgcacagcggcctacaacaacaggaacgcaaacaggtggagaggaaggacacattctacgatttccatctgaacacgagagccgtcaagtcaacgatagtgcatttccaggtacggtttcaactcggtacttctccatccacacacctgaccaagacgtgtttcgcgcgaggatgtgaagtgccgtttgattagcccactggaatttaccataatcttctgctcatcccatatcgcccaaccaaaaaacacacacacagtcaggatagtagtcattccgttggccataggctgttacacttgcacaatttattctcttaaggctagtttaatttgggaaccttatttttccaatgaaaaaagaactaatttactttggaaaaatgaaaattccttgagaaaaaatgaggttcccaaactaacattaaggaaagagtaggcatgccatcaagatgcatagtggtgcgtgtgactctgggttgcccgcctcacagttcgattgcttcagtttgcatgatagaagcacagtgctcttgttgtccgttctctttaccagaactcagagggcgcgcagggttacaagttggaacgtgtgccacccccctatccgaaaaaaattctttacatacgagatataaagaatttttttacagcctctcacatatatctatatcagttgttggtttatataaatagaagaaaaataaattactaaagggttattttgtaaattttgatatgtgtttgtgaactttcgagtggtggatgtgaggggctttaaaagataacgtttacatcgggtatgtacagaatttttttcgcctcctatacctaagcactccttttttcacaaaatacttaagtctaacctgtcatcatcatcccctaaatctaacttgtgattttttccccgactgctgtgcgagtatatatatatatatatatatatatatgtacgctacgaaccatgaagcatgatgtttcatctgcatcgaatgatgtcgctgttgttctgcttctatcaatgtatatatggacatcacgctggttgcaggtcaacaacaagcagtggcaggacgtttgggtgtgcgctatctgcagttagtcttgagtgatactagctgcaatttaatcagatcgatcaggtggatgggcatcctcagcagccgggaggagtgactccagcagggggttggaaagcttgcaatatggtatggcaggacgtttcgagatggacgaatctgttgaaacgggtcaccttgagttcctcattttttttgcagctgaggaacctcctgtggcctacatcgaagcacgacgtgtacctggtgcagagctactccgtgacgcactggtctgccctgctccggagaggaagagaggttctcaacgtggccggccggttggctccgacccagaacgtgaagggggctggaccgttgtcgagggttcagatcagcgccatggctgtgaaggacaacctcatggtggccggtggcttccagggagaactcatatgcaagtacgttgatagacccggggtggcattctgcaccagcctgaccggtggcagcagttccatcacgaacgccgtcgacatccaccaggcacccagcggcgccacgcgagtgatggcggcgaacaacgactgcgtcgtcaggacgttcgacgccgagagatacagccttctcacgcagctcaccttcccgtggtccgtcaacagcacgtcggtgagccccgacggcaagctgctggcggtcctgggcgacagcacggagtgcgtggtcgccgacccgcagtcgggcaaggcggtggcgacgctgcgcgggcacctggactactccttcgcgtcggcgtggcaccccgacggccgcgtcctggcgacggggaaccaggacgcgacgtgccggctgtgggacgcgcgcagcctgtcggagccgttcgccgtgctcggggcccggatcggcgccgtccggggcctccgcttctcccccgacggcaggttcctggccgcggccgaggccgccgacttcgtgcacgtgtacgacgccgcggccgggtacgccggcgccgcgcaggaggtggacgtgttcggggaggtcgccggcgccgcgttcagccccgacggcgaggcgctgttcgtgagcgtcgccgaccgcacctacggcggcctgctcgagttccgacgccggcgggcggaccgctacctcgacgcgtgtttcttctgagggagaggcgcgcgcgcgcgccgtctgttgtgtactgtgcatgtgcctgccggcgggcggcacgtatacatgtggtgtgttgtgtagtgtaaaacgcagagttttggtgcgtatcggacagcgtaccggctggagacaacctggccagggtgctttcaggagctagtatcgctttcttgtttgttttggacttcgggggaaaaacacttcagaatggtgcactcgggttgcctttaggtactacaagcttgctatagagatgctgtgtatcaattcgttaatgtaagaactgtaaaatacttctaatacttcttctgtcctaaattatattttatctctttcctaaattataactaagtataagacataattattatgttatagtatttttatattcgttgttttctataatctacatatctagatgtatagtttagtttagcttatatcgttaagtctagcttatatgtgtagttttgttctttttatttcaatcatattagggtctgtttggttgggcatgtggaaaaagctgttgttgggcctgtggaaaaagctgctgtggactgtgagcggtggaaaaagctgttgtgagctgttaaaaagctaaaaaccgtttgatgtaaactactaaaagccgttaaaagtttttttatatatgttttaaagtttttttatatatgttttcacagttccatctaaaagccgttaaaagcaggttaaggagtgtttataattttatactgcgaaaaagtcagcttttagaaaaagttgatttctagaatcagtcttttggtttggtttttgatttttagggggtaaaagccaaaaccaaaagctaaaccgaacacttgtaaaggac

SEQ ID NO: 7761 - DNA, 3478 bp, Zea Mays
gaggcaagacggatcgagactacgacgccgatcctagctagctctcccgtttctgctcgcaagtcacacacagctccggtagatccgcccctcgcctctgggctccaggaagagattagcttcagacggcagggatcgatactagcaagcaagcatggcgcacgacttgtgcgaggacttggagctcgtcgccgacgacggcggcttcgatgactactactgggacgacgacttccatttccacgacgacgacggcttctccgcctcccctacgacccccgccagcgttggtgcgccccgccagcagcagcagcagcagcagatgggtgatatttcagcctcggactacaaagaaggcgaagacatgcaggggataccctgggaaaggctcaactacaccagggaccagtatcgtcggatgaggctcaaagagtacaagagctaccagaacctcacgaggtcgcacagcggcctacaacaacaggaacgcaaacaggtggagaggaaggacacattctacgatttccatctgaacacgagagccgtcaagtcaacgatagtgcatttccaggtacggtttcaactcggtacttctccatccacacacctgaccaagacgtgtttcgcgcgaggatgtgaagtgccgtttgattagcccactggaatttaccataatcttctgctcatcccatatcgcccaaccaaaaaacacacacacagtcaggatagtagtcattccgttggccataggctgttacacttgcacaatttattctcttaaggctagtttaatttgggaaccttatttttccaatgaaaaaagaactaatttactttggaaaaatgaaaattccttgagaaaaaatgaggttcccaaactaacattaaggaaagagtaggcatgccatcaagatgcatagtggtgcgtgtgactctgggttgcccgcctcacagttcgattgcttcagtttgcatgatagaagcacagtgctcttgttgtccgttctctttaccagaactcagagggcgcgcagggttacaagttggaacgtgtgccacccccctatccgaaaaaaattctttacatacgagatataaagaatttttttacagcctctcacatatatctatatcagttgttggtttatataaatagaagaaaaataaattactaaagggttattttgtaaattttgatatgtgtttgtgaactttcgagtggtggatgtgaggggctttaaaagataacgtttacatcgggtatgtacagaatttttttcgcctcctatacctaagcactccttttttcacaaaatacttaagtctaacctgtcatcatcatcccctaaatctaacttgtgattttttccccgactgctgtgcgagtatatatatatatatatatatatatatgtacgctacgaaccatgaagcatgatgtttcatctgcatcgaatgatgtcgctgttgttctgcttctatcaatgtatatatggacatcacgctggttgcaggtcaacaacaagcagtggcaggacgtttgggtgtgcgctatctgcagttagtcttgagtgatactagctgcaatttaatcagatcgatcaggtggatgggcatcctcagcagccgggaggagtgactccagcagggggttggaaagcttgcaatatgctgaggaacctcctgtggcctacatcgaagcacgacgtgtacctggtgcagagctactccgtgacgcactggtctgccctgctccggagaggaagagaggttctcaacgtggccggccggttggctccgacccagaacgtgaagggggctggaccgttgtcgagggttcagatcagcgccatggctgtgaaggacaacctcatggtggccggtggcttccagggagaactcatatgcaagtacgttgatagacccggggtggcattctgcaccagcctgaccggtggcagcagttccatcacgaacgccgtcgacatccaccaggcacccagcggcgccacgcgagtgatggcggcgaacaacgactgcgtcgtcaggacgttcgacgccgagagatacagccttctcacgcagctcaccttcccgtggtccgtcaacagcacgtcggtgagccccgacggcaagctgctggcggtcctgggcgacagcacggagtgcgtggtcgccgacccgcagtcgggcaaggcggtggcgacgctgcgcgggcacctggactactccttcgcgtcggcgtggcaccccgacggccgcgtcctggcgacggggaaccaggacgcgacgtgccggctgtgggacgcgcgcagcctgtcggagccgttcgccgtgctcggggcccggatcggcgccgtccggggcctccgcttctcccccgacggcaggttcctggccgcggccgaggccgccgacttcgtgcacgtgtacgacgccgcggccgggtacgccggcgccgcgcaggaggtggacgtgttcggggaggtcgccggcgccgcgttcagccccgacggcgaggcgctgttcgtgagcgtcgccgaccgcacctacggcggcctgctcgagttccgacgccggcgggcggaccgctacctcgacgcgtgtttcttctgagggagaggcgcgcgcgcgcgccgtctgttgtgtactgtgcatgtgcctgccggcgggcggcacgtatacatgtggtgtgttgtgtagtgtaaaacgcagagttttggtgcgtatcggacagcgtaccggctggagacaacctggccagggtgctttcaggagctagtatcgctttcttgtttgttttggacttcgggggaaaaacacttcagaatggtgcactcgggttgcctttaggtactacaagcttgctatagagatgctgtgtatcaattcgttaatgtaagaactgtaaaatacttctaatacttcttctgtcctaaattatattttatctctttcctaaattataactaagtataagacataattattatgttatagtatttttatattcgttgttttctataatctacatatctagatgtatagtttagtttagcttatatcgttaagtctagcttatatgtgtagttttgttctttttatttcaatcatattagggtctgtttggttgggcatgtggaaaaagctgttgttgggcctgtggaaaaagctgctgtggactgtgagcggtggaaaaagctgttgtgagctgttaaaaagctaaaaaccgtttgatgtaaactactaaaagccgttaaaagtttttttatatatgttttaaagtttttttatatatgttttcacagttccatctaaaagccgttaaaagcaggttaaggagtgtttataattttatactgcgaaaaagtcagcttttagaaaaagttgatttctagaatcagtcttttggtttggtttttgatttttagggggtaaaagccaaaaccaaaagctaaaccgaacacttgtaaaggac

SEQ ID NO: 7762 - DNA, 2535 bp, Zea Mays
gaggcaagacggatcgagactacgacgccgatcctagctagctctcccgtttctgctcgcaagtcacacacagctccggtagatccgcccctcgcctctgggctccaggaagagattagcttcagacggcagggatcgatactagcaagcaagcatggcgcacgacttgtgcgaggacttggagctcgtcgccgacgacggcggcttcgatgactactactgggacgacgacttccatttccacgacgacgacggcttctccgcctcccctacgacccccgccagcgttggtgcgccccgccagcagcagcagcagcagcagatgggtgatatttcagcctcggactacaaagaaggcgaagacatgcaggggataccctgggaaaggctcaactacaccagggaccagtatcgtcggatgaggctcaaagagtacaagagctaccagaacctcacgaggtcgcacagcggcctacaacaacaggaacgcaaacaggtggagaggaaggacacattctacgatttccatctgaacacgagagccgtcaagtcaacgatagtgcatttccaggtcaacaacaagcagtggcaggacgtttgggtgtgcgctatctgcagttagtcttgagtgatactagctgcaatttaatcagatcgatcaggtggatgggcatcctcagcagccgggaggagtgactccagcagggggttggaaagcttgcaatatgctgaggaacctcctgtggcctacatcgaagcacgacgtgtacctggtgcagagctactccgtgacgcactggtctgccctgctccggagaggaagagaggttctcaacgtggccggccggttggctccgacccagaacgtgaagggggctggaccgttgtcgagggttcagatcagcgccatggctgtgaaggacaacctcatggtggccggtggcttccagggagaactcatatgcaagtacgttgatagacccggggtggcattctgcaccagcctgaccggtggcagcagttccatcacgaacgccgtcgacatccaccaggcacccagcggcgccacgcgagtgatggcggcgaacaacgactgcgtcgtcaggacgttcgacgccgagagatacagccttctcacgcagctcaccttcccgtggtccgtcaacagcacgtcggtgagccccgacggcaagctgctggcggtcctgggcgacagcacggagtgcgtggtcgccgacccgcagtcgggcaaggcggtggcgacgctgcgcgggcacctggactactccttcgcgtcggcgtggcaccccgacggccgcgtcctggcgacggggaaccaggacgcgacgtgccggctgtgggacgcgcgcagcctgtcggagccgttcgccgtgctcggggcccggatcggcgccgtccggggcctccgcttctcccccgacggcaggttcctggccgcggccgaggccgccgacttcgtgcacgtgtacgacgccgcggccgggtacgccggcgccgcgcaggaggtggacgtgttcggggaggtcgccggcgccgcgttcagccccgacggcgaggcgctgttcgtgagcgtcgccgaccgcacctacggcggcctgctcgagttccgacgccggcgggcggaccgctacctcgacgcgtgtttcttctgagggagaggcgcgcgcgcgcgccgtctgttgtgtactgtgcatgtgcctgccggcgggcggcacgtatacatgtggtgtgttgtgtagtgtaaaacgcagagttttggtgcgtatcggacagcgtaccggctggagacaacctggccagggtgctttcaggagctagtatcgctttcttgtttgttttggacttcgggggaaaaacacttcagaatggtgcactcgggttgcctttaggtactacaagcttgctatagagatgctgtgtatcaattcgttaatgtaagaactgtaaaatacttctaatacttcttctgtcctaaattatattttatctctttcctaaattataactaagtataagacataattattatgttatagtatttttatattcgttgttttctataatctacatatctagatgtatagtttagtttagcttatatcgttaagtctagcttatatgtgtagttttgttctttttatttcaatcatattagggtctgtttggttgggcatgtggaaaaagctgttgttgggcctgtggaaaaagctgctgtggactgtgagcggtggaaaaagctgttgtgagctgttaaaaagctaaaaaccgtttgatgtaaactactaaaagccgttaaaagtttttttatatatgttttaaagtttttttatatatgttttcacagttccatctaaaagccgttaaaagcaggttaaggagtgtttataattttatactgcgaaaaagtcagcttttagaaaaagttgatttctagaatcagtcttttggtttggtttttgatttttagggggtaaaagccaaaaccaaaagctaaaccgaacacttgtaaaggac

SEQ ID NO: 7763 - DNA, 2607 bp, Zea Mays
atgattccagttcatgccaacctcgccgccgtggaccgttgccatctgtgcatctggattccataaaggcacgcgtgccctgacctctccacaccccgcgtcccaccaacttccattccctaccgcccgcccaccccactccactccgctcctcccactcgagccatcatggccctcgcctcccgcgccgccgcagccgccgtggcgtgcgtcctcctggcgctcgccgcctccgccgcgggggcgggctccaactcccctgcaccggcgccggcggtggactgtatctcccaggccgccagcctgatcgactgcatcgactacgtccagaaggggagcagcgcgcgccgtccgtccgctgcctgctgcggcgaggtcaagaccgcagtggccagccccgtcatcgtgggctgcctctgctccctcgccggctccaactccagtaacctgggctttcccatcgacatgaagcgcgtgctggcgctccccggcgcgtgcggcgcgtccaacgccgccttcagcaagtgcaacatttccgcgcttcccccaaccgaaggaacgcaaacaggtggagaggaaggacacattctacgatttccatctgaacacgagagccgtcaagtcaacgatagtgcatttccaggtcaacaacaagcagtggcaggacgtttgggtgtgcgctatctgcagttagtcttgagtgatactagctgcaatttaatcagatcgatcaggtggatgggcatcctcagcagccgggaggagtgactccagcagggggttggaaagcttgcaatatgctgaggaacctcctgtggcctacatcgaagcacgacgtgtacctggtgcagagctactccgtgacgcactggtctgccctgctccggagaggaagagaggttctcaacgtggccggccggttggctccgacccagaacgtgaagggggctggaccgttgtcgagggttcagatcagcgccatggctgtgaaggacaacctcatggtggccggtggcttccagggagaactcatatgcaagtacgttgatagacccggggtggcattctgcaccagcctgaccggtggcagcagttccatcacgaacgccgtcgacatccaccaggcacccagcggcgccacgcgagtgatggcggcgaacaacgactgcgtcgtcaggacgttcgacgccgagagatacagccttctcacgcagctcaccttcccgtggtccgtcaacagcacgtcggtgagccccgacggcaagctgctggcggtcctgggcgacagcacggagtgcgtggtcgccgacccgcagtcgggcaaggcggtggcgacgctgcgcgggcacctggactactccttcgcgtcggcgtggcaccccgacggccgcgtcctggcgacggggaaccaggacgcgacgtgccggctgtgggacgcgcgcagcctgtcggagccgttcgccgtgctcggggcccggatcggcgccgtccggggcctccgcttctcccccgacggcaggttcctggccgcggccgaggccgccgacttcgtgcacgtgtacgacgccgcggccgggtacgccggcgccgcgcaggaggtggacgtgttcggggaggtcgccggcgccgcgttcagccccgacggcgaggcgctgttcgtgagcgtcgccgaccgcacctacggcggcctgctcgagttccgacgccggcgggcggaccgctacctcgacgcgtgtttcttctgagggagaggcgcgcgcgcgcgccgtctgttgtgtactgtgcatgtgcctgccggcgggcggcacgtatacatgtggtgtgttgtgtagtgtaaaacgcagagttttggtgcgtatcggacagcgtaccggctggagacaacctggccagggtgctttcaggagctagtatcgctttcttgtttgttttggacttcgggggaaaaacacttcagaatggtgcactcgggttgcctttaggtactacaagcttgctatagagatgctgtgtatcaattcgttaatgtaagaactgtaaaatacttctaatacttcttctgtcctaaattatattttatctctttcctaaattataactaagtataagacataattattatgttatagtatttttatattcgttgttttctataatctacatatctagatgtatagtttagtttagcttatatcgttaagtctagcttatatgtgtagttttgttctttttatttcaatcatattagggtctgtttggttgggcatgtggaaaaagctgttgttgggcctgtggaaaaagctgctgtggactgtgagcggtggaaaaagctgttgtgagctgttaaaaagctaaaaaccgtttgatgtaaactactaaaagccgttaaaagtttttttatatatgttttaaagtttttttatatatgttttcacagttccatctaaaagccgttaaaagcaggttaaggagtgtttataattttatactgcgaaaaagtcagcttttagaaaaagttgatttctagaatcagtcttttggtttggtttttgatttttagggggtaaaagccaaaaccaaaagctaaaccgaacacttgtaaaggac

SEQ ID NO: 7764 - DNA, 3690 bp, Zea Mays
ccatcatggaatataatctaagggtttgggaattttttaaaatatggaagacatggattctatccatagctcattaggtatggaacaaatcaatgaagatattgcacaagtttacattagaatccatggatcaaaagaatagctagctttgagagacacatggattagttgatggatttaatctcaccatgggattaggtgtgaggtatgaattcacccaatacatacccagattaaatccatagtgggatttcagggtatccactaaggccttgttcggttatggattgcacaagtttaccgaacaaggccttactagtttttatcatgggggaacctggagcctaccggtagcgtgcatgaagtgaaatagttaactttatgtaccacttcataaaaaaatggccattttgtaaacagattcaaggaagatcaccccagaaataagtataacaatgatcagaaaaaacattttccttatcctttcctcccaatgatgcgcaaaaaaattgcttctgggttcgctagatattttttttttcaagtttcgtttgagaattttgcagctttgatatgtttctagttatgctcctaatgctgaccctgttctaaacagttcaaaatccctttctcgatctggcgatctctttcttacctgattagaaaaacagggtccttatgttacattttcttagttatttgtcttgctagtatctatacataatatccttctagggtttggaactatgttcattcttagatcactttcagtgtcatgtacatactttgtaatgaagaacctctctggatgagcaaatgtctttcaatcgggggtcctcttgaatacaaagtttcctggaagaagacggcactatgtaggcttggtctatgttcagaaaataaggagatttggcagaagcctcgtcagttcgatggctttaattctttgtatctataccggagatggtatagatgttttactactttgaatagtttttcgtttgacgatggacatgtggaaaggaaagatgactttttattggatcagtttcgttctcagtatgatggaaaatgcccagttttggttacgaagttggccgaaacctggcctgcgaggacaaaatggacactgcagcaactgacaaaggattttggggaagttccattcaggatatcacaaagaagccctcagaagataacaatgaaactaaaggattatgtttcttacatggaactccagcatgatgaagatcctctatacatatttgatgataagtttggagaatcagcaccaacattacttgaagattatagtgtccctcatttattccaagaagacttttttgatatcttggattatgaccaacgaccagcattcagatggcttattattggaccagagagatcaggtgcttcttggcatgttgatcctggactgacaagtgcatggaatactcttctttgtggccgaaaaagatgggcattgtaccctccaggaagagtgcctggtggtgtcacagtacatgtaaatgatgaagacggtgatgttgacattgaaactccgacatcattgcaaccattggaatgcacacaattgccaggagagaccatttttgttcctagtgggtggtggcattgcgttctgaatctcgagacaacaattgcagttacacagaactttgtaaaccagtctaattttcagcatgtatgtttggatatggcacctggtcacagacacaaaggagtttgccgtgctggcttacttgctgttccaggaaaattcgttaaagataataaaaaccatcaatctgtcacaatgagtggatggaaccaccctgatatgagtcgtaaggaaaaaaggcttaaaggttctgaagcactaagaatctcaaatagcataaatcattgttctgcatttgagttctcaggtgttcaagagagtttggagaatcaagatttctcatatgatattgattttttgtcacaattcattgagaaagaaagggaccattattcttctctctggagtccaactaattcaattgggcagagagaagcaagagaatggctgcgaaggctttgggttctgaaacctgatctgagagaactaatatggaagggtgcatgccttgcaataaatgttgacaaatggtattcatgcttagaggagatatgtgcatgccatagtttaccaccacctacagaggatgagaagcttcctgttggcactggtagcaacccagtcttcattgtctcgggcaatgtgattaaaatatatgctgaaggaggattggtttattctgtccatggtttgggcacagagcttgagttctatgatctcctgcaaaaaagtggttcacctttgatcaatcacattcctgagataattgctagtggcttccttgagtataaggatgatatctacagcacggttccgtggaatggaaaaggaataccagaaattttggttaagtactactcattggaggtttcttgtgcgaacagctgctttcctcttgggctttggagcaagcaacgatttgggatgtgtagttcggctgatgtttcagacagaccaatttggccttacatggtaacaagaaagtgcaaaggagatatttttgctcgcatccgcgatatgctgtcgaagactgatattcttcatcttgcatcatccttgggagttcaaatgcgaaacatacatttattacccctgccacccgtggagcatgtacctgaatctgggaacaatgatgtgaaagaagtggtaggaacatgtgatgataccacggttctacctgaatggcagcaacttgtctctactctaaataggaggaagcagaatgtaaaaaagcacctagctaactggggggactctgttccacaagttctagtagaaaaggctgaagaatatctccctccgaatatgggcttcctcatcaagtttgttaaggatgatggtgagttgctgtacccatgcccctcttggatacattcagatataatggacgataacattcttatcgaggggatcataaaactgagttcttctggtgagagggaaagagtttatgactcagatcgggacaaaataaatgcaattcacatcattgatttcagtgatctgtccattggggatcctatatgtgacataattccgctgcacttggatattttccggggtgatagtgaccttctcaaggaatttctacggagctatcaacttccccttctgaggggggaatcaaccaccgatgtctacagatcagtgcgaaactcgaagttcagcagggcatcatatcgcgcgatgtgctactgtatattacacgaggacaacgtcttgggagctatattcagcctgtggaaggagatgagggctgcaacgtcctgggaggacgttgagaacctggtctggggagagctgaaccggtaccaggactctgcagttcgctcagcataactaaacaccagcaaaaaaaaaaaaaactttctgaacatacgtgtatgttgttgttcctccgacgaatgtaacttccaaatataaaaaaaaagtgtagggaaaataacgaaggctcgacacggcatgcccgtattttcctatggctggtgataatattgagatccctgaaatggttctatgaaatgaaccgcagaccgttgaaatcgtttcagatcggcaacataaatcgc

SEQ ID NO: 7765 - DNA, 3786 bp, Zea Mays
ccatcatggaatataatctaagggtttgggaattttttaaaatatggaagacatggattctatccatagctcattaggtatggaacaaatcaatgaagatattgcacaagtttacattagaatccatggatcaaaagaatagctagctttgagagacacatggattagttgatggatttaatctcaccatgggattaggtgtgaggtatgaattcacccaatacatacccagattaaatccatagtgggatttcagggtatccactaaggccttgttcggttatggattgcacaagtttaccgaacaaggccttactagtttttatcatgggggaacctggagcctaccggtagcgtgcatgaagtgaaatagttaactttatgtaccacttcataaaaaaatggccattttgtaaacagattcaaggaagatcaccccagaaataagtataacaatgatcagaaaaaacattttccttatcctttcctcccaatgatgcgcaaaaaaattgcttctgggttcgctagatattttttttttcaagtttcgtttgagaattttgcagctttgatatgtttctagttatgctcctaatgctgaccctgttctaaacagttcaaaatccctttctcgatctggcgatctctttcttacctgattagaaaaacagggtccttatgttacattttcttagttatttgtcttgctagtatctatacataatatccttctagggtttggaactatgttcattcttagatcactttcagtgtcatgtacatactttgtaatgaagaacctctctggatgagcaaatgtctttcaatcgggggtcctcttgaatacaaagtttcctggaagaagacggcactatgtaggcttggtctatgttcagaaaataaggagatttggcagaagcctcgtcagttcgatggctttaattctttgtatctataccggagatggtatagatgttttactactttgaatagtttttcgtttgacgatggacatgtggaaaggaaagatgactttttattggatcagtttcgttctcagtatgatggaaaatgcccagttttggttacgaagttggccgaaacctggcctgcgaggacaaaatggacactgcagcaactgacaaaggattttggggaagttccattcaggatatcacaaagaagccctcagaagataacaatgaaactaaaggattatgtttcttacatggaactccagcatgatgaagatcctctatacatatttgatgataagtttggagaatcagcaccaacattacttgaagattatagtgtccctcatttattccaagaagacttttttgatatcttggattatgaccaacgaccagcattcagatggcttattattggaccagagagatcaggtgcttcttggcatgttgatcctggactgacaagtgcatggaatactcttctttgtggccgaaaaaggaagagtgcctggtggtgtcacagtacatgtaaatgatgaagacggtgatgttgacattgaaactccgacatcattgcaatggtggcttgatatatatccacaccttcctgaacatgagaagccattggaatgcacacaattgccaggagagaccatttttgttcctagtgggtggtggcattgcgttctgaatctcgagacaacaattgcagttacacagaactttgtaaaccagtctaattttcagcatgtatgtttggatatggcacctggtcacagacacaaaggagtttgccgtgctggcttacttgctgttccaggaaaattcgttaaagataataaaaaccatcaatctgtcacaatgagtggatggaaccaccctgatatgagtcgtaaggaaaaaaggcttaaaggttctgaagcactaagaatctcaaatagcataaatcattgttctgcatttgagttctcaggtgttcaagagagtttggagaatcaagatttctcatatgatattgattttttgtcacaattcattgagaaagaaagggaccattattcttctctctggagtccaactaattcaattgggcagagagaagcaagagaatggctgcgaaggctttgggttctgaaacctgatctgagagaactaatatggaagggtgcatgccttgcaataaatgttgacaaatggtattcatgcttagaggagatatgtgcatgccatagtttaccaccacctacagaggatgagaagcttcctgttggcactggtagcaacccagtcttcattgtctcgggcaatgtgattaaaatatatgctgaaggaggattggtttattctgtccatggtttgggcacagagcttgagttctatgatctcctgcaaaaaagtggttcacctttgatcaatcacattcctgagataattgctagtggcttccttgagtataaggatgatatctacagcacggttccgtggaatggaaaaggaataccagaaattttggttaagtactactcattggaggtttcttgtgcgaacagctgctttcctcttgggctttggagcaagcaacgatttgggatgtgtagttcggctgatgtttcagacagaccaatttggccttacatggtaacaagaaagtgcaaaggagatatttttgctcgcatccgcgatatgctgtcgaagactgatattcttcatcttgcatcatccttgggagttcaaatgcgaaacatacatttattacccctgccacccgtggagcatgtacctgaatctgggaacaatgatgtgaaagaagtggtaggaacatgtgatgataccacggttctacctgaatggcagcaacttgtctctactctaaataggaggaagcagaatgtaaaaaagcacctagctaactggggggactctgttccacaagttctagtagaaaaggctgaagaatatctccctccgaatatgggcttcctcatcaagtttgttaaggtaaatttgcatccttgtcttcttcgttgctcgtgtcgagcattaggtttgacgagtgctgattaagttaacaggatgatggtgagttgctgtacccatgcccctcttggatacattcagatataatggacgataacattcttatcgaggggatcataaaactgagttcttctggtgagagggaaagagtttatgactcagatcgggacaaaataaatgcaattcacatcattgatttcagtgatctgtccattggggatcctatatgtgacataattccgctgcacttggatattttccggggtgatagtgaccttctcaaggaatttctacggagctatcaacttccccttctgaggggggaatcaaccaccgatgtctacagatcagtgcgaaactcgaagttcagcagggcatcatatcgcgcgatgtgctactgtatattacacgaggacaacgtcttgggagctatattcagcctgtggaaggagatgagggctgcaacgtcctgggaggacgttgagaacctggtctggggagagctgaaccggtaccaggactctgcagttcgctcagcataactaaacaccagcaaaaaaaaaaaaaactttctgaacatacgtgtatgttgttgttcctccgacgaatgtaacttccaaatataaaaaaaaagtgtagggaaaataacgaaggctcgacacggcatgcccgtattttcctatggctggtgataatattgagatccctgaaatggttctatgaaatgaaccgcagaccgttgaaatcgtttcagatcggcaacataaatcgc

SEQ ID NO: 7766 - DNA, 924 bp, Zea Mays
ctgcaatcagacaaacagacttctaatatcagacttctaatatcagctctagcttctttataatcaactgcaatcagacaaacagacttctaatatcaaatgcagtctaacttcattctccagtaccaaaagtatcatcaacttatttgatatagcatactttctatttgaaatactggaactgttagcccataaattcaaatcagtagttcctaagcatgtctgagattcaaatgtcaaaatacatcataacaaaacaaacttgcgaactatggagcactcaaacaagtaccaaacatggctataaaaagaacggtacaattctgggtcagatttgtggatgacttagcatatgtaccagtacaggtccaggaatccaacaccaacatcacaaaaggattttctgagaaggtgcatggacattgatatgaataatccttttattcattgatctggcaaaatggaagataagttttcaagcatcatcgcactaagttatttagataaacgtgaagtcaagcctatcatagtataataggttattaattttcaaaatacgataaatactaaatgcatatcgtaactgagggaaactgataatttttgcgatgtaaagctctatgtataacaatgtacatcgtaaatgctttactaactggtatgcattaccaaatctaacatagatcataaggaagctagaatcgacttgtcaaaacatccaacaaatgagccagcataattggtccaactcgaccaacaaccacatgatcctatagttaccgaataccgacaaaattttccggttcaatggcctatgtatgaaggaataggccattgaaatcttatcttgcttagcagtcccgttcttgcaatctgcaggcgtcaaaatcaaaagaaagaaagtgagcagagatgaaatcaaag

SEQ ID NO: 7767 - DNA, 3493 bp, Zea Mays
tatacatgagattataaccaatgatgtgtttgaaggtaaattcactgatgagtttgcccacagtaacaacaacaaacatgaaagtggagttgaggctcctggtgtcactagtagtaagaagttgaagcatacagttgccggtgagaaaattcaaggtgtcatccctggaataaatagctcagatccacagaaatgtaattcagagaacatccaacatgagaacaggatagtatcccagaatataaacagtgctggtgactgcattggagactgcaaagacagctccaacgccttctcttcaagggaagaaaatacaatcgctgaaaccagatgtccaacggatgactggaactcctgtcagtttgcactgagcaatggttcatccattctcaataaccacagtgctccacaggatagcctcacttatggagataatgatctaaactacattgattggcctggcattgacaattttgaggatgttgacacattattcaggagatctgatttcacatatgatccgcagcagctggagaatacagatgggttatcttggcttccttcttcagatgctgtttactcttctgatgttgctttgcagcaagggtttgactcgtcttattccgattatgatattctggatgatctctcagcattccaatgtgcagaagataaatcactaccctcagttggtccttcatcggatttatgtgataatcaattcaatgatacctatctgttcagtgagcagaagaatgcgaatgcatatggtgaacagatataccaagaggatgtgatggagttgttgcccactgaccagatatgcagtggacatgaaaacattgatatgggtggaaaccagtattcatctgaacatacaattcaaggtattgaagacaagaaattttctatagcatcaacttctcagctgagctcctctcagaatttactgaagcaaaggcaccacttagattccaattcaccaagcaacattacttatgaggcctatgaagaaaagttcggtccatctagtggttcttttgcacaaaggaatttaaaagctgatgtgacacttaactccacgaatgcagtgcagaagaaaactatgaacatgcaaccaacacagccgataaatgataatgtcatgaacagacatcctcaaacattgacaagaagtgcttcttatccttgtgagaacaatgaatctgaaagaagaggattagggaaaagaactctgggggatcctcaagttacaatgggtacttcaatggtagtggatggctcatttgtatcatccatgtcctctgatatctctgttgaagaaagcagctttcgacaactgcagaatgctgttagtcagctggatgtgcaaaccaaattgtgcattagagatggtttataccgattggcacgaagtgcgcagcacaggcaagttattccaaatatgatgagcagcaatgaagacaacccggatataaaggatctgcagaatgcagaaactttgcgcaagtatgatatttctaacaaagatcttatatatacttacacaagcatgaatcagtatctctatggctttgaaaagtgtagtcgttagcattcccctcattgtttaattagaaacttcacattgttgtctaagcgctcctaatgcaccatctttcctctgaaacacccaatgcgatgtgttttgcacagcctgttatctctaaaatatcttggtccttaagatgctagttgattgaggtttaattgggtgtttggttcccctgactaaagtttagttcgtgtcacatcaaatatttaaatatcaattatgagtattaaagataggcttaattaggtttaataaatttgccttgccgtttactgtagcatcgtatgagtgaatcatagactatttaggcttaaaactcatcttaacgtttagtacttagttgtgtaatttattttataattagactacatttaatactttaaacgagtattcaaacatccgatgtgacgggactaaaatttagtcccttggatccaaacgggcccttaaatatagctcttaatttgagtcacagattaattaacctgcctgttgactgtttacatgttatttgtgatgctatagtatctagtccgttatctatagttttagaacagtaagaaatgtaagaaaggaggcagttgattatccttccatggcatggcacaatgtctgaagccgatacttgttacagtacttataatgcaagggaggcaagaaatatgtgtagcctttcctttttgatgtttctgtttggcagattcgtcgatcctcggagcatcgagacacagacaaacccgatcgaccggtctatcgctctgctacttttccaccagtcatcggaccatgcggctgtggctgtcgacgatgcctcatcacttaaaccccctgctggtagcaaacaccaccagggccctgctgctaaccaaaaccaaggcctgataccagattcatcggtgtattcccctggagatggggcccccaaggatgtacagtccctggacaagttctgaatttatgtccctgctctccatgggcacgttcggttcccggggaatggtcgtctggaacgaatcctggtcggattgcttctctaattgatataagctttgatcggttggaacgattcttggtggaatttcgggataaatgaacaggccctaatgcgtctccgtgacctggttaaggcggcataatacggctttcacatgatgtttctaggcagatgtaaaaaacaagtatattgtgtacccaatagtctgtagcctgttccaatcacattggttttgacatgcgtgtatcctatgggtaggcggccgttgtgctctctagtggcgttgactcacatctgtgtaatctaaaaaaaattctttctttccgtggatctctaactatacctttgaactgatatacgggagtggatggattcggccaacgatcattatgccatgttgctaagaaatgattgcgtgagcctgctgcttctacatgtcaagcctttaatcaatcagcctgggcgttggaaagggacagatggctcttgagcaaaacctttgcttgattaacatgagcaagcaaactgtgggtccgacaatgcattaacggttgacatgtgtttgattagatggtagactgtgggcccaacgatgcattagcgcttgacattttcttgacgggctagttagcaaaagatggtaggcatatcaatccgacgactggtacctcgttccgcaacactaatcgctgtcctgcttattcaaaacgtagatacttcttattcaaaaggtaaatacaaaatgctacttccaagtgaaacgagctgatgtttcttttaccacctatgcctcacaattgtgtcaacatggagcgtgtgctaacatggatattggatcatgctatcgagtttttaatattaaaagagttgaaaagtatttgacacgacaaataataaaaaaataa

SEQ ID NO: 7768 - DNA, 2818 bp, Zea Mays
ccccctctttctctgctcgttcctgaacgcgaattcgggcgacggatttgaggttctgatccacagctctcgattccggaaggagttggtcaagaactggggatcctgagttgaatatgatatcaaatccggtggactggtatagtttcggacccggatagaattggtagggatgccagattggagggtgcgtgagtttgaaggtaaattcactgatgagtttgcccacagtaacaacaacaaacatgaaagtggagttgaggctcctggtgtcactagtagtaagaagttgaagcatacagttgccggtgagaaaattcaaggtgtcatccctggaataaatagctcagatccacagaaatgtaattcagagaacatccaacatgagaacaggatagtatcccagaatataaacagtgctggtgactgcattggagactgcaaagacagctccaacgccttctcttcaagggaagaaaatacaatcgctgaaaccagatgtccaacggatgactggaactcctgtcagtttgcactgagcaatggttcatccattctcaataaccacagtgctccacaggatagcctcacttatggagataatgatctaaactacattgattggcctggcattgacaattttgaggatgttgacacattattcagcagctggagaatacagatgggttatcttggcttccttcttcagatgctgtttactcttctgatgttgctttgcagcaagggtttgactcgtcttattccgattatgatattctggatgatctctcagcattccaatgtgcagaagataaatcactaccctcagttggtccttcatcggatttatgtgataatcaattcaatgatacctatctgttcagtgagcagaagaatgcgaatgcatatggtgaacagatataccaagaggatgtgatggagttgttgcccactgaccagatatgcagtggacatgaaaacattgatatgggtggaaaccagtattcatctgaacatacaattcaaggtattgaagacaagaaattttctatagcatcaacttctcagctgagctcctctcagaatttactgaagcaaaggcaccacttagattccaattcaccaagcaacattacttatgaggcctatgaagaaaagttcggtccatctagtggttcttttgcacaaaggaatttaaaagtgcagaagaaaactatgaacatgcaaccaacacagccgataaatgataatgtcatgaacagacatcctcaaacattgacaagaagtgcttcttatccttgtgagaacaatgaatctgaaagaagaggattagggaaaagaactctgggggatcctcaagttacaatgggtacttcaatggtagtggatggctcatttgtatcatccatgtcctctgatatctctgttgaagaaagcagctttcgacaactgcagaatgctgttagtcagctggatgtgcaaaccaaattgtgcattagagatggtttataccgattggcacgaagtgcgcagcacaggcaagttattccaaatatgatgagcagcaatgaagacaacccggatataaaggatctgcagaatgcagaaactttgcgcaaattcgtcgatcctcggagcatcgagacacagacaaacccgatcgaccggtctatcgctctgctacttttccaccagtcatcggaccatgcggctgtggctgtcgacgatgcctcatcacttaaaccccctgctggtagcaaacaccaccagggccctgctgctaaccaaaaccaaggcctgataccagattcatcggtgtattcccctggagatggggcccccaaggatgtacagtccctggacaagttctgaatttatgtccctgctctccatgggcacgttcggttcccggggaatggtcgtctggaacgaatcctggtcggattgcttctctaattgatataagctttgatcggttggaacgattcttggtggaatttcgggataaatgaacaggccctaatgcgtctccgtgacctggttaaggcggcataatacggctttcacatgatgtttctaggcagatgtaaaaaacaagtatattgtgtacccaatagtctgtagcctgttccaatcacattggttttgacatgcgtgtatcctatgggtaggcggccgttgtgctctctagtggcgttgactcacatctgtgtaatctaaaaaaaattctttctttccgtggatctctaactatacctttgaactgatatacgggagtggatggattcggccaacgatcattatgccatgttgctaagaaatgattgcgtgagcctgctgcttctacatgtcaagcctttaatcaatcagcctgggcgttggaaagggacagatggctcttgagcaaaacctttgcttgattaacatgagcaagcaaactgtgggtccgacaatgcattaacggttgacatgtgtttgattagatggtagactgtgggcccaacgatgcattagcgcttgacattttcttgacgggctagttagcaaaagatggtaggcatatcaatccgacgactggtacctcgttccgcaacactaatcgctgtcctgcttattcaaaacgtagatacttcttattcaaaaggtaaatacaaaatgctacttccaagtgaaacgagctgatgtttcttttaccacctatgcctcacaattgtgtcaacatggagcgtgtgctaacatggatattggatcatgctatcgagtttttaatattaaaagagttgaaaagtatttgacacgacaaataataaaaaaataa

SEQ ID NO: 7769 - DNA, 3687 bp, Zea Mays
gatccatcccgttcttgggttcttctccccctctttctctgctcgttcctgaacgcgaattcgggcgacggatttgaggttctgatccacagctctcgattccggaaggagttggtcaagaactggggatcctgagttgaatatgatatcaaatccggtggactggtatagtttcggacccggatagaattggtagggatgccagattggagggtgcgtgagtttgaaggtaaattcactgatgagtttgcccacagtaacaacaacaaacatgaaagtggagttgaggctcctggtgtcactagtagtaagaagttgaagcatacagttgccggtgagaaaattcaaggtgtcatccctggaataaatagctcagatccacagaaatgtaattcagagaacatccaacatgagaacaggatagtatcccagaatataaacagtgctggtgactgcattggagactgcaaagacagctccaacgccttctcttcaagggaagaaaatacaatcgctgaaaccagatgtccaacggatgactggaactcctgtcagtttgcactgagcaatggttcatccattctcaataaccacagtgctccacaggatagcctcacttatggagataatgatctaaactacattgattggcctggcattgacaattttgaggatgttgacacattattcaggagatctgatttcacatatgatccgcagcagctggagaatacagatgggttatcttggcttccttcttcagatgctgtttactcttctgatgttgctttgcagcaagggtttgactcgtcttattccgattatgatattctggatgatctctcagcattccaatgtgcagaagataaatcactaccctcagttggtccttcatcggatttatgtgataatcaattcaatgatacctatctgttcagtgagcagaagaatgcgaatgcatatggtgaacagatataccaagaggatgtgatggagttgttgcccactgaccagatatgcagtggacatgaaaacattgatatgggtggaaaccagtattcatctgaacatacaattcaaggtattgaagacaagaaattttctatagcatcaacttctcagctgagctcctctcagaatttactgaagcaaaggcaccacttagattccaattcaccaagcaacattacttatgaggcctatgaagaaaagttcggtccatctagtggttcttttgcacaaaggaatttaaaagctgatgtgacacttaactccacgaatgcagtgcagaagaaaactatgaacatgcaaccaacacagccgataaatgataatgtcatgaacagacatcctcaaacattgacaagaagtgcttcttatccttgtgagaacaatgaatctgaaagaagaggattagggaaaagaactctgggggatcctcaagttacaatgggtacttcaatggtagtggatggctcatttgtatcatccatgtcctctgatatctctgttgaagaaagcagctttcgacaactgcagaatgctgttagtcagctggatgtgcaaaccaaattgtgcattagagatggtttataccgattggcacgaagtgcgcagcacaggcaagttattccaaatatgatgagcagcaatgaagacaacccggatataaaggatctgcagaatgcagaaactttgcgcaagtatgatatttctaacaaagatcttatatatacttacacaagcatgaatcagtatctctatggctttgaaaagtgtagtcgttagcattcccctcattgtttaattagaaacttcacattgttgtctaagcgctcctaatgcaccatctttcctctgaaacacccaatgcgatgtgttttgcacagcctgttatctctaaaatatcttggtccttaagatgctagttgattgaggtttaattgggtgtttggttcccctgactaaagtttagttcgtgtcacatcaaatatttaaatatcaattatgagtattaaagataggcttaattaggtttaataaatttgccttgccgtttactgtagcatcgtatgagtgaatcatagactatttaggcttaaaactcatcttaacgtttagtacttagttgtgtaatttattttataattagactacatttaatactttaaacgagtattcaaacatccgatgtgacgggactaaaatttagtcccttggatccaaacgggcccttaaatatagctcttaatttgagtcacagattaattaacctgcctgttgactgtttacatgttatttgtgatgctatagtatctagtccgttatctatagttttagaacagtaagaaatgtaagaaaggaggcagttgattatccttccatggcatggcacaatgtctgaagccgatacttgttacagtacttataatgcaagggaggcaagaaatatgtgtagcctttcctttttgatgtttctgtttggcagattcgtcgatcctcggagcatcgagacacagacaaacccgatcgaccggtctatcgctctgctacttttccaccagtcatcggaccatgcggctgtggctgtcgacgatgcctcatcacttaaaccccctgctggtagcaaacaccaccagggccctgctgctaaccaaaaccaaggcctgataccagattcatcggtgtattcccctggagatggggcccccaaggatgtacagtccctggacaagttctgaatttatgtccctgctctccatgggcacgttcggttcccggggaatggtcgtctggaacgaatcctggtcggattgcttctctaattgatataagctttgatcggttggaacgattcttggtggaatttcgggataaatgaacaggccctaatgcgtctccgtgacctggttaaggcggcataatacggctttcacatgatgtttctaggcagatgtaaaaaacaagtatattgtgtacccaatagtctgtagcctgttccaatcacattggttttgacatgcgtgtatcctatgggtaggcggccgttgtgctctctagtggcgttgactcacatctgtgtaatctaaaaaaaattctttctttccgtggatctctaactatacctttgaactgatatacgggagtggatggattcggccaacgatcattatgccatgttgctaagaaatgattgcgtgagcctgctgcttctacatgtcaagcctttaatcaatcagcctgggcgttggaaagggacagatggctcttgagcaaaacctttgcttgattaacatgagcaagcaaactgtgggtccgacaatgcattaacggttgacatgtgtttgattagatggtagactgtgggcccaacgatgcattagcgcttgacattttcttgacgggctagttagcaaaagatggtaggcatatcaatccgacgactggtacctcgttccgcaacactaatcgctgtcctgcttattcaaaacgtagatacttcttattcaaaaggtaaatacaaaatgctacttccaagtgaaacgagctgatgtttcttttaccacctatgcctcacaattgtgtcaacatggagcgtgtgctaacatggatattggatcatgctatcgagtttttaatattaaaagagttgaaaagtatttgacacgacaaataataaaaaaataa

SEQ ID NO: 7770 - DNA, 3433 bp, Zea Mays
aaacaatttctttcctttttctctctctcccttcttccacttatctgcaaaaaaaaaaaaaatcgttctgctaatttcggagctcaagacgctcgccccatctctcctctcgtcgtctctctcatccatcctgccaaacaaaaaacgaaaaaaaaaaatactcctgctgtttgctagagcgagtgaaaaaaaaagaatagtctcagaaccatctagagacagcggcccgtggagcggacagctgagcgagcaagcctgcgcccttccgaagtagaagctgtaagatccatcccgttcttgggttcttctccccctctttctctgctcgttcctgaacgcgaattcgggcgacggatttgaggtggcccggtgctgttcttgtcttttgtgggggctgggattcttccccccctctgttgggtcctagagccgtttcctttttccctttcttctctggcggttctgtgcgcgctacctagtgtttgattggcctttggtgttcttgtgattcctcttcattctctctggtcatgaaaggagagagaaaaaaaaagatttgtggatcttcggtgaagtggcttctacagcttgctgacttttcttcctactgatgatttatccttgctcctgcaggttctgatccacagctctcgattccggaaggagttggtcaagaactggggatcctgagttgaatatgatatcaaatccggtggactggtatagtttcggacccggatagaattggtagggatgccagattggagggtgcgtgagtttgaaggtaaattcactgatgagtttgcccacagtaacaacaacaaacatgaaagtggagttgaggctcctggtgtcactagtagtaagaagttgaagcatacagttgccggtgagaaaattcaaggtgtcatccctggaataaatagctcagatccacagaaatgtaattcagagaacatccaacatgagaacaggatagtatcccagaatataaacagtgctggtgactgcattggagactgcaaagacagctccaacgccttctcttcaagggaagaaaatacaatcgctgaaaccagatgtccaacggatgactggaactcctgtcagtttgcactgagcaatggttcatccattctcaataaccacagtgctccacaggatagcctcacttatggagataatgatctaaactacattgattggcctggcattgacaattttgaggatgttgacacattattcaggagatctgatttcacatatgatccgcagcagctggagaatacagatgggttatcttggcttccttcttcagatgctgtttactcttctgatgttgctttgcagcaagggtttgactcgtcttattccgattatgatattctggatgatctctcagcattccaatgtgcagaagataaatcactaccctcagttggtccttcatcggatttatgtgataatcaattcaatgatacctatctgttcagtgagcagaagaatgcgaatgcatatggtgaacagatataccaagaggatgtgatggagttgttgcccactgaccagatatgcagtggacatgaaaacattgatatgttgcagggtggaaaccagtattcatctgaacatacaattcaaggtattgaagacaagaaattttctatagcatcaacttctcagctgagctcctctcagaatttactgaagcaaaggcaccacttagattccaattcaccaagcaacattacttatgaggcctatgaagaaaagttcggtccatctagtggttcttttgcacaaaggaatttaaaagtgcagaagaaaactatgaacatgcaaccaacacagccgataaatgataatgtcatgaacagacatcctcaaacattgacaagaagtgcttcttatccttgtgagaacaatgaatctgaaagaagaggattagggaaaagaactctgggggatcctcaagttacaatgggtacttcaatggtagtggatggctcatttgtatcatccatgtcctctgatatctctgttgaagaaagcagctttcgacaactgcagaatgctgttagtcagctggatgtgcaaaccaaattgtgcattagagatggtttataccgattggcacgaagtgcgcagcacaggcaagttattccaaatatgatgagcagcaatgaagacaacccggatataaaggatctgcagaatgcagaaactttgcgcaaattcgtcgatcctcggagcatcgagacacagacaaacccgatcgaccggtctatcgctctgctacttttccaccagtcatcggaccatgcggctgtggctgtcgacgatgcctcatcacttaaaccccctgctggtagcaaacaccaccagggccctgctgctaaccaaaaccaaggcctgataccagattcatcggtgtattcccctggagatggggcccccaaggatgtacagtccctggacaagttctgaatttatgtccctgctctccatgggcacgttcggttcccggggaatggtcgtctggaacgaatcctggtcggattgcttctctaattgatataagctttgatcggttggaacgattcttggtggaatttcgggataaatgaacaggccctaatgcgtctccgtgacctggttaaggcggcataatacggctttcacatgatgtttctaggcagatgtaaaaaacaagtatattgtgtacccaatagtctgtagcctgttccaatcacattggttttgacatgcgtgtatcctatgggtaggcggccgttgtgctctctagtggcgttgactcacatctgtgtaatctaaaaaaaattctttctttccgtggatctctaactatacctttgaactgatatacgggagtggatggattcggccaacgatcattatgccatgttgctaagaaatgattgcgtgagcctgctgcttctacatgtcaagcctttaatcaatcagcctgggcgttggaaagggacagatggctcttgagcaaaacctttgcttgattaacatgagcaagcaaactgtgggtccgacaatgcattaacggttgacatgtgtttgattagatggtagactgtgggcccaacgatgcattagcgcttgacattttcttgacgggctagttagcaaaagatggtaggcatatcaatccgacgactggtacctcgttccgcaacactaatcgctgtcctgcttattcaaaacgtagatacttcttattcaaaaggtaaatacaaaatgctacttccaagtgaaacgagctgatgtttcttttaccacctatgcctcacaattgtgtcaacatggagcgtgtgctaacatggatattggatcatgctatcgagtttttaatattaaaagagttgaaaagtatttgacacgacaaataataaaaaaataa

SEQ ID NO: 7771 - DNA, 3896 bp, Zea Mays
aaacaaccccgccgcgcatacgcgccaaagccaaacaatttctttcctttttctctctctcccttcttccacttatctgcaaaaaaaaaaaaaatcgttctgctaatttcggagctcaagacgctcgccccatctctcctctcgtcgtctctctcatccatcctgccaaacaaaaaacgaaaaaaaaaaatactcctgctgtttgctagagcgagtgaaaaaaaaagaatagtctcagaaccatctagagacagcggcccgtggagcggacagctgagcgagcaagcctgcgcccttccgaagtagaagctgttctgatccacagctctcgattccggaaggagttggtcaagaactggggatcctgagttgaatatgatatcaaatccggtggactggtatagtttcggacccggatagaattggtagggatgccagattggagggtgcgtgagtttgaaggtaaattcactgatgagtttgcccacagtaacaacaacaaacatgaaagtggagttgaggctcctggtgtcactagtagtaagaagttgaagcatacagttgccggtgagaaaattcaaggtgtcatccctggaataaatagctcagatccacagaaatgtaattcagagaacatccaacatgagaacaggatagtatcccagaatataaacagtgctggtgactgcattggagactgcaaagacagctccaacgccttctcttcaagggaagaaaatacaatcgctgaaaccagatgtccaacggatgactggaactcctgtcagtttgcactgagcaatggttcatccattctcaataaccacagtgctccacaggatagcctcacttatggagataatgatctaaactacattgattggcctggcattgacaattttgaggatgttgacacattattcaggagatctgatttcacatatgatccgcagcagctggagaatacagatgggttatcttggcttccttcttcagatgctgtttactcttctgatgttgctttgcagcaagggtttgactcgtcttattccgattatgatattctggatgatctctcagcattccaatgtgcagaagataaatcactaccctcagttggtccttcatcggatttatgtgataatcaattcaatgatacctatctgttcagtgagcagaagaatgcgaatgcatatggtgaacagatataccaagaggatgtgatggagttgttgcccactgaccagatatgcagtggacatgaaaacattgatatgttgcagggtggaaaccagtattcatctgaacatacaattcaaggtattgaagacaagaaattttctatagcatcaacttctcagctgagctcctctcagaatttactgaagcaaaggcaccacttagattccaattcaccaagcaacattacttatgaggcctatgaagaaaagttcggtccatctagtggttcttttgcacaaaggaatttaaaagtgcagaagaaaactatgaacatgcaaccaacacagccgataaatgataatgtcatgaacagacatcctcaaacattgacaagaagtgcttcttatccttgtgagaacaatgaatctgaaagaagaggattagggaaaagaactctgggggatcctcaagttacaatgggtacttcaatggtagtggatggctcatttgtatcatccatgtcctctgatatctctgttgaagaaagcagctttcgacaactgcagaatgctgttagtcagctggatgtgcaaaccaaattgtgcattagagatggtttataccgattggcacgaagtgcgcagcacaggcaagttattccaaatatgatgagcagcaatgaagacaacccggatataaaggatctgcagaatgcagaaactttgcgcaagtatgatatttctaacaaagatcttatatatacttacacaagcatgaatcagtatctctatggctttgaaaagtgtagtcgttagcattcccctcattgtttaattagaaacttcacattgttgtctaagcgctcctaatgcaccatctttcctctgaaacacccaatgcgatgtgttttgcacagcctgttatctctaaaatatcttggtccttaagatgctagttgattgaggtttaattgggtgtttggttcccctgactaaagtttagttcgtgtcacatcaaatatttaaatatcaattatgagtattaaagataggcttaattaggtttaataaatttgccttgccgtttactgtagcatcgtatgagtgaatcatagactatttaggcttaaaactcatcttaacgtttagtacttagttgtgtaatttattttataattagactacatttaatactttaaacgagtattcaaacatccgatgtgacgggactaaaatttagtcccttggatccaaacgggcccttaaatatagctcttaatttgagtcacagattaattaacctgcctgttgactgtttacatgttatttgtgatgctatagtatctagtccgttatctatagttttagaacagtaagaaatgtaagaaaggaggcagttgattatccttccatggcatggcacaatgtctgaagccgatacttgttacagtacttataatgcaagggaggcaagaaatatgtgtagcctttcctttttgatgtttctgtttggcagattcgtcgatcctcggagcatcgagacacagacaaacccgatcgaccggtctatcgctctgctacttttccaccagtcatcggaccatgcggctgtggctgtcgacgatgcctcatcacttaaaccccctgctggtagcaaacaccaccagggccctgctgctaaccaaaaccaaggcctgataccagattcatcggtgtattcccctggagatggggcccccaaggatgtacagtccctggacaagttctgaatttatgtccctgctctccatgggcacgttcggttcccggggaatggtcgtctggaacgaatcctggtcggattgcttctctaattgatataagctttgatcggttggaacgattcttggtggaatttcgggataaatgaacaggccctaatgcgtctccgtgacctggttaaggcggcataatacggctttcacatgatgtttctaggcagatgtaaaaaacaagtatattgtgtacccaatagtctgtagcctgttccaatcacattggttttgacatgcgtgtatcctatgggtaggcggccgttgtgctctctagtggcgttgactcacatctgtgtaatctaaaaaaaattctttctttccgtggatctctaactatacctttgaactgatatacgggagtggatggattcggccaacgatcattatgccatgttgctaagaaatgattgcgtgagcctgctgcttctacatgtcaagcctttaatcaatcagcctgggcgttggaaagggacagatggctcttgagcaaaacctttgcttgattaacatgagcaagcaaactgtgggtccgacaatgcattaacggttgacatgtgtttgattagatggtagactgtgggcccaacgatgcattagcgcttgacattttcttgacgggctagttagcaaaagatggtaggcatatcaatccgacgactggtacctcgttccgcaacactaatcgctgtcctgcttattcaaaacgtagatacttcttattcaaaaggtaaatacaaaatgctacttccaagtgaaacgagctgatgtttcttttaccacctatgcctcacaattgtgtcaacatggagcgtgtgctaacatggatattggatcatgctatcgagtttttaatattaaaagagttgaaaagtatttgacacgacaaataataaaaaaataa

SEQ ID NO: 7772 - DNA, 1911 bp, Zea Mays
gccaaagccaaacaatttctttcctttttctctctctcccttcttccacttatctgcaaaaaaaaaaaaaatcgttctgctaatttcggagctcaagacgctcgccccatctctcctctcgtcgtctctctcatccatcctgccaaacaaaaaacgaaaaaaaaaaatactcctgctgtttgctagagcgagtgaaaaaaaaagaatagtctcagaaccatctagagacagcggcccgtggagcggacagctgagcgagcaagcctgcgcccttccgaagtagaagctgttctgatccacagctctcgattccggaaggagttggtcaagaactggggatcctgagttgaatatgatatcaaatccggtggactggtatagtttcggacccggatagaattggtagggatgccagattggagggtgcgtgagtttgaaggtaaattcactgatgagtttgcccacagtaacaacaacaaacatgaaagtggagttgaggctcctggtgtcactagtagtaagaagttgaagcatacagttgccggtgagaaaattcaaggtgtcatccctggaataaatagctcagatccacagaaatgtaattcagagaacatccaacatgagaacaggatagtatcccagaatataaacagtgctggtgactgcattggagactgcaaagacagctccaacgccttctcttcaagggaagaaaatacaatcgctgaaaccagatgtccaacggatgactggaactcctgtcagtttgcactgagcaatggttcatccattctcaataaccacagtgctccacaggatagcctcacttatggagataatgatctaaactacattgattggcctggcattgacaattttgaggatgttgacacattattcaggagatctgatttcacatatgatccgcagcagctggagaatacagatgggttatcttggcttccttcttcagatgctgtttactcttctgatgttgctttgcagcaagggtttgactcgtcttattccgattatgatattctggatgatctctcagcattccaatgtgcagaagataaatcactaccctcagttggtccttcatcggatttatgtgataatcaattcaatgatacctatctgttcagtgagcagaagaatgcgaatgcatatggtgaacagatataccaagaggatgtgatggagttgttgcccactgaccagatatgcagtggacatgaaaacattgatatgttgcagggtggaaaccagtattcatctgaacatacaattcaaggtattgaagacaagaaattttctatagcatcaacttctcagctgagctcctctcagaatttactgaagcaaaggcaccacttagattccaattcaccaagcaacattacttatgaggcctatgaagaaaagttcggtccatctagtggttcttttgcacaaaggaatttaaaagtgcagaagaaaactatgaacatgcaaccaacacagccgataaatgataatgtcatgaacagacatcctcaaacattgacaagaagtgcttcttatccttgtgagaacaatgaatctgaaagaagaggattagggaaaagaactctgggggatcctcaagttacaatgggtacttcaatggtagtggatggctcatttgtatcatccatgtcctctgatatctctgttgaagaaagcagctttcgacaactgcagaatgctgttagtcagctggatgtgcaaaccaaattgtgcattagagatggtttataccgattggcacgaagtgcgcagcacaggcaagttattccaaatatgatgagcagcaatgaagacaacccggatataaaggatctgcagaatgcagaaactttgcgcaacctttcctttttgatgtttctg

SEQ ID NO: 7773 - DNA, 2270 bp, Zea Mays
gtgggggctgggattcttccccccctctgttgggtcctagagccgtttcctttttccctttcttctctggcggttctgtgcgcgctacctagtgtttgattggcctttggtgttcttgtgattcctcttcattctctctggtcatgaaaggagagagaaaaaaaaagatttgtggatcttcggtgaagtggcttctacagcttgctgacttttcttcctactgatgatttatccttgctcctgcaggttctgatccacagctctcgattccggaaggagttggtcaagaactggggatcctgagttgaatatgatatcaaatccggtggactggtatagtttcggacccggatagaattggtagggatgccagattggagggtgcgtgagtttgaaggtaaattcactgatgagtttgcccacagtaacaacaacaaacatgaaagtggagttgaggctcctggtgtcactagtagtaagaagttgaagcatacagttgccggtgagaaaattcaaggtgtcatccctggaataaatagctcagatccacagaaatgtaattcagagaacatccaacatgagaacaggatagtatcccagaatataaacagtgctggtgactgcattggagactgcaaagacagctccaacgccttctcttcaagggaagaaaatacaatcgctgaaaccagatgtccaacggatgactggaactcctgtcagtttgcactgagcaatggttcatccattctcaataaccacagtgctccacaggatagcctcacttatggagataatgatctaaactacattgattggcctggcattgacaattttgaggatgttgacacattattcaggagatctgatttcacatatgatccgcagcagctggagaatacagatgggttatcttggcttccttcttcagatgctgtttactcttctgatgttgctttgcagcaagggtttgactcgtcttattccgattatgatattctggatgatctctcagcattccaatgtgcagaagataaatcactaccctcagttggtccttcatcggatttatgtgataatcaattcaatgatacctatctgttcagtgagcagaagaatgcgaatgcatatggtgaacagatataccaagaggatgtgatggagttgttgcccactgaccagatatgcagtggacatgaaaacattgatatgttgcagggtggaaaccagtattcatctgaacatacaattcaaggtattgaagacaagaaattttctatagcatcaacttctcagctgagctcctctcagaatttactgaagcaaaggcaccacttagattccaattcaccaagcaacattacttatgaggcctatgaagaaaagttcggtccatctagtggttcttttgcacaaaggaatttaaaagtgcagaagaaaactatgaacatgcaaccaacacagccgataaatgataatgtcatgaacagacatcctcaaacattgacaagaagtgcttcttatccttgtgagaacaatgaatctgaaagaagaggattagggaaaagaactctgggggatcctcaagttacaatgggtacttcaatggtagtggatggctcatttgtatcatccatgtcctctgatatctctgttgaagaaagcagctttcgacaactgcagaatgctgttagtcagctggatgtgcaaaccaaattgtgcattagagatggtttataccgattggcacgaagtgcgcagcacaggcaagttattccaaatatgatgagcagcaatgaagacaacccggatataaaggatctgcagaatgcagaaactttgcgcaagtatgatatttctaacaaagatcttatatatacttacacaagcatgaatcagtatctctatggctttgaaaagtgtagtcgttagcattcccctcattgtttaattagaaacttcacattgttgtctaagcgctcctaatgcaccatctttcctctgaaacacccaatgcgatgtgttttgcacagcctgttatctctaaaatatcttggtccttaagatgctagttgattgaggtttaattgggtgtttggttcccctgactaaagtttagttcgtgtcacatcaaatatttaaatatcaattatgagtattaaagataggcttaattaggtttaataaatttgccttgccgtttactgtagcatcgtatgagtgaatcatagactatttaggcttaaaactcatcttaacgtttagtactt

SEQ ID NO: 7774 - DNA, 1217 bp, Zea Mays
cccacttcctccacctcatgagtgcaacctccgtggacgaagcattcgcctcgccttgatctccaaccccttccttccttgcttaggagagagagggaggagaggagaggaggaagaagatggagagggcggccccagtgaggagttcccacacctccacggccggcctactcgcgtggcctcaacccgatggcgccgcgtcgcaggcaccacgtcggcctaaccagccgacggaggaattcaggaaggtggtgttcggggggcaggtcaccgaggaggccgacggtctcaacaagacgaagatgaggacgacggcctccgcacccaagtcgaaggagacaacagggatcggcatgtttaaggccgagagcgccgccgccgccgtcacaactgcatcccgtgatcgccaggacgggaccattcctcccaggaagccaacttcagttgctggggtggcgaggcagcgcgaacttagccataccgttgagagttcgggggacggtaagatgaagcggcaggtgtccaatgcgaaatccaaggagctcagtggtcacaacatctttgctgatcatgaagatccgagtcccaacaggtcaagcagctctgctgctgctctggcacatgtgaaaaatgcaaatgtgagctccttctcctttggaaaggccgacatggacagcacagtgaaaacagcaaagaagaaagggtccagcaacaagtctactgatctgatgaatggcaaggccatctccgagagggattcagcgcctgcagggaaacagcctctgaaccgcgcgaagccgaaaggattgagtggtagtagcatttttgcagacgggaaggcctcgacaactggtgatcatgcaggccgtcggacccggcagccacctggcggcgacagcagcatcttgctgggctagcgtgcatatggatattgtcctatgccgccacacgggtggttggtccgtccgtgtgcggccatgttttcctgatcaggcgatgagtcccatctcagatgatctggttcacttctggcgtgtgtatgggtttgtgtctgtgttggttgtgacatgtccaatggaacaaccctatcgctactgcgtgtggtgccgttttgttgtgtagtagtacaacggatgacatgtggtaccgtttcgttgtgtgtacgtggatatacatatgtgtgtttggttattaaatactccctccgtttttaaata

SEQ ID NO: 7775 - DNA, 683 bp, Zea Mays
ttgccgctgcaacaaatctggccagcaccttctcgtttggagatgccaacactgacagcacgccaaagacggcaaggaagataaccggcaagaaggtcaacgacctcaccggcaacgacatcttcaagggggacgtgccgccagcttctgcagagaagcatctgagcaccgcgaagctgaaggagatcactggaagcaacatttttgcagatgggaaggaaccaatccgcgagcgtgtgggcggaaaccgcaagcctcctggcggtgagagcagcatcgcgctgatttagcataatccgggactcagtgtcgacccctagaggaggatttccaccagcaccaggcagcaggctgttggatcgtcagtttggtgtcttgttcctgatcaaggtgcggcagtgaagagccccgttttagtcttgatgatgtttattaactgttggtgtgtgcatgtttggtttggctgtgagataccaatgccgtcctcatcatggcagtgtgtagtgtgtacggttgatgtgtttttacaaataatagctcgagtctgaaccaagctcacgtcttccaccaccgtcaaattattagcagacgtgtatgtaccaagcgttaccgacaccttgcgtgcactaatttacagacgacggatatatgctatgcgtaacccgataaatgttcatgtcatc

SEQ ID NO: 7776 - DNA, 1053 bp, Zea Mays
ccaggttgaaatagtcatgattgtgaactaaaatccataaagcagagaccatagttccaaaatcatgattcatcaagttggtgataggggttcatggttcaccactttccaaaagcgagcagtactgtaagccacatctcgttcgctgaggatggaaccgatcctcccaaaaagcccacatcagtagctgaggtggcaaagcagcgtgagcttagtggcactcttcaaagcgagacggatagtaagacgaagaagcagatctcaaatgcaaagtccaaggagctcagcggccacgacatctttgctgatactctggattccaggtctaacagggcaaggaacccatcgaacggcagcacagcctcacacgcacctgccaaaaatacaaacgccagcaccttctcgtttggagatgccaacactgacagcacgccaaagacggcaaggaagataaccggcaagaaggtcaacgacctcaccggcaacgacatcttcaagggggacgtgccgccagcttctgcagagaagcatctgagcaccgcgaagctgaaggagatcactggaagcaacatttttgcagatgggaaggaaccaatccgcgagcgtgtgggcggaaaccgcaagcctcctggcggtgagagcagcatcgcgctgatttagcataatccgggactcagtgtcgacccctagaggaggatttccaccagcaccaggcagcaggctgttggatcgtcagtttggtgtcttgttcctgatcaaggtgcggcagtgaagagccccgttttagtcttgatgatgtttattaactgttggtgtgtgcatgtttggtttggctgtgagataccaatgccgtcctcatcatggcagtgtgtagtgtgtacggttgatgtgtttttacaaataatagctcgagtctgaaccaagctcacgtcttccaccaccgtcaaattattagcagacgtgtatgtaccaagcgttaccgacaccttgcgtgcactaatttacagacgacggatatatgctatgcgtaacccgataaatgttcatgtcatc

SEQ ID NO: 7777 - DNA, 1026 bp, Zea Mays
catgaaacaaattagaaatcgaagtttaattggtggatggaatctagaaattttagtcacccaccgcataaatgtttgtttcaacaggcgagcagtactgtaagccacatctcgttcgctgaggatggaaccgatcctcccaaaaagcccacatcagtagctgaggtggcaaagcagcgtgagcttagtggcactcttcaaagcgagacggatagtaagacgaagaagcagatctcaaatgcaaagtccaaggagctcagcggccacgacatctttgctgatactctggattccaggtctaacagggcaaggaacccatcgaacggcagcacagcctcacacgcacctgccaaaaatacaaacgccagcaccttctcgtttggagatgccaacactgacagcacgccaaagacggcaaggaagataaccggcaagaaggtcaacgacctcaccggcaacgacatcttcaagggggacgtgccgccagcttctgcagagaagcatctgagcaccgcgaagctgaaggagatcactggaagcaacatttttgcagatgggaaggaaccaatccgcgagcgtgtgggcggaaaccgcaagcctcctggcggtgagagcagcatcgcgctgatttagcataatccgggactcagtgtcgacccctagaggaggatttccaccagcaccaggcagcaggctgttggatcgtcagtttggtgtcttgttcctgatcaaggtgcggcagtgaagagccccgttttagtcttgatgatgtttattaactgttggtgtgtgcatgtttggtttggctgtgagataccaatgccgtcctcatcatggcagtgtgtagtgtgtacggttgatgtgtttttacaaataatagctcgagtctgaaccaagctcacgtcttccaccaccgtcaaattattagcagacgtgtatgtaccaagcgttaccgacaccttgcgtgcactaatttacagacgacggatatatgctatgcgtaacccgataaatgttcatgtcatc

SEQ ID NO: 7778 - DNA, 4162 bp, Zea Mays
cttaggttaagttttctagcttctacatcttgtcccccttgtgaatgaggctgaaatttgatgagcttaagttaatctcagagaaagatccatgcagtgaaagacgcgattttcttattgaagtcctagttgctttttttgagaagcggcaatcccaaaaagatgcagtaaatgcacttcctttgtatccaaatgagcagatcatgtgggatgaaagccttgttcctagcattaattactctggagaaggctgtcttgccctcccaaaactcaatctccaattcctgacgcttcatgattatttgttaagaaatttcaatctgtttcgtcttgaatcaacctatgaaattcgtgaagacattcaggaagctgttcctcatctacatgcttatatcaataatgagggagagacagccttccgtggatggtcaagaatggctgttccgatcaagggatttaagattacagaagtgaagcagccaaacattggagaagttaagccttctgctgtaactgctgatgttactttcagcatatcaagctacaggtatcagataaaatctgaatgggatgctctgaaggagcatgatgttctatttttgctgtcaatccgcccttcatttgaacctcttagccctgaagaggctgaaaaatcaactgtgccagaaaggttaggattgcaatatgtacgtggatgtgaggttattgaaattcgtgatgaggaaggagcactcatgaatgatttcacaggaaggataaaacgagaagagtggaaaccacccaaaggtgaaattcgtactgtccgagttgccttagatacagcgcagtaccacattgatgttaccgagacagcagagaagggcacagaaaatgtgtatggaacatttaatattctaatgagaaggaaacccaaggagaataatttcaaagcaatcctggaatctatacgtgatctaatgaatgaaacatgtgtagttccagaatggttgcataacatattcttgggttatggaaatccttcggccgcacagtggatgaatatgcctgatcttctggaagttatagatttcaaggacacttttcttgatgccaaccatgttcagcaaagttttccagattaccaggttacatttatcaattctgatggtacaaaaaacctgcatccaagtcccccttttaaaatcaggctatccaagaaaatgagggaaagcagtcatgctttacctggcaacatgaactccaatttgactgttaagagcagaaataatatggctgatggggagcctcagaaagagaaactaattgttgaaacttacattccagctgatcctgggccgtatcctcaagataaacctaaacagaactcagtgaggttcacaccaactcagatcggtgctataatatctggtattcaacctgggttgacgatggttgttggtcctcctggtacgggaaaaacagatactgctgtgcagatattaaatgttctatatcacaactgtccttcacaaagaacactgattataacccactccaatcaggctttgaatgatttatttgagaagataatgcagagggatgtgcctgctaggtaccttctccgccttggtcagggtgagcaagaattggccactgatcttgattttagtcgtcaaggtcgtgtcaacgctatgctggtccggcggctagagctgctcggtgaagtttctaaattggcgagatctcttcgtcttccagaagatgtgggctacacatgtgaaactgctgcatatttttggctattacatgtttatgcccgttgggaacaattcttagctgcctgtgctcaaaatcaagacaaaccctcttttgtcaaagaccgcttccccttttcagagttcttttcagatactccgcagcctatttttaccggcgagtcatttgagatggatatgcatgcagcgaaaggttgtttcaaacatctttctacaatattccaagagttggaggagtgtagggcttttgagctacttaagtcaacagtggagcgagcaaactatctaatgactaaacaggccaagatagttgctatgacttgtactcatgcagcattgaagaggagggactttcttcaattaggtttcaaatttgacaatttgctgatggaagaaagtgcacaaatattggagatagaaacttttataccgatgctgctgcagcggcaggaagatggccatgctcgtcttaaacgttgcattttaattggtgaccaccatcagttaccccctgttgttaagaacatggcttttcagaagtatagccacatggaccagagtctctttacaaggtttgttcgacttggtgtcccttatattgagctcaatgcccagggtcgtgcaagacctagtattgctgaactttataactggagatacagggagctgggagatctgccttatgtccgtgagcaagcaatcttccataaagctaacgccggattctcttttgagtatcagttagttgatgttcctgattataagggaaaaggtgagtcagcgccttctccttggttttaccagaatgaaggggaggctgagtatattgttagtgtgtatatctatatgcgcctgattggctaccctgccaataagatttcaatattgaccacctacaatggtcagaagcttcttattcgtgatgttatcaacaaaagatgcaaaccatggaatattgagccccctaacaaggttaccactgtggacaagttccagggccagcaaaatgatttcattttactttctcttgtccgtacccgttttgtgggtcatcttcgtgatgtcagaagacttattgtagctatgtcccgtgctcgtctgggcttgtacgtgttctgccgtcgttcactgtttgaacaatgttacaaattgcaaccaacattccagctgctcctccaaagatctgataagcttgccttgaatcttgaggagtgcactccttttaccgagcgacctttggaggaaactggaaacatccattacattactggtattgaagacattaattcatctagtaaagttcaggctggaacatcttcgtcaagtgcaatacatgcagtattatgctcctccggcaaatgaactgcctcaagcagcaccagaaaatattgctgatgcaatcccttctgaaaatggcaatgctggaagggctctgaatgatggaaacgaggacatgacccgggaagaaaatggtggtgcaactgacacagtgatcagtaataggatagaggaagacagcgttgaggcaaaggatgacatgacacaggaaggggacaagggtgaagtgagtggcaagggtcacatggctacagaggataggaaaggggaagcacaaggtggcgcagatggcaagctggaggaagcaaatgtgatgtcggcggacaagatgatggaggaagcaaatgcgacgtcggcagacaagatggaggaagcaaatgccacgtcggcggataagatggaagaagcagatgccacgtcgtcggacaagatggaagaagcagatgccacattgccggacaagatggaggaagcaaatgccatgtcgccggacaggatggaggagaaaaattctgatccgaaggacaagatggatgaggagtgacgtggtggtgtaaccagttttgaaatagcggtagacttgttctgtcagccgcatatcttgatttggaacatcatgtattcacctgtgttaccgcagatgaagactgatacgtgctccccaagaggtgtagccttgtgggcagaatcaagatcgacatatgatgaccatgttcctgcggttaatggtggtgaaggctgttttccctaccatcttggccaggctatgctggaaaatgttccttctcttccagccaagggtatccatgtttccgcatgtgtttaatcgtgtaaactgtagaggattttttgggtagttttttctgaaacacccgttccatctatcgttgtctccgtaacataacacagctggaacgttgcttttgtatacttgactgactactataattttggcacaagcattagatttttgcagatttgataggccttatcggccattcaaaattttgatttgacagaccaactcacccagcctataaaagagaagcaaatgggagtaagaaataaat
